(19) United States
(12) Patent Application Publication
(10) Pub. No.: US 2017/0298453 A1
(43) Pub. Date: Oct. 19, 2017

(54) SYSTEMS AND METHODS TO DETECT STEM CELL STRESS AND USES THEREOF

(71) Applicant: Wayne State University, Detroit, MI (US)

(72) Inventors: Daniel A. Rappolee, Grosse Pointe Farms, MI (US); Elizabeth Puscheck, Grosse Pointe Farms, MI (US)

(21) Appl. No.: 15/503,375

(22) PCT Filed: Aug. 11, 2015
(86) PCT No.: PCT/US15/44701

§ 371 Date: Feb. 10, 2017

Related U.S. Application Data
(60) Provisional application No. 62/039,549, filed on Aug. 20, 2014.
(60) Provisional application No. 62/159,675, filed on May 11, 2015.

(51) Int. Cl. C12Q 1/68; C12N 5/073; C12N 5/0735; G01N 33/50

(52) U.S. Cl. CPC C12Q 1/6897; G01N 33/5073; C12N 5/0605; C12N 5/0606; C12N 2510/00

(57) ABSTRACT

Systems and methods (S/M) to detect stress in stem cells are described. The S/M, including modified stem cells, assays and high throughput screens, can be used to identify compounds or other potential stressors that can negatively affect development potential.

### CROSS REFERENCE TO RELATED APPLICATIONS

[0001] This application is a national phase of International Patent Application No. PCT/US2015/044701, filed on Aug. 11, 2015, which claims priority to U.S. Provisional Application No. 62/036,549, filed on Aug. 12, 2014, and U.S. Provisional Application No. 62/159,675, filed on May 11, 2015, the entire contents each of which are incorporated by reference herein in their entirety.

### FIELD OF DISCLOSURE

[0002] The present disclosure provides systems and methods (S/M) to detect stress in stem cells. The S/M, including modified stem cells, assays and high throughput screens, can be used to identify compounds or other potential stressors that can negatively affect development potential.

### BACKGROUND OF DISCLOSURE

[0003] Stem cells are unspecialized cells that are able to renew themselves through cell division for long periods. Stem cells can be subdivided and classified on the basis of their potency. A totipotent stem cell is produced from fusion between an egg and a sperm. Stem cells produced by the 1^{st} few divisions of the fertilized egg cell are also totipotent stem cells. These cells can grow into any type of cell that makes up the developing organism, extra-embryonic tissues (e.g., yolk sac and placenta) and embryo. Pluripotent stem cells are descendants of totipotent cells that can differentiate into any cell type except for placental cells. Multipotent stem cells are descendants of pluripotent stem cells that can produce only cells of a closely related family of cells (e.g. blood cells such as red blood cells, white blood cells and platelets, or all placental lineages). Progenitor (sometimes called unipotent) cells can produce only one cell type, but have the property of self-renewal which distinguishes them from non-stem cells.

[0004] Many compounds are embryotoxic and exposure to them may interfere with stem cell and resulting embryo development and induce abnormal embryogenesis and malformations, if not pregnancy termination. As one example, pharmaceutical compounds administered to pregnant women can be embryotoxic. Further, compounds encountered within the environment, or cosmetics also can be harmful. Thus, there is a need to test compounds and other potential stressors for potentially negative effects on developing stem cells and embryos.

[0005] Currently-available toxicological stress tests typically adopt one of two approaches. The 1^{st} approach is to differentiate stem cells by removing growth factors that support potency to test stress effects during production of differentiated, functional cell lineages. A drawback of this approach is that single lineage tests may find toxicants for only that particular lineage. The second approach is to measure outright lethality and morbidity of stem cells in the presence of potency-maintaining growth factors. This approach, however, does not identify compounds or events that stress, but do not kill stem cells. That is, this approach does not identify lower, submorbid stress doses that lead to maladaptive runting and toxic responses to the embryo that do not necessarily kill stem cells.

### SUMMARY OF DISCLOSURE

[0006] The current disclosure provides S/M to detect stress in stem cells where the detected stressor might affect all stem cell lineages and might not kill the stem cells. Testing for stress before differentiation occurs is of great benefit because stress at this stage can affect all later-developing cell lineages. Thus, the S/M provide a unifying test.

[0007] The S/M also can detect stressors that act at sub-morbid runting doses that slow growth and negatively impact and imbalance differentiation of stem cells. Thus, the S/M provide for more sensitive stress detection that does not require cell death to observe stress. Imbalances of differentiation forced on cultured stem cells measure organismal responses not needed for adaptation to culture. Thus stress induced differentiation should reduce or replace the need for slower and more costly gestational animal in vivo reproductive toxicology tests.

[0008] The S/M are based on the finding that stressed stem cells (i) slow their growth and (ii) differentiate under physiological conditions that would normally maintain their toti- or pluri-potency. That is, they differentiate earlier than they normally would. Early differentiation of stem cells depletes the number of stem cells available to differentiate later in the development process, reducing the number of stem cells available to form organ systems that arise later during development. This type of early, stress-induced differentiation is referred to as “prioritized differentiation.” Prioritized differentiation negatively affects development potential.

[0009] The disclosure provides numerous S/M to detect stress in stem cells by measuring potency factors (and markers) and prioritized differentiation factors (and markers). “Potency factors” can be thought of as “brake pedals” for differentiation. That is, their expression and activity is associated with toti- or pluri-potency. “Differentiation factors” can be thought of as “accelerator pedals” for differentiation. That is, their expression and activity is associated with normal differentiation that occurs when potency-maintaining extracellular growth factors are removed. Under stress conditions, however, potency factors can decrease and differentiation factors can increase even in the presence of potency-maintaining extracellular growth factors. This type of differentiation is referred to as “compensatory” or “prioritized” differentiation. That is, under compensatory or prioritized differentiation, stem cells can be induced by stress from a toti- or pluripotent state into a more differentiated/committed cell type despite the presence of growth factors that maintain potency. Stress also slows stem cell growth and induces differentiation in fewer-than-normal stem cells to further deplete stemness to “compensate” for fewer cells. Compensatory or prioritized differentiation of stem cells despite potency-maintaining growth factors also prioritizes differentiation to emphasize creating sufficient 1^{st} lineage differentiation at the sacrifice of later lineages. Decrease in nuclear potency factors and an increase in 1^{st} lineage determining nuclear differentiation factors provide (early lineage>later lineage) “markers” that are evidence that differentiation is enabled, but their activity does not necessarily lead to or cause the potent or differentiated state. The differentiated state requires sufficient loss of nuclear potency factors and/or gain of nuclear differentiation nuclear factors. But, different stressors may more strongly release the brake pedal (decrease potency) or engage the accelerator pedal.

[0010] Potency factors and/or markers include: Oct4; Sox2; Nanog; Rex1; TEAD4 (TEA domain family member 4); Errβ (estrogen receptor-related-β); Cdx2 (caudal homeobox domain); Id2; Klf5 (Krueppel-like factor 5); PDCD2 (programmed cell death 2); CARM1 (coactivator-associated-arginine methyltransferase); Sall4 (Spalt-like transcription factor); SSEA1; SSEA3; SSEA4; TRA-1-60; TRA-1-81; and Elf5 (E74-like factor 5 (ets domain transcription factor).

[0011] Prioritized differentiation factors and/or markers include: Lrp2; Dab2; Fgf5 (fibroblast growth factor 5); Pdgfra (Platelet-derived growth factor receptor A); Sox17 (SRY box containing gene 17); Gata4/6; PAX8 (Paired box 8); NEFL (Neurofilament protein light chain); TSHR (thyroid stimulating hormone receptor); Brachyury; Laminin; AFP (α-feto-protein); Nestin; Goosecoid; MEK1 (mitogen-activated protein kinase kinase 1); MEK2; AKT (RAC-alpha serine/threonine-protein kinase/protein kinase B); PL1 (Placental lactogen-1); Plf (proliferin); PL2 (placental lactogen-2; Hand1; Stra13; Tpbpa; Mash2 (mouse achaete scute 2); Gcm1 (glial cells missing 1); Tfeb; Ctsq (Cathepsin Q); AMPK; SAPK/JNK (stress-activated protein/jun Kinase); Cubulin; TBP (TATA binding protein); Vimentin; Snail; GSK3; and JAK/STAT.

[0012] The S/M can be used to assess compounds and other environmental conditions for stress effects on stem cells. The S/M can be used to screen compounds and other environmental conditions for stress effects on stem cells before the compounds or other environmental conditions are developed, commercialized or released into the workplace or atmosphere. The S/M include modified stem cells, assays and high throughput screens (HTS).

### BRIEF DESCRIPTION OF THE FIGURES

[0013] FIGS. 1A-1C. SAPK mediates decreased Gcm1 and Tpbpa and increased Hand1 at all O₂ levels. There are greater effects as O₂ deviates from the stemness optimum of 2% O₂. Trophoblast stem cells (TSCs) were passaged and cultured at 20, 2, or 0.5% O₂ overnight. FGF4 was replenished the next day at time zero, and SAPK inhibitor SP600125 (10 μm or 50 μM) was co-incubated with TSCs for 2 days at the indicated O₂ levels±SP600125. Markers were quantitated using qPCR. (FIG. 1B) is a graph derived from data in (FIG. 1A), where the highest inhibited group was subtracted from the uninhibited group at each O₂ level (the subtracted difference is shown as a color inset in the histogram bars of highest expression of each marker). The difference at 2% O₂ was set to a baseline of “0” as it was previously shown that 2% O₂ was the optimal level that produces the least stress (activated SAPK) and highest proliferation (Zhou (et als., omitted from citations), 32:475, 2011 (Zhou, 2011)). In (FIG. 1C) Cdx2, Id2, and Errβ decreased at 0.5% O₂ in the presence of FGF4, but SAPK inhibitor had no effect at any O₂ level.

[0014] FIG. 2. SAPK mediates suppression of Gcm1 and TPBPa, and induces Hand1 at all O₂ levels, but there are greater effects for these lineage choices at 0.5% O₂ and 20% O₂ and the least effect is seen at 2% O₂ where it has been reported that SAPK activity is lowest. TSCs were grown at 20% O₂, then passed and switched to 20, 2, or 0.5% O₂ overnight. FGF4 was replenished the next day at time zero, JNKI1 (1 μM) was preincubated with TSC 3 hr prior to time zero, then cells were cultured for 2 days at the indicated O₂ levels with or without the two SAPK inhibitors. RNA was isolated and quantitated using qPCR.

[0015] FIG. 3A and FIG. 3B. Nuclear differentiation factors have complex time- and O₂ level-dependent regulation over 7 days of FGF4 removal and TSC differentiation. TSCs were grown at 20%, then passed and switched to 20, 2, 0.5, or 0% O₂ for one day and RNA was isolated to emulate previous studies. FGF4 was removed after one day, then cells were cultured for 1, 2, 4, or 7 days, and RNA was isolated and quantitated using real time TaqMan qPCR. (FIG. 3A) shows histograms for loss of mRNA for four nuclear differentiation markers, Gcm1, Tfeb, Hand1, and Mash2, and one nonnuclear marker Tpbpa (n=3 biological replicates, error bars show standard error of the mean). (FIG. 3B) shows a three dimensional histogram of time in the x axis, O₂ levels in the y axis, and average levels of the four nuclear differentiation factors and one nonnuclear lineage marker in the z axis.

[0016] FIGS. 4A-4D. Multipotency factors undergo rapid loss on day 1 at 0.5% O₂ with FGF4 present, but the least loss after 7 days of FGF4 absence. Terminal differentiation is lowest at 0.5% O₂ and highest at 20% O₂ after 7 days, and labyrinthine placental lineages are dependent on 20% O₂. (FIG. 4A) shows averages of loss of a mean of three potency factors, (FIG. 4B) the gain of a mean of five differentiation factors during seven days of differentiation caused by removal of FGF4 dependent on four O₂ levels, and (FIG. 4C) shows the five differentiation factors averaged in (B), but only at highest differentiation at day 7. There are three types of O₂-dependence from left to right; (1) PL1 has no difference between 20 and 2, but decreases at hypoxic 0.5% O₂ to 41% O₂. (2) Plf and Ctsq marker loss increased at each O₂ level; 2-0.5-0% O₂. (3) Two markers, PL2 and SynTa have the greatest O₂-dependence, decreasing greatly to 21 and 12% at 2% O₂ and 8 and 9% at 0.5% O₂, respectively. (FIG. 4D) shows the oxygen-dependent accumulation of mRNA of a marker of the 1^{st} lineage (PL1) and a later lineage (synTA). Note that synTA always requires highest O₂ but PL1 is induced by hypoxic stress early but requires highest O₂ levels at day 7.

[0017] FIG. 5. Although greatest multipotency factor loss and differentiation factor gain initiate at 0.5% O₂ with FGF4 for 24 h, terminal differentiation is lowest at 0.5% O₂ and highest at 20% O₂ after 7 days when multipotency is lowest.

[0018] TSCs were grown at 20% O₂, then passed and switched to 20, 2, or 0.5 O₂ overnight. RNA was isolated and five terminal differentiation marker mRNAs were quantitated using real time TaqMan qPCR. The filled in triangles below PL1, Plf and SynTa show tendencies of all three to be dependent on high O₂ at 7 days, but early lineage markers Pl1 and Plf are induced by hypoxia at day 1, but not SynTa

[0019] FIGS. 6A-6D. (FIG. 6A) TSCs that differentiated without FGF4 for 7 days had the highest ATP levels at 0.5% O₂ and the lowest ATP in the rank order 20%<2%<0% compared with baseline stem cells at 20% O₂+FGF4. TSCs were cultured in 0-20% O₂ for 0-7 days±FGF4 as indicated, rapidly frozen, and assayed for free ATP (n=4). (FIG. 6B) At 7 days, FGF4 absence increased terminal differentiation markers 8-20 fold at 20% O₂, but lower differentiation levels at 0.5% O₂ were not increased by a sorbitol dose, which induces high levels of differentiation at 20% O₂. TSCs were cultured for 7 days±FGF4 at 20% or 0.5% O₂±100 mM sorbitol. mRNA was purified and reverse transcribed, then analyzed for relative amounts of 3 terminal differentiation markers that were normalized to housekeeping mRNAs. Triplicate experiments are shown, with mean±s.e.m. (error bars). Sorbitol does not significantly increase differentiation markers at 0.5% O₂ (FIG. 6C) Mitochondrial membrane charge increased between 2-3 after FGF4 removal. (FIG. 6D) Correspondingly, at 7 days, mitochondrial Δψₘ increased only at O₂≧2% with FGF4 removal. TSCs were cultured for 7 days at 20% O₂ (a,d), 2% O₂ (b,e), or 0.5% O₂ (c,f) with FGF4 (a-c) or without FGF4 (d-f) and stained with JC1. Micron bar in micrograph (a) indicates 50 μM. Green fluorescence indicates monomeric stain and low membrane charge and red fluorescence indicates polymeric stain and high charge. For original color fluorescence figures see (Xie, Stem Cell Research, 13:478, 2014 (Xie, 2014)).

[0020] FIGS. 7A-7D. FGF4 maintains inactive mitochondria at 20%, 2%, or 0.5% O₂ (FIG. 7A) and mitochondria display higher mitochondrial membrane potential levels (Δψₘ) at 20%>2% but remain depolarized at 0.5% O₂ after FGF4 removal. TSCs were cultured for 2 days at 20% (FIG. 7A, FIG. 7C) or 2% O₂ (FIG. 7B, FIG. 7D) with FGF4 (FIG. 7A, FIG. 7B) or without FGF4 (FIG. 7C, FIG. 7D) and then stained for Δψₘ using the MitoTracker dye (A). Micron bars in micrograph A indicate 50 μM.

[0021] FIGS. 8A-8F. To confirm mitochondrial inactivity, TSCs were cultured for 2 days at 2% O₂ (FIG. 8A, FIG. 8C, FIG. 8E) or 20% O₂ (FIG. 8B, FIG. 8D, FIG. 8F) with FGF4 (FIG. 8A, FIG. 8B) or without FGF4 (FIG. 8C-FIG. 8F) and then stained with the probe JC1 or TMRM as indicated, in the presence or the absence of uncoupler FCCP as a control. Micron bars in micrograph A indicate 50 μM.

[0022] FIGS. 9A-9E. FGF4 maintained COX subunit I and PKM2 in the phosphorylated state at all O₂ levels, but total COX and PKM2 levels are regulated by hypoxia and did not change with FGF4 removal. TSCs were cultured for 2 days±FGF4 at 0-20% O₂ and assayed by immunoblot for phosphorylated cytochrome c oxidase (pCOX) using a phospho-specific antibody (FIG. 9A), total COX (FIG. 9B), actin b (ACTB) and, pPKM2 (FIG. 9C), PKM1 (FIG. 9D), or PKM2 (FIG. 9E). Histograms show the pCOX, total COX levels, PKM1, PKM2, and pPKM2 normalized to ACTB, with bars showing the average of 3 experiments±s.e.m.

[0023] FIGS. 10A and 10B. In TSCs cultured for 7 days at 20% O₂, all terminal differentiated lineages were O₂ sensitive, but PL2 and CtsQ were most inhibited by the mitochondrial inhibitors cyanide and antimycin A, and PL2 was most highly induced by the mitochondrial activator DCA at 2% O₂. (FIG. 10A) TSCs were incubated for 7 days±FGF4 at 20%, 2%, or 0.5% O₂ with the mitochondrial activator DCA. TSCs were cultured for 7 days at 20% O₂, ±FGF4, and with mitochondrial inhibitors antimycin A or cyanide (FIG. 10B). The cells were then lysed and assayed by qPCR for the relative levels of 5 terminal differentiation markers PL1, PL2, Plf, CtsQ, and synTa. The experiment was repeated 3 times and bars show the average±s.e.m., (a) indicates no significant difference and (b) indicates a significant difference (p<0.05) between TSCs with FGF4 removed without or with mitochondrial agonist or antagonist. Where changes in markers are significant (b), the increase or decrease due to mitochondrial agonist or antagonist is shown above the histogram bar.

[0024] FIG. 11. Diagram showing that hypoxia, mitochondrial agonists, and antagonists affect 3 markers of 2 differentiated lineages at the surface of the labyrinthine placenta. COX and PKM2 total protein levels are regulated by hypoxia and fine-tuned by phosphorylation induced by FGF4.

[0025] FIG. 12. TSCs produce twice as much ROS (H₂O₂) 48 hr after FGF4 removal.

[0026] FIGS. 13A-13F. Hyperosmotic stress effects on cell proliferation in murine embryonic stem cells (mESCs). (FIG. 13A) mESCs were cultured in the presence of 0-400 mM sorbitol for either 4 or 24 hr and transmitted light micrographs were taken. (FIG. 13B) mESCs were cultured±leukemia inhibitory factor (LIF) and ±200 mM sorbitol for 0-72 hr. mESCs were trypsinized and counted with a hemocytometer following trypan blue exclusion. Error flags represent standard error of the mean, n≧3. (FIG. 13C) Doubling rates were calculated and tabulated from cell counts in (FIG. 13B). (FIG. 13D) mESCs were incubated in the presence of LIF±200 mM sorbitol for 24, 48, or 72 hr and transmitted light micrographs were taken. (FIG. 13E) mESCs were cultured in the presence of 200 mM sorbitol for 0-24 hr. In some wells, cells were lysed, and proteins were fractionated using sodium dodecyl sulfate-polyacrylamide gel electrophoresis (SDS-PAGE), blotted, and probed for the presence of the caspase 3 cleavage product (n=3). Time-matched cells were fixed, and stained for the cleavage product of caspase 3 with Hoechst staining of the nuclei. (FIG. 13F) mESCs were cultured for 24 hr±sorbitol (200 mM), ±phosphoinositide 3-kinase (PI3K) inhibitor, and LY294002 (25 μM); transmitted light micrographs were taken. All micrographs were taken at 100× Scale bar=50 mm.

[0027] FIG. 14. Activation of p38, MEK1/2, c-Jun N-terminal kinase (JNK), and AKT by hyperosmolarity. mESCs were incubated in 200 mM sorbitol for 0-60 min to detect kinetics of enzyme activation. Cells were lysed and proteins were fractionated using SDS-PAGE, blotted, and probed for phosphop38 (Thr180/Tyr182), phospho-JNK (Thr183/Tyr185), phospho-MEK1/2 (Ser217/221), or phospho-AKT (Ser473). Blots are representative of triplicate experiments. Phospho-proteins and their loading controls are grouped between black lines.

[0028] FIG. 15. Efficacy of enzyme inhibitors during hyperosmotic stress. mESCs were incubated for 4 hr in the presence of 200 mM sorbitol with or without one of the enzyme inhibitors SB202190 (p38), PD98059 (MEK1), U0126 (MEK1/2), LJNKi-1 (JNK), AKTi (AKT), or LY294002 (PI3K). Cells were lysed and proteins were fractionated using SDS-PAGE, blotted, and probed for phospho-p38 (Thr180/Tyr182), phospho-JNK (Thr183/Tyr185), phospho-ERK1/2 (Thr202/Tyr204), or phospho-AKT (Ser473). Blots are representative of triplicate experiments.

[0029] FIGS. 16A-16E. Hyperosmotic stress in mESCs impacts transcription factor expression at protein and mRNA levels. (FIG. 16A) The inner cell mass (ICM) of the blastocyst coexpresses Oct4/Rex1/Nanog in pluripotent cells at E3.5. After E3.5 a Rex1 subpopulation delaminates from the ICM and expresses primitive endoderm (PrEndo) marker, Lrp2, at E3.5 and extraembryonic endoderm (ExEndo) marker, Dab2, at E4.5. At E4.75, Rex1 decreases in the remaining cells of the ICM and, by E5.5, fibroblast growth factor (FGF)5 is expressed in embryonic ectoderm (EmEcto). Upward arrow indicates that expression is maintained or increasing; downward arrow means that expression is decreasing or absent. (FIG. 16B) mESCs were incubated in 200 mM sorbitol for 0-24 hr and lysed. Proteins were fractionated using SDS-PAGE, blotted, and probed for Oct4, Sox2, Nanog, or Rex1. Histograms show relative expression of each protein when normalized to amido black. (FIG. 16C) Total RNA was isolated and subjected to reverse transcription to form complementary DNA (cDNA). Real-time quantitative PCR (RTqPCR) was performed with Oct4, Nanog, and Rex1 primers. Histograms represent relative fold change in mRNA expression using the ddCt method. (FIG. 16D) mESCs in monolayer were incubated±sorbitol and ±LIF for 24 hr. Dab2, Lrp2, and Fgf5 mRNA transcript levels were examined by RT-qPCR. Histogram shows the relative fold changes when compared with time zero, no stress. Error flags are the standard error of the mean (n=3). “a” indicates significant difference for sorbitol +LIF compared with LIF− at 24 hr. (P<0.05, ANOVA and Student-Newman-Keuls post hoc tests). (FIG. 16E) mESCs were treated with sorbitol for 72 h, fixed, and probed for Nanog. Micrographs taken at 40× Scale bar=50 μm. Error bars represent standard error of the mean (n=3); “*” denotes a significant difference from the 0 hr untreated control; “a” denotes significant difference when compared with 4 hr+sorbitol time point. “b” Indicates that the expression nadir (variable in Nanog) was significantly different from the unstressed mESCs at time zero (4 and 6 hr were chosen to represent the nadir in this histogram). ANOVA+Student-Newman-Keuls post hoc tests, P<0.05. In (FIG. 16A) and (FIG. 16D) diagonal lines indicate primitive endoderm starting at E3.5 through extraembryonic endoderm at E5.5 and vertical lines indicate primitive ectoderm starting at E5.5.

[0030] FIG. 17. MG132 proteasome inhibitor effects on Oct4, Nanog, and Rex1 during sorbitol stimulation of mESCs. mESCs were treated for 4 hr with 0 or 200 mM sorbitol±10 μM MG132 and then lysed. Total cellular protein was fractionated using SDS-PAGE, blotted, and probed for Oct4, Nanog, or Rex1. Error bars represent standard error of the mean (n=3); “*” denotes a significant difference from the untreated control; “a” denotes significant difference when compared with 4 hr+sorbitol time point. ANOVA and Student-Newman-Keuls post hoc tests: Oct4 P<0.002; Nanog P<0.005; and Rex1 P<0.001.

[0031] FIGS. 18A-18D. Lactacystin effects on Oct4, Nanog, Rex1 during sorbitol stimulation of mESCs. mESCs were treated for 4 hr±200 mM sorbitol±25, 50 μM lactacystin, then photographed before lysing. FIG. 18A, FIG. 18B, FIG. 18C) Total cellular protein was fractionated using SDS-PAGE, blotted, and probed for Oct4, Nanog, or Rex1. Error bars represent standard error of the mean (n=3); ‘*’ denotes a significant difference from the untreated control; ‘a’ denotes significant difference when compared to 4 hr+sorbitol timepoint. ANOVA+Student-Newman-Keuls post hoc tests, Oct4 p=0.000; Nanog p=0.035; Rex1 p=0.11. FIG. 18D) mESCs were stressed with or without lactacystin and micrographs were taken at 100×. Scale bar=50 μm.

[0032] FIGS. 19A and 19B. Enzymes activated during 4 hr of hyperosmotic stress initiate the differentiation program in mESCs. mESCs were incubated in 200 mM sorbitol for 0-4 hr with or without the presence of (FIG. 19A) PD98059 (10 μM), or (FIG. 19B) LY294002 (25 μM), L-JNKi-1 (2 μM), or U0126 (40 μM). mESCs were lysed, and proteins were fractionated using SDS-PAGE, blotted, and probed for Oct4, Nanog, or Rex1. Histograms show relative expression of each protein when normalized to amido black expression. Error flags represent standard error of the mean (n≧3). “*” denotes significant difference from unstressed mESCs. “a” indicates significant difference from stress-only time point. ANOVA and Student-Newman-Keuls post hoc tests (P<0.05).

[0033] FIGS. 20A-20C. p38MAPK rescues pluripotency of mESCs during 24 hr of hyperosmotic stress. (FIG. 20A) mESCs were incubated±200 mM sorbitol for 0-24 hr and ±p38 inhibitor SB202190 (10 μM). mESCs were lysed, and proteins were fractionated using SDS-PAGE, blotted, and probed for Oct4 or Nanog. (FIG. 20B) Phase micrographs of mESCs following 24 hr of culture in the presence/absence of stress and p38MAPK inhibitor, SB202190. Scale bars=50 μm. (FIG. 20C) mESCs were incubated±200 mM sorbitol for 0-24 hr±either U0126 or LY294002 (25 μM). mESCs were lysed and proteins were fractionated using SDS-PAGE, blotted, and probed for Oct4 or Nanog. Histograms show relative expression of each protein when normalized to amido black expression. Error flags represent standard error of the mean (n≧3). “*” denotes significant difference from unstressed mESCs. “a” indicates significant difference from stress-only time point. ANOVA and Student-Newman-Keuls post hoc tests (P<0.05).

[0034] FIGS. 21A and 21B. JNK-dependent signaling suppressed Rex1 expression during 24 hr of hyperosmotic stress. (FIG. 21A) mESCs were incubated±200 mM sorbitol for 0-24 hr±(A) p38MAPK inhibitor SB202190 (10 μM) or PI3K inhibitor LY294002 (25 μM); or JNK inhibitor L-JNKi-1 (2 μM). mESCs were lysed, and proteins were fractionated using SDS-PAGE, blotted, and probed for Rex1. Histograms show relative expression of each protein when normalized to amido black expression. Error flags represent standard error of the mean (n≧3). “*” denotes significant difference from unstressed mESCs. “a” indicates significant difference from stress-only time point. ANOVA and Student-Newman-Keuls post hoc tests (P<0.05). (FIG. 21B) To test the reversibility of the Rex1 loss during sorbitol stress, mESCs were incubated—200 mM sorbitol for 0-4 hr and then sorbitol was removed from some dishes for the remaining 20 hr (lane 5). Histogram is representative of two independent experiments.

[0035] FIGS. 22A-22L. Viable pluripotency activity reporters respond to stress treatment as previously reported for endogenous pluripotency reporter protein levels. ESCs were lentivirus-infected (Step 1; FIG. 22A, FIG. 22B, FIG. 22C), FACS-selected (Step 2; FIG. 22D, FIG. 22E, FIG. 22F), and stress-tested (Step 3) without (FIG. 22G, FIG. 22H, FIG. 22I) or with 200 mM sorbitol for three days (FIG. 22J, FIG. 22K, FIG. 22L) using pluripotency reporter Oct4-GFP ESCs (FIG. 22A, FIG. 22D, FIG. 22G, FIG. 22J), Rex1-RFP ESCs (FIG. 22B, FIG. 22E, FIG. 22H, FIG. 22K), or ESCs with both reporters (FIG. 22C, FIG. 22F, FIG. 22I, FIG. 22L). ESCs were imaged by epifluorescence microscopy and transmitted light (phase contrast) with fluorescence superimposed. Micron bars in FIG. 22A, FIG. 22D, and FIG. 22G indicate 100 μm as FIG. 22A-C, FIG. 22G-I and FIG. 22J-L were micrographed at 10× and FIG. 22D-F were micrographed at 20×.

[0036] FIGS. 23A and 23B. Stress induces loss of Rex1-RFP but not Oct4-GFP after days of 200 mM sorbitol. Viable pluripotency reporter Rex1-RFP ESCs (FIG. 23A) or Oct4-GFP ESCs (FIG. 23B) were cultured in 94-well plates to 30% confluence. Cells were then treated with 200 mM of sorbitol as an osmotic stress for 3 days. Fluorescence was determined from live ESCs using a plate reader from 200 mM sorbitol treated cells was normalized with the non-sorbitol treated control cells. Four independent experiments were carried out and plotted here. By t test, Oct4-GFP fluorescence in FIG. 23A was not significantly different (b) with stress P=0.327 and in FIG. 23B Rex1-RFP fluorescence was significantly different with stress (a) P<0.019.

[0037] FIG. 24. Viable Rex1 promoter reporter responds with stress treatment in a dose-dependent manner in flow cytometry assay. mESCs expressing Rex1 promoter reporter were cultured in 12-well plates till 30% confluent. Cells were then treated with 200-300 mM of sorbitol in 25 mM increments for 3 days. After trypsinization cell suspensions were assayed by flow cytometry. Histograms shown here are from three independent experiment and (a) indicates significant decrease in Rex1-RFP fluorescence at all sorbitol doses from 200-300 mM as determined by ANOVA followed by Dunnett two-sided post hoc test, n=3, P<0.01.

[0038] FIGS. 25A and 25B. Rex1 promoter RFP reporter ESCs respond to stress treatment with a dose-dependent 2.8-fold increase in the low Rex1 activity subpopulation and a 20% decrease in high activity Rex1 subpopulation. Rex1-RFP mESCs expressing Rex1 promoter reporter were cultured in 12-well plates until 30% confluent, treated with 0 mM, 200 mM, and 300 mM sorbitol for 3 days, trypsinized, and cell suspensions were assayed by flow cytometry. Arbitrary thresholds (vertical red lines) were drawn at 5×103 on the X-axis between the middle of the two peaks and at 2 standard deviations above the mean of the parental (before infection) dim population shown in the bottom panel. Areas in parental dim, intermediate dim, and bright were defined by the 2 vertical red lines and were quantified as pixels using Image J from data in (FIG. 25A) to give histograms in (FIG. 25B). The histogram bars (FIG. 25B) are derived from three independent experiments (see also FIGS. 26A and 26B) with errors bars showing s.e.m, One-way ANOVA was performed followed by Dunnett's post hoc test; (a) indicates significantly smaller bright cell subpopulation and greater parental dim cells at 300 mM sorbitol (a) (P<0.05), but no significant decrease in bright cell subpopulation or increase in parental dim cells at 200 mM sorbitol (b). significant.

[0039] FIGS. 26A and 26B. Viable Rex1 promoter reporter responds with stress treatment in a dose-dependent manner in flow cytometry assay. mESCs expressing Rex1 promoter reporter were cultured in 12-well plates till 30% confluence. Cells were then treated with 200-300 mM of sorbitol in 25 mM increments for 3 days. After trypsinization, the cell suspensions were subjected for flow cytometry assay. An arbitrary threshold was drawn at 5×10³ on the x-axis and another near the low point between the bright peak and the dimmer peak to its left (FIG. 26A). This created three areas of non-transgenic Parental ESC dim at the level of ESCs that do not express Rex1-RFP (bottom graph of the four). Intermediate and bright groups were also defined by the two vertical red lines. Area sizes of the two peaks were quantified using Image J. The histogram bars (FIG. 26B) are derived by three independent experiments, one of which is shown in (FIG. 26A), errors bars showing s.e.m, One-way ANOVA was performed followed by Dunnett's post hoc test using 0 mM as reference for parental dim, intermediate dim, and bright separately. (a) indicates significant decrease in bright subpopulations and increase in parental dim subpopulations at 250-300 mM sorbitol (P<0.01) and (b) indicates no significance at 200-225 mM sorbitol for changes in Rex1-RFP bright or parental dim subpopulations.

[0040] FIG. 27. Rex1 promoter RFP have a stress dose-dependent loss of endogenous Rex1 protein corresponding to dose-dependent loss of Rex1 activity shown in FIG. 24. (A) Rex1-RFP mESCs expressing cultured until 30% confluent, treated with 0 mM, 200-300 mM sorbitol in 25 mM increments for 3 days (as in FIG. 24), lysed, size fractionated by SDS-PAGE, blotted, probed for Rex1 and ACTB proteins and analyzed for changes compared to time zero and for stress dose responses. The histogram bars are derived from three independent experiments, one of which is shown in (A), shown are X+/−s.e.m., n=3, (a) is P<0.01 and (b) indicates not significant. (B). One-way ANOVA was performed followed by Dunnett's post hoc test; (a) indicates significantly lower endogenous Rex1 at 225-300 mM sorbitol (P<0.05) but not at 200 mM sorbitol (b).

[0041] FIG. 28. Partial validation of the Theory of Compensatory Differentiation whereby stress decreases in size the normal levels of stem cell expansion and, in the nonmorbid stress range where doubling rates were near-normal, the diminished potency group that is enabled to differentiate is constant in size. Previous modeling [18-19] of the Theory of Compensatory Differentiation was based on biochemical averages of mTSCs and mESCs undergoing stress dose-dependent diminished stem cell population expansion and simultaneous potency factor protein decrease and 1^{st} lineage differentiation factor increase. A modified Venn diagram from previous modeling is presented here and analyzed with respect to supporting flow cytometry data for changes in potency subpopulation sizes derived from Table 8 and discussed in the text. For convenience, Table 8 is reproduced here:

### DETAILED DESCRIPTION

[0042] The present disclosure provides systems and methods (S/M) to detect stress in stem cells and uses thereof. The described S/M can detect sub-morbid stress in stem cells that can lead to stem cell depletion and predict later organismal toxicity and morbidity.

[0043] “Stem cells” are cells that are totipotent, pluripotent, or multipotent and are capable of differentiating into one or more different cell types. Stem cells may be derived from any organism, e.g. any mammalian species, e.g. human, primate, equine, bovine, porcine, canine, feline, etc. In certain embodiments (CE), they are derived from a human or a mouse.

[0044] As indicated earlier, a totipotent stem cell can give rise to all of the embryonic and extraembryonic tissues of an organism. An example of a totipotent stem cell is a fertilized oocyte.

[0045] A pluripotent stem cell can give rise to progeny that can undergo differentiation, under appropriate conditions, into cell types that collectively demonstrate characteristics associated with cell lineages from all of the three germinal layers (endoderm, mesoderm, and ectoderm). Pluripotent stem cells contribute to all tissues of a prenatal, postnatal or adult animal. Cell pluripotency is a continuum, ranging from the completely pluripotent cell that can form every cell of the embryo proper, e.g., ESCs and induced pluripotent stem cells (iPSCs), to the incompletely or partially pluripotent cell that can form cells of all three germ layers but may not exhibit germline transmission or ability to generate a whole organism. A standard art-accepted test to establish pluripotency of a cell population is ability to form a teratoma in 8-12 week old SCID mice. Expression of certain combinations of molecular markers are also pluripotent stem cell characteristics. For example, human pluripotent stem cells express markers including: SSEA-3, SSEA-4, TRA-1-60, TRA-1-81, TRA-2-49/6E, ALP, Sox2, E-cadherin, UTF-1, Oct4, Rex1, and Nanog.

[0046] A multipotent stem cell is capable of differentiating into at least two differentiated cell types.

[0047] S/M for obtaining totipotent, pluripotent and multipotent stem cells from humans and numerous other animals (e.g., monkeys, mice) are described in, e.g., U.S. Pat. Nos. 5,453,357; 5,523,226; 5,589,376; 5,340,740; and 5,166,065; Evans, Theriogenology, 33(1):125, 1990: Notarianni, J. Reprod. Fertil., 41(Suppl.):51, 1990; Giles, Mol. Reprod. Dev., 36:130, 1993; Sukoyan, Mol. Reprod. Dev., 33:418, 1992; Sukoyan, Mol. Reprod. Dev., 36:148, 1993; lannaccone, Dev. Biol., 163:288, 1994; Evans & Kaufman, Nature, 292:154, 1981; Martin, Proc. Natl. Acad. Sci. USA, 78:7634, 1981; Doetschman, Dev. Biol., 127:224, 1988; Graves & Moreadith, Mol. Reprod. Dev., 36:424, 1993; and Bradley, Nature, 309:255, 1984.

[0048] Particular examples of stem cells include embryonic stem cells; cord blood stem cells; umbilical cord matrix stem cells; tissue-specific stem cells; and placental TSCs. Progenitor cells are also stem cells.

[0049] Embryonic stem cells (ESCs) are stem cells derived from the inner cell mass (ICM) of an early stage embryo known as a blastocyst. Human embryos reach the blastocyst stage 4-5 days post fertilization, at 50-150 cells. ESCs include those derived from an embryo of up to 7 days after fertilization. ESCs are pluripotent and have the capability of proliferating indefinitely in culture, under conditions that allow their proliferation without differentiation.

[0050] S/M for isolating ESCs are described in, e.g., U.S. Pat. Nos. 6,090,622; 5,843,780; 5,340,740; and 5,656,479: PCT WO00/27995; PCT WO99/27076; Matsui, Cell, 70:841, 1992; Thomson, Science, 282:114, 1998; Shamblott, Proc. Natl. Acad. Sci. USA, 95:13726, 1998; Reubinoff, Nat. Biotech., 18:399, 2000; Pain, Development, 122:2339, 1996; Wheeler, Reprod. Fertil. Dev., 6:563, 1994; and Shim, Biol. Reprod., 57:1089, 1997. Primate ESCs may be obtained by, e.g., the methods in U.S. Pat. Nos. 5,843,780 and 6,200,806. Primate and human stem cells may also be obtained from commercial sources such as WiCell, Madison, Wis.

[0051] S/M for isolating cord blood stem cells or umbilical cord matrix stem cells are described in, e.g., Brunstein, Br. J. Haematol., 137(I):20, 2007; Sun, Biochem. Biophys. Res. Commun., 354(4):919, 2007; Riodan, Transl. Med., 30:5, 2007; and Weiss, Stem Cell Rev., 2(2):155, 2006.

[0052] Mouse placental TSCs, like mouse ESCs, are derived from a blastocyst arising at E3.5 (3.5 days after fertilization). The growth factor fibroblast growth factor (FGF)4 is synthesized by the ICM (Rappolee, Development, 120:2259, 1994) and this is necessary to maintain the adjacent polar trophectoderm, source of TSCs, in a stem cell state (Chai, Dev. Biol., 198:105, 1998 (Chai, 1998)). The isolation of mouse TSCs was 1^{st} reported in 1998 (Tanaka, Science, 282:2072, 1998 (Tanaka, 1998)) and used FGF4, the FGF4 cofactor heparin, and conditioned medium from mouse embryonic fibroblasts (MEF-CM) to supply additional necessary cofactors. It has been shown that TGFB family members activin and TGFB1 can replace MEF-CM. Erlebacher, Dev. Biol., 275:158, 2004). In culture, removal of FGF4 enables differentiation of TSC to produce several different lineages that are defined by expression of Hand1, Stra13, PL1, Proliferin, Gcm1, SyncytinA, Ctsq, PL2, Tfeb, Tpbpa, Mash2. During FGF4 removal TSCs lose the potency factors TEAD4, Cdx2, Id2, and ErrB (reviewed in Puscheck, Adv Exp Med Biol, 843:77, 2015).

[0053] Many types of stress cause potency loss and differentiation increase despite the presence of FGF4. Thus stress destroys potency in two ways, by diminishing normal stem cell growth and by causing differentiation of the remaining fewer cells to compensate for lower cell numbers

[0054] Stem cells used within the scope of the present disclosure can be cultured according to any appropriate method known in the art. An appropriate medium for stem cell culture includes 80% Dulbecco's modified Eagle's medium (DMEM; no pyruvate, high glucose formulation, Gibco BRL), with 20% fetal bovine serum (FBS; Hyclone), 0.1 μM β-mercaptoethanol (Sigma), and 1% non-essential amino acid stock (Gibco BRL). DMEM Knockout can also be used. The culture can further be supplemented with Knock-out serum replacement (KSP). Cultures can also include one or more carbon sources. In CE, the cultures include L-analyl-L-glutamine. The cultures can include serum or can be serum-free. In CE, stem cells can be cultured with an ALK5 inhibitor and one of a MEK or Erk inhibitor, optionally with a GSK3 inhibitor and/or LIF. Mek and GSK3 inhibitors in one media are called 2i (two inhibitor media) and have been shown to aid in maintaining the ground state of ESCs. Marks, Cell, 149:590, 2012. In CE, the culture media include basal media components for cell survival (e.g., vitamins and minerals, optionally in an isotonic condition).

[0055] In CE, stem cells can be cultured in contact with feeder cells. Exemplary feeder cells include fibroblast cells, e.g., mouse embryonic fibroblast (MEF) cells, or x-ray inactivated CF1 feeder cells. Methods of culturing stem cells on feeder cells are known in the art.

[0056] In CE, stem cells are cultured in the absence of feeder cells. Stem cells, e.g., can be attached directly to a solid culture surface (e.g., a culture plate), e.g., via a molecular tether. Exemplary molecular tethers include matrigel, an extracellular matrix (ECM), ECM analogs, laminin, fibronectin, or collagen.

[0057] The disclosure is based in part on the finding that stress stimuli (e.g., toxicological compounds, drugs under development, environmental pollutants) cause stem cells to differentiate despite the presence of growth factors and an environment that is meant to sustain proliferation and potency of stem cells of the early conceptus (both ESCs and TSCs). The unique exponential growth phase normally occurs for days after fertilization and before implantation into the uterus, and then one to several weeks after implantation (depending on the mammalian species). During the exponential growth phase ESCs and TSCs increase population size under normal conditions, but have diminished population growth under stressed conditions. Paradoxically, the strategy of both ESCs and TSCs during stress is to compensate for stress-diminished population size by further depleting stem cell number by differentiating to the 1^{st} lineage at the expense of later lineages Thus, compensatory differentiation is linked to prioritized differentiation when stress induces the differentiation to 1^{st} lineage and suppresses later lineages. Compensatory and prioritized differentiation can occur at lower levels of stress that do not cause toxicity (cell death) in individual stem cells, but additively depletes stem cells so that later cell lineages (e.g. heart, liver, etc.) have insufficient stem cells for development. Thus later lineages may be depleted even though toxicants tested may not directly affect these later lineages. Moreover, the described S/M provide assays that are more sensitive and earlier in ontogeny. The S/M can be practiced in vitro, replacing animals needed in toxicological assays.

[0058] In CE, the S/M, including modified stem cells, assays and high throughput screens (HTS), can be used to identify compounds or other potential stressors that can negatively affect development potential. “Developmental potential” refers to the capacity of a stem cell (e.g., pluripotent cell) to divide and differentiate and/or the capacity of an embryo to grow according to expected developmental milestones when compared to an average non-stressed stem cell and/or healthy embryo. The S/M can also provide early indicators of miscarriage or at-risk pregnancy; indicator of infertility and/or the effect of therapeutics on fertility; indicator of ESC stress and placental insufficiency as the issue for the infertility; early detection and prediction of diseases of placental deficiency; an in vitro toxicology screen for compounds that may have teratogenic potential.

[0059] As stated earlier, potency factors can be thought of as “brake pedals” and differentiation factors can be thought of as “accelerator pedals” for differentiation. Normal differentiation occurs when extracellular potency-maintaining growth factors (e.g. FGF4 for mouse TSCs or LIF for mouse ESCs) are removed. Stress-induced compensatory and prioritized differentiation occurs despite the presence of these extracellular growth factors. In the stress response, intracellular stress enzymes (e.g. SAPK/JNK, and AMPK) not necessary for normal development induce differentiation using molecular mechanisms that can be used to measure magnitude and toxicological significance of stress:

(i) potency factor or potency marker decrease, (ii) 1^{st} lineage prioritized differentiation factor (e.g., intracellular enzymes) or prioritized (1^{st} lineage) differentiation marker increase, and (iii) later lineage factor or marker decrease. As stated previously, “factors” as used herein are intracellular proteins that lead to a potent or prioritized differentiated state. “Markers” need not lead to the state, but are indicative of its presence. Classification as a factor or marker is not mutually exclusive. The distinction is made largely for descriptive purposes.

[0060] Potency factors and/or markers for ESC include Oct4; Sox2; Nanog; Rex1; Klf5; PDCD2; CARM1; Sall4); SSEA1; SSEA3; SSEA4; TRA-1-60; and TRA-1-81. Potency factors and/or markers for TSC include TEAD4; Errβ; Cdx2; Id2; and Elf5.

[0061] Differentiation factors and/or markers for ESC include Lrp2; Dab2; Fgf5; Pdgfra; Sox17; Gata4/6; PAX8; NEFL; TSHR; Brachyury; Laminin; AFP; Nestin; Goosecoid; Cubulin; TBP; Vimentin; and Snail. Differentiation factors and/or markers for TSC include PL1; Plf; PL2; Hand1; Stra13; Tpbpa; Mash2; Gcm1; Tfeb; and Ctsq.

[0062] Factors and markers with enzyme activity include MEK1; MEK2; AKT; PI3K; AMPK; SAPK/JNK; p38MAPK; GSK3; and JAK/STAT. Sometimes these factors and markers can override brake pedals and accelerator pedals, during runting stress. In CE, MEK1; MEK2; AKT; AMPK; SAPK/JNK; GSK3; and JAK/STAT can be classified as differentiation factors or markers.

[0063] Particular factors and markers are described in more detail herein, with additional description regarding its identity as a factor and/or a marker. As examples discussed more fully below for ESCs, Oct4, Nanog, and Rex1 are potency factors that decrease with stress and prioritized differentiation. Pdgfra, Sox17, Dab2, Lrp2, and GATA4/6 are prioritized differentiation markers that increase with 1^{st} lineage. These markers increase with stress-induced differentiation. Brachyury and FGF5 are later lineage prioritized differentiation markers that decrease with stress and prioritized differentiation. AMPK, SAPK and JNK are intracellular stress enzymes that increase with stress and mediate compensatory and prioritized differentiation.

[0064] The Oct4 gene, also known as Oct3 or POU5F1, belongs to the POU (Pit-Oct-Unc) transcription factor family. The Oct4 protein (octamer-binding transcription factor 4) can activate the expression of target genes through binding the octameric motif (5′-ATTTGCAT-3). There are two human Oct4 isoforms proteins produced by alternative splicing.

[0065] Oct4 functions in protein binding, miRNA binding, DNA binding, sequence-specific DNA binding, ubiquitin protein ligase binding, transcription factor activity, and transcription factor binding. Oct4 is important for early embryogenesis, for embryonic stem cell pluripotency, and is required for maintaining pluripotency. Oct4 is primarily expressed in ESCs, where it is essential in maintaining potency. In later mammalian development, Oct4 expression is confined to the developing germ cells. Oct4 is conserved in human (SEQ ID NO:8), chimpanzee (SEQ ID NO:9), mouse (SEQ ID NO:10), and many other animals.

[0066] The SOX2 gene, also known as SRY (sex determining region Y)-box2, encodes a protein that is a member of the SRY-related HMG-box (SOX) family of transcription factors. SOX2 is an intronless gene that lies within an intron of another gene called the SOX2 overlapping transcript (SOX2OT). The transcription factor encoded by SOX2 forms a trimeric complex with OCT4 on DNA and controls the expression of a number of genes involved in embryonic development such as YES1, FGF4, UTF1, and ZFP206. SOX2 is involved in the regulation of embryonic development, stem-cell maintenance in the central nervous system, and the determination of cell fate. The SOX2 gene is conserved in human (SEQ ID NO:1), chimpanzee (SEQ ID NO:2), mouse (SEQ ID NO:3), and many other animals.

[0067] The Nanog gene encodes the homeobox protein Nanog. Nanog is thought to function in concert with other factors such as Oct 4 and SOX2. The homeobox protein Nanog binds to the DNA consensus sequence 5′-TAAT[GT][GT]-3′ or 5′-[CG][GA][CG]C[GC]ATTAN[GC]-3′ (SEQ ID NO:4).

[0068] Nanog functions as a transcription regulator involved in inner cell mass and ESC proliferation and self-renewal. Nanog imposes pluripotency on ESC and prevents their differentiation towards extraembryonic endoderm and trophectoderm lineages. When overexpressed, Nanog promotes cells to enter into S phase and proliferate. Nanog is also associated with ovarian germ cell tumors and sacrococcygeal teratoma. The Nanog gene is conserved in human (SEQ ID NO:5), chimpanzee (SEQ ID NO:6), mouse (SEQ ID NO:7), and many other animals.

[0069] The Rex1 gene, also called ZFP42 is expressed primarily in undifferentiated stem cells, both in the embryo and the testicles of adults. The Rex1 protein is 310 amino acids long, and has four closely spaced zinc fingers at 188-212, 217-239, 245-269, and 275-299.

[0070] Rex1 functions in sequence-specific DNA binding transcription factor activity and is involved in ESC self-renewal. The Rex1 gene is conserved in human (SEQ ID NO:11), chimpanzee (SEQ ID NO:12), mouse (SEQ ID NO:13), and many other animals.

[0071] The Errβ gene is also known as estrogen-related receptor beta (ESRRB) and NR3B2. This gene encodes the Steroid hormone receptor ERR2 protein which is similarity to the estrogen receptor. A similar gene in mouse plays an essential role in placental development. The Errβ gene is conserved in human (SEQ ID NO:50), chimpanzee (SEQ ID NO:51), mouse (SEQ ID NO:52), and many other animals.

[0072] TEAD4 (TEA domain family member 4) is a member of the transcriptional enhancer factor (TEF) family of transcription factors and is essential for initiating the TSC lineage. It is preferentially expressed in the skeletal muscle, and binds to the M-CAT regulatory element found in promoters of muscle-specific genes to direct gene expression. Alternatively spliced transcripts encode different isoforms. TEAD4 (TEA domain family member 4) plays a key role in the control of organ size and tumor suppression. The TEAD4 gene is conserved in human (SEQ ID NO:70), chimpanzee (SEQ ID NO:72), mouse (SEQ ID NO:71), and many other animals.

[0073] The Caudal Type Homeobox 2, or Cdx2, gene is also known as Cdx3 and CDX2/AS. This gene is a member of the caudal-related homeobox transcription factor gene family.

[0074] The encoded protein is a major regulator of intestine-specific genes involved in cell growth and differentiation. This protein also plays a role in early embryonic development of the intestinal tract and is essential in establishing TSCs. The Cdx2 gene is conserved in human (SEQ ID NO:44), Rhesus monkey (SEQ ID NO:45), mouse (SEQ ID NO:46), and many other animals.

[0075] The Id2 gene is also known as the cell growth-inhibiting gene 8 (GIG8), Id2A, Id2H, and bHLHb26. The Id2 gene encodes for a protein called DNA-binding protein inhibitor ID-2. That protein belongs to the inhibitor of DNA binding family, members of which are transcriptional regulators that contain a helix-loop-helix (HLH) domain but not a basic domain.

[0076] Members of this protein family inhibit the functions of basic helix-loop-helix transcription factors in a dominant-negative manner by suppressing their heterodimerization partners through the HLH domains. This protein plays a role in negatively regulating cell differentiation and specifically inhibits TSC differentiation in humans and mouse. The Id2 gene is conserved in human (SEQ ID NO:47), chimpanzee (SEQ ID NO:48), mouse (SEQ ID NO:49), and many other animals.

[0077] The SAPK gene is also known as JNK2, MAPK9, p54a, JNK2A, JNK2B, SAPK1a, JNK2BETA, p54aSAPK, and JNK2α. SAPK encodes the protein mitogen-activated protein (MAP) kinase 9 (MAPK9) which is a member of the MAP kinase family. Several alternatively spliced transcript variants encoding distinct isoforms have been reported. The different isoforms vary in the use of an alternate internal coding exon of the same length.

[0078] MAP kinases act as an integration point for multiple biochemical signals, and are involved in a wide variety of cellular processes such as proliferation, differentiation, transcription regulation, and development. MAPK9 targets specific transcription factors, and thus mediates immediate-early gene expression in response to various cell stimuli. MAPK9 is closely related to MAPK8, both of which are involved in UV radiation-induced apoptosis. This gene and MAPK8 are also known as c-Jun N-terminal kinases. Studies of this gene's mouse counterpart suggest a key role in T-cell differentiation. The SAPK gene is conserved in human (SEQ ID NO:38), chimpanzee (SEQ ID NO:39), mouse (SEQ ID NO:40), and many other animals.

[0079] The JNK gene, also known as MAPK8, encodes the C-jun-amino-terminal kinase-interacting protein 3 enzyme. This enzyme is a member of the MAP kinase family which includes MAPK9. Five alternatively spliced transcript variants encoding distinct isoforms have been reported.

[0080] JNK mediates immediate-early gene expression in response to cell stress stimuli by phosphorylating specific transcription factors. The activation of this kinase by tumor-necrosis factor alpha (TNF-α) is found to be required for TNF-α induced apoptosis. This kinase is also involved in UV radiation induced apoptosis. The MAPK8 gene is conserved in human (SEQ ID NO:41), chimpanzee (SEQ ID NO:42), mouse (SEQ ID NO:43), and many other animals.

[0081] The MEK1 gene is also known as mitogen-activated protein kinase kinase 1 (MAPKK1), CFC3, and PRKMK1. MAPKK1 has been shown to interact with C-Raf, Phosphatidylethanolamine binding protein 1, MAP2K1IP1, GRB10, MAPK3, MAPK8IP3, MAPK1, MP1, and MAP3K1.

[0082] The protein encoded by MEK1 is a member of the dual specificity protein kinase family, which acts as a mitogen-activated protein (MAP) kinase. This protein kinase lies upstream of MAP kinases and stimulates the enzymatic activity of MAP kinases upon wide variety of extra- and intracellular signals. As an essential component of the MAP kinase signal transduction pathway, this kinase regulates many processes such as proliferation, differentiation, transcription regulation, and development. The MEK1 gene is conserved in human (SEQ ID NO:53), chimpanzee (SEQ ID NO:54), mouse (SEQ ID NO:55), and many other animals.

[0083] The MEK2 gene is also known as mitogen-activated protein kinase kinase 2 (MAPKK2), MAP2K2, CFC4, MKK2, and PRKMK2. The protein encoded by this gene is a dual specificity protein kinase that belongs to the MAP kinase family.

[0084] This kinase plays a critical role in mitogen growth factor signal transduction. It phosphorylates and activates MAPK1/ERK2 and MAPK2/ERK3. The activation of this kinase is dependent phosphorylation by MAP kinase kinases. The MEK2 gene is conserved in human (SEQ ID NO:56), chimpanzee (SEQ ID NO:57), mouse (SEQ ID NO:58), and many other animals.

[0085] The AKT gene is also known as v-akt murine thymoma viral oncogene homolog 1, AKT1, PKB, PRKBA, PKB a, and RAC a. There are three isoforms of Akt; Akt 1, 2 and 3 (also known as PKB-α, -β, and -γ). The protein encoded by this gene is called RAC-alpha serine/threonine-protein kinase.

[0086] AKT is involved in regulating many processes including metabolism, proliferation, cell survival, and growth. The regulation is mediated through serine and/or threonine phosphorylation of many downstream, substrates. Over 100 substrate candidates have been reported. The AKT gene is conserved in human (SEQ ID NO:59), chimpanzee (SEQ ID NO:60), mouse (SEQ ID NO:61), and many other animals.

[0087] The placental Lactogen gene (PL1) is also known as PL, CSH1, CSA, CS-1, CSMT, hCS-1, and hCS-A. The protein encoded by this gene is a member of the somatotropin/prolactin family of hormones. The PL1 gene is expressed mainly in the placenta and is produced by the 1^{st} lineage differentiating from mouse TSC utilizes multiple transcription initiation sites.

[0088] PL1 plays an important role in growth control. The encoded protein is produced only during pregnancy and is involved in stimulating lactation, fetal growth, and metabolism. The human PL1 gene (SEQ ID NO:62) has orthologs in chimpanzee (SEQ ID NO:63), and many other animals.

[0089] The Plf gene is also known as, Pri2c2 (prolactin family 2, subfamily c, member 2), Plf1, MRP-1, and PLF-1. This gene encodes the anterior pituitary hormone prolactin which is also known as luteotropic hormone or luteotropin.

[0090] Prolactin (Prl), is a growth regulator for many tissues. It is essential for promoting lactation in the mammary glands. The Prl gene is conserved in human (SEQ ID NO:64), chimpanzee (SEQ ID NO:65), mouse (SEQ ID NO:66), and many other animals.

[0091] The protein encoded by the Lrp2 gene is called low density lipoprotein-related protein 2. The Lrp2 protein is also known as. Lrp2 is a multi-ligand endocytic receptor glycoprotein with a large amino-terminal extracellular domain, a single transmembrane domain, and a short carboxy-terminal cytoplasmic tail that is found in the plasma membrane of many absorptive epithelial cells.

[0092] Lrp2 is expressed in many different tissues but primarily in absorptive epithelial tissues such as the kidney. The extracellular ligand-binding-domains of the protein bind diverse macromolecules including albumin, apolipoproteins B/E, and lipoprotein lipase. Lrp2 is important for the reuptake of numerous ligands, including lipoproteins, sterols, vitamin-binding proteins, and hormones. The Lrp2 gene is conserved in human (SEQ ID NO:23), chimpanzee (SEQ ID NO:24), mouse (SEQ ID NO:25), and many and other animals.

[0093] The DAB2 gene was initially named DOC2 (Differentially expressed in Ovarian Cancer) and is distinct from the DOC2A and DOC2B genes. Dab2 is expressed in normal ovarian epithelial cells, but is decreased in ovarian carcinomas, suggesting a role as a tumor suppressor. The Dab2 gene is conserved in human (SEQ ID NO:20), chimpanzee (SEQ ID NO:21), mouse (SEQ ID NO:22), and many other animals.

[0094] The Fgf5 gene is a member of the fibroblast growth factor (FGF) family that encodes the Fibroblast Growth Factor 5 protein.

[0095] FGF family members possess broad mitogenic and cell survival activities, and are involved in a variety of biological processes, including embryonic development, cell growth, cell proliferation, morphogenesis, cell differentiation, tissue repair, tumor growth, and invasion. This gene is as an oncogene, transforming transfected mammalian cells. The Fgf5 gene is conserved in human (SEQ ID NO:32), chimpanzee (SEQ ID NO:33), mouse (SEQ ID NO:34), and many other animals.

[0096] The Pdgfra (platelet-derived growth factor receptor, alpha polypeptide) gene codes for the alpha-type platelet-derived growth factor receptor protein. In addition to Pdgfra, there is another isoform Pdgfrb. The two isoforms can form homo- or heterodimers. Pdgfra functions as a tyrosine-protein kinase that acts as a cell-surface receptor for Pdgfa, Pdgfb, and Pdgfc. The α-type platelet-derived growth factor receptor protein plays an important role in the regulation of embryonic development, cell proliferation, survival, and chemotaxis. The Pdgfra gene is conserved in human (SEQ ID NO:14), chimpanzee (SEQ ID NO:15), and many other animals. The homologous gene in mice (SEQ ID NO:16) includes a protein tyrosine kinase conserved domain rather than the protein kinase domain found in the human gene.

[0097] The cubulin gene is also known as CUBN, IFCR, MGA1, and gp280. Cubulin is located within the epithelium of intestine and kidney. Cubulin acts as a receptor for intrinsic factor-vitamin B12 complexes. Cubulin plays a role in lipoprotein, vitamin and iron metabolism, by facilitating their uptake. This gene plays an important role in the development of the peri-implantation embryo through internalization of APOA1 and cholesterol. It also binds to LGALS3 at the maternal-fetal interface. The cubulin gene is conserved in human (SEQ ID NO:67), mouse (SEQ ID NO:68), and many other animals.

[0098] The Sox17 (SRY (sex determining region Y)-box 17) gene encodes a member of the SOX (SRY-related HMG-box) family of transcription factors. The encoded protein acts as a transcriptional regulator after forming a complex with other proteins. Sox17 binds target promoter DNA and bends the DNA by binding to the sequences 5′-AACAAT-′3 or 5′-AACAAAG-3′.

[0099] SOX17 is involved in the regulation of embryonic development and in the determination of cell fate. The SOX17 gene is conserved in human (SEQ ID NO:17), chimpanzee (SEQ ID NO:18), mouse (SEQ ID NO:19), and many other animals.

[0100] The GATA6 (GATA binding protein 6 or transcription factor GATA-6) gene encodes a protein that is a member of a small family of zinc finger transcription factors. The GATA6 protein preferentially binds (A/T/C)GAT(A/T)(A) of the consensus binding sequence.

[0101] GATA6 is expressed during early embryogenesis and localizes to endo- and meso-dermally derived cells during later embryogenesis and plays an important role in the regulation of cellular differentiation and organogenesis during vertebrate development such as gut, lung, and heart development. The GATA6 gene is conserved in human (SEQ ID NO:26), chimpanzee (SEQ ID NO:27), mouse (SEQ ID NO:28), and many other animals.

[0102] GATA4 is involved in embryogenesis and in myocardial differentiation and function and testicular development. It is a transcriptional activator that binds to the consensus sequence 5′-AGATAG-3′. The GATA4 gene is conserved in human (SEQ ID NO:73), mouse (SEQ ID NO:74), and many other animals.

[0103] The T gene encodes the Brachury protein which is an embryonic nuclear transcription factor that binds to a specific DNA element, the palindromic T-site. Brachury binds through a region in its N-terminus called the T-box. Two transcript variants encoding different isoforms have been found for this gene. The gene brachyury appears to have a conserved role in defining the midline of a bilateral organism, and thus the establishment of the anterior-posterior axis; this function is apparent in chordates and mollusks. Brachury effects transcription of genes required for mesoderm formation and differentiation and is localized to notochord-derived cells. The T gene is conserved in human (SEQ ID NO:29), chimpanzee (SEQ ID NO:30), mouse (SEQ ID NO:31), and many other animals.

[0104] The AMPK genes are also known as PRKAA1/2 and AMPKa1/2. The protein encoded by this gene belongs to the ser/thr protein kinase family. The functional enzyme is composed of α-(catalytic) and β/γ-(regulatory) subunits. The AMPK genes encode proteins called 5′-prime-AMP-activated protein kinase which is the catalytic subunit. The 5′-AMP-activated protein kinase catalytic subunit al has a magnesium cofactor and is 559 amino acids long with a molecular weight of 64,009 Da. Alternatively spliced transcript variants encoding distinct isoforms have been observed.

[0105] AMPK is a cellular energy sensor. AMPK regulates key metabolic enzymes through phosphorylation. This kinase activity is activated by stimuli that increase the AMP/ATP ratio. The AMPK gene is conserved in human (SEQ ID NO:35), chimpanzee (SEQ ID NO:36), mouse (SEQ ID NO:37), and many other animals.

[0106] PAX8 encodes a member of the paired box (PAX) family of transcription factors involved in functional differentiation and maintenance of thyroid-related cells. The PAX8 gene is conserved in human (SEQ ID NO:75), chimpanzee (SEQ ID NO:77), mouse (SEQ ID NO:76), and many other animals.

[0107] The NEFL gene encodes neurofilaments in the axoskeleton. They maintain neuronal caliber and also play a role in intracellular transport to axons and dendrites. The NEFL gene is conserved in human (SEQ ID NO:78), chimpanzee (SEQ ID NO:80), mouse (SEQ ID NO:79), and many other animals.

[0108] The TSHR gene encodes membrane proteins that serve as receptors for thyrothropin and thyrostimulin. These proteins are involved in thyroid cell metabolism. Different transcript variants have been identified. The TSHR gene is conserved in human (SEQ ID NO:81), chimpanzee (SEQ ID NO:83), mouse (SEQ ID NO:82), and many other animals.

[0109] The laminin gene encodes proteins that mediate attachment, migration and organization of cells into embryonic tissues. The proteins function by interacting with the extracellular matrix. The laminin gene is conserved in human (SEQ ID NO:84), chimpanzee (SEQ ID NO:86), mouse (SEQ ID NO:85) and many other animals.

[0110] The AFP gene encodes alpha-fetoprotein, a plasma and intracellular protein produced by the yolk sac and liver during fetal development. AFP, the fetal counterpart of serum albumin and binds copper, nickel, fatty acids and bilirubin. The AFP gene is conserved in human (SEQ ID NO:87), chimpanzee (SEQ ID NO:89), mouse (SEQ ID NO:88), and many other animals.

[0111] The NES gene encodes a member of the intermediate filament protein family and is expressed primarily in nerve cells. It is required for survival, renewal and mitogen-stimulated proliferation of neural progenitor cells. The NES gene is conserved in human (SEQ ID NO:90), chimpanzee (SEQ ID NO:92), mouse (SEQ ID NO:91), and many other animals.

[0112] The Goosecoid (GSC) gene: encodes a member of the bicoid subfamily of the paired (PRD) homeobox family of proteins. The encoded protein acts as a transcription factor and plays a role in spatial programming within discrete lineage compartments during organogenesis. The GSC gene is conserved in human (SEQ ID NO:93), chimpanzee (SEQ ID NO:95), mouse (SEQ ID NO:94), and many other animals.

[0113] Oct4 and Rex1 are markers of the 1^{st} ESC progenitors that arise in the embryo within 3.5 days (E3.5) after fertilization. Upon differentiation to any lineage, Rex1 is decreased (e.g., lost) and Oct4 is decreased after commitment to the 1^{st} differentiated lineage of extraembryonic ectoderm (ExEndo). Thus, the presence of Oct4 and Rex1 indicates stem cell potency. In contrast, Pdgfra is a growth factor receptor and Dab2 a lipid nutrient-acquiring protein that are both activated immediately upon 1^{st} differentiation of ESC to ExEndo. However, Pdgfra is expressed in all ExEndo lineages and Dab2 only in 1^{st} lineage and its maturing descendants. Thus, the presence of Pdgfra and Dab2 indicate loss of stem cell potency under conditions wherein potency would normally be maintained (e.g., that a stress has occurred).

[0114] Three embryonic genes decrease and then rapidly increase when ESCs are stressed. These 3 genes are Sox2, Oct4 and Nanog. There is a 4^{th} gene, Rex1, whose expression after stress decreases but does not increase thereafter as Sox2, Oct4 and Nanog do. Once expression for Rex1 decreases, this decrease indicates that stress has occurred. In CE, the stress leads to reduced stem cell potency and development potential. Within these embodiments, stress can be detected by time course evaluation of Sox2, Oct4 and Nanog expression and/or time course or single time point evaluation of Rex1.

[0115] In CE, the terminal differentiation of stem cells leads to production of gene products of parenchymal differentiation that distinguishes the 1^{st} lineage available to ESCs and TSCs, and from lineages that normally arise later from these two stem cell types. Thus the careful measure of the ratio of 1^{st}/later lineage intracellular and secreted products predicts stressed stem cells and pregnancies. Specifically for stressed TSCs, compensatory and prioritized differentiation predicts that earliest pregnancy tests will have higher or similar 1^{st} lineage hormone (e.g., PL1), and decreased later lineage hormones from maternal blood at the earliest times.

[0116] The occurrence of a stress can be detected by measuring the expression or activity of potency and/or differentiation factors that cause the up- or down-regulation of a marker. The expression or activity of these factors can identify the occurrence of stress-induced compensatory and prioritized differentiation. For example, increased expression of PL1 or Plf is associated with an up-regulation of SAPK's expression or activity. As a further example, the continued down-regulation of Rex1 following stress is mediated by an up-regulation of JNK's expression or activity. Further relationships between the factors and markers are described in detail in accompanying Examples 1, 2 and 3.

[0117] As is understood by one of ordinary skill in the art, “up-regulation” and “down-regulation” of gene or protein expression, and protein activity can be measured against a relevant control condition including relative to the expression or activity of an unstressed stem cell or relative to differentiation mediated by removal of growth factors that maintain stemness in culture (e.g., normal differentiation control). In CE, up-regulation or down-regulation will be a statistically-significant difference (e.g., p<0.05) from a relevant control condition.

[0118] In CE, stem cells are assessed by measuring gene expression. In such embodiments, the stem cell parameter is a gene expression level or profile. Determining the expression of one or more genes, e.g., obtaining an expression profile) may be made by measuring nucleic acid transcripts, e.g. mRNAs, of genes of interest, e.g. a nucleic acid expression profile; or by measuring levels of one or more different proteins/polypeptides that are expression products of one or more genes of interest, (e.g. a proteomic expression profile). Thus, the terms “expression profile” and “expression evaluation” can be used broadly to include a gene expression profile at the nucleic acid level or a gene expression profile at the protein level.

[0119] In CE, expression of genes may be evaluated by obtaining a nucleic acid expression profile, where the amount or level of one or more nucleic acids in a sample is determined. The nucleic acid sample includes a plurality or population of distinct nucleic acids that includes the expression information of the genes of interest of the stem cell being assessed. The nucleic acid may include RNA or DNA nucleic acids, e.g., mRNA, cRNA, cDNA etc., so long as the sample retains the expression information of the stem cell from which it is obtained. The sample may be prepared in a number of different ways, e.g., by mRNA isolation from a cell, where the isolated mRNA is used as is, amplified, employed to prepare cDNA, cRNA, etc., as performed in the differential expression art. The sample may be prepared from a single cell, e.g. a stem cell or a population of stem cells of interest.

[0120] The expression profile may be generated from the initial nucleic acid sample using many appropriate protocols. One representative protocol is array-based gene expression profile generation protocols. Such protocols can be hybridization assays in which a nucleic acid that displays “probe” characteristics for each of the genes to be assayed/profiled in the profile to be generated is employed.

[0121] Specific hybridization technologies which may be used to generate expression profiles are described in, e.g., U.S. Pat. Nos. 5,143,854; 5,288,644; 5,324,633; 5,432,049; 5,470,710; 5,492,806; 5,503,980; 5,510,270; 5,525,464; 5,547,839; 5,580,732; 5,661,028: and 5,800,992: as well as WO 95/21265; WO 96/31622; WO 97/10365; WO 97/27317; EP 373 203; and EP 785 280. In these S/M, an array of “probe” nucleic acids that includes a probe for each of the phenotype determinative genes whose expression is being assayed is contacted with target nucleic acids. Contact is carried out under hybridization conditions, e.g., stringent hybridization conditions, and unbound nucleic acid is then removed.

[0122] In CE, stringent hybridization conditions include e.g., 2 hr to 4 days incubation at 42° C. using a DIG-labeled DNA probe (prepared by, e.g., using a DIG labeling system; Roche Diagnostics GmbH, 68298 Mannheim, Germany) in a solution such as DigEasyHyb solution (Roche Diagnostics GmbH) or a solution including 50% formamide, 5×SSC (150 mM NaCl, 15 mM trisodium citrate), 0.02% sodium dodecyl sulfate, 0.1% N-lauroylsarcosine, and 2% blocking reagent (Roche Diagnostics GmbH), followed by washing the filters twice for 5 to 15 minutes in 2×SSC and 0.1% SDS at room temperature and then washing twice for 15-30 minutes in 0.5×SSC and 0.1% SDS or 0.1×SSC and 0.1% SDS at 65-68° C.

[0123] Probes can also be designed to have a % sequence identity that is complementary to wild-type gene sequences that lead to conditions that are compatible to produce binding pairs of nucleic acids, e.g., surface bound and solution phase nucleic acids, of sufficient complementarity to provide for the desired level of specificity in the assay while being less compatible to the formation of binding pairs between binding members of insufficient complementarity to provide for the desired specificity. In CE, the probes will have 90% to 100% sequence identity in 1% stepwise increments (e.g., 90%, 91%, 92% up to 100%) that identity a sequence that is complementary to the wild-type sequence being assessed.

[0124] “% sequence identity” refers to a relationship between two or more sequences, as determined by comparing the sequences. In the art, “identity” also means the degree of sequence relatedness between sequences as determined by the match between strings of such sequences. “Identity” (often referred to as “similarity”) can be readily calculated by appropriate methods, including those described in: Computational Molecular Biology (Lesk, ed.) Oxford University Press, NY 1988; Biocomputing: Informatics and Genome Projects (Smith, ed.) Academic Press, NY 1994; Computer Analysis of Sequence Data, Part I (Griffin and Griffin, eds.) Humana Press, NJ 1994; Sequence Analysis in Molecular Biology (Von Heijne, ed. Academic Press 1987); and Sequence Analysis Primer (Gribskov & Devereux, eds. Oxford University Press, NY 1992. Preferred methods to determine sequence identity are designed to give the best binding between the sequences tested. Methods to determine sequence identity and similarity are codified in publicly available computer programs. Sequence alignments and percent identity calculations may be performed using the Megalign program of the LASERGENE bioinformatics computing suite (DNASTAR, Inc., Madison, Wis.). Multiple alignment of the sequences can also be performed using the Clustal method of alignment (Higgins and Sharp CABIOS, 5, 151-153 (1989) with default parameters (GAP PENALTY=10, GAP LENGTH PENALTY=10). Relevant programs also include the GCG suite of programs (Wisconsin Package Version 9.0, Genetics Computer Group (GCG), Madison, Wis.); BLASTP, BLASTN, BLASTX (Altschul, J. Mol. Biol., 215:403 199); DNASTAR (DNASTAR, Inc., Madison, Wis.); and the FASTA program incorporating the Smith-Waterman algorithm (Pearson, Comput. Methods Genome Res., [Proc. Int. Symp.]1994, Meeting Date 1992, 111. Editor(s): Suhai, Sandor. Publisher Plenum, New York, N.Y. Within the context of this disclosure it will be understood that where sequence analysis software is used for analysis, the results of the analysis are based on the “default values” of the program referenced. As used herein “default values” will mean any set of values or parameters which originally load with the software when 1^{st} initialized.

[0125] Resultant patterns of hybridized nucleic acid provides information regarding expression for each of the genes that have been probed, where the expression information is whether or not the gene is expressed and, typically, at what level, where the expression data or expression profile (e.g., in the form of a transcriptome), may be both qualitative and quantitative.

[0126] Alternatively, non-array based S/M for quantitating the level of one or more nucleic acids in a sample may be employed, including those based on amplification protocols, e.g., Polymerase Chain Reaction (PCR)-based assays, including quantitative PCR, reverse-transcription PCR (RT-PCR), real-time PCR, etc.

[0127] In CE, expression of genes may be evaluated by obtaining a proteomic expression profile, where the amount or level of one or more proteins/polypeptides in the sample is determined. Where the expression profile is proteomic expression profile, i.e. a profile of one or more protein levels in a sample, any convenient protocol for evaluating protein levels may be employed wherein the level of one or more proteins in the assayed sample is determined. While a variety of different manners of assaying for protein levels can be used, one representative protocol is enzyme-linked immunosorbent assays (ELISA). Alternatively, non-ELISA based-S/M for measuring proteins levels in a sample, such as mass spectrometry, proteomic arrays, xMAP™ microsphere technology, flow cytometry, western blotting, and immunohistochemistry can be used.

[0128] The disclosure includes modified stem cells with reporter transgene systems that are used to identify compounds or other potential environmental stem cell stressors that cause forced, compensatory or prioritized differentiation and reduced development potential.

[0129] In CE, reporter genes include a nucleic acid sequence encoding a reporter. The reporter transgene is inserted via homologous recombination into the stem cell genome so that the reporter gene is in operable combination with the promoter of a factor or marker (e.g., potency or differentiation) of interest. “In operable combination” refers to the linkage of nucleic acid sequences in a manner such that one or more proteins can be produced. A promoter is a regulatory element that facilitates the initiation of transcription of a coding region of a nucleic acid sequence in operable combination (used interchangeably with operably linked) with it. A promoter is typically, though not necessarily, located 5′ (i.e., upstream) of a nucleotide sequence of interest whose transcription into mRNA it controls, and provides a site for specific binding by RNA polymerase and other transcription factors for initiation of transcription. With this approach, when a factor or marker gene can be expressed, it is expressed as a reporter.

[0130] A “gene” refers to a nucleotide sequence that encodes a protein (e.g., a reporter protein or other proteins described herein). This definition includes various sequence polymorphisms, mutations, and/or sequence variants. In particular embodiments, the sequence polymorphisms, mutations, and/or sequence variants do not affect the function of the encoded protein. The term “gene”, depending on the context, refer only to coding sequences or to coding sequences in combination with regulatory regions such as promoters, enhancers, and termination regions. The term further can include all introns and other DNA sequences spliced from the mRNA transcript, along with variants resulting from alternative splice sites. Nucleic acid sequences encoding proteins can be DNA or RNA that directs the expression of the protein or RNA. These nucleic acid sequences may be a DNA sequence that is transcribed into RNA or an RNA sequence that is translated into protein. The nucleic acid sequences include both the full-length nucleic acid sequences as well as non-full-length sequences derived from the full-length protein or RNA. The sequences can also include degenerate codons of the native sequence or sequences that may be introduced to provide codon preference. In addition to particular sequences provided, gene sequences to encode reporter proteins and other proteins are available in publicly available databases and publications.

[0131] In CE, a gene of interest encodes any of the potency factors, potency markers, compensatory or prioritized differentiation factors or markers disclosed herein. In CE, a reporter gene encodes any reporter disclosed herein.

[0132] The disclosure is not limited to the use of any particular reporter gene. Indeed, the use of a variety of reporters can be used. In CE, the disclosure provides S/M for transfecting stem cells with reporter genes encoding fluorescent proteins, wherein the expression of the fluorescent proteins provides an expression assay in stem cells without having to sacrifice the cells. Fluorescent reporters are known and can be obtained commercially at, e.g., Promega Corporation, Invitrogen, Clontech, Stratagene, BD Biosciences Pharmingen, or Evrogen JSC. Additional examples of fluorescent proteins can be found at, e.g., U.S. Pat. Nos. 6,884,620 and 6,645,761. The disclosure is not limited by the fluorescent protein-encoding gene, and any fluorescent encoding gene can be used.

[0133] In CE, the gene encoding the fluorescent protein can be optimized for mammalian expression by codon optimization for mammalian translational machinery. In CE, the disclosure provides S/M for transfecting stem cells with reporter genes encoding enzymatic proteins, wherein the expression of the enzymatic proteins provides a viable expression assay without sacrificing the stem cells. For example, the expression of reporter enzymatic proteins provide light output upon substrate utilization. Examples of such enzymatic proteins that produce light as a byproduct of substrate utilization include, luciferase and β-lactamase. Luciferase encoding reporter genes (e.g. Photinus sp. (GenBank Accession No. AY738222), Renilla sp. (GenBank Accession No. AF025844), Pyrophorus sp. (GenBank Accession No. AY258591 and AY258593), etc.) are commercially available from Promega Corporation, Stratagene and Clontech, e.g., and 1-lactamase encoding reporter genes are available from Invitrogen, for example.

[0134] In CE, modified stem cells may be transfected with a vector including a wild-type promoter or a synthetic promoter made up of repeated response elements to a given single transcription factor (as done with Rex1 and Oct4 in Li (2015). Submitted to Stem Cells and Development. Rapid development and validation of a Rex1 promoter-RFP (red fluorescent reporter) viable potency activity reporter quantifies stress-induced ESC potency loss and supports the theory of compensatory differentiation. In these embodiments, the vector will integrate into the stem cell genome and on-going cellular events will interact with the inserted promoter. When conditions occur that would cause transcription of the genes associated with the wild-type promoter, expression of the inserted reporter will also occur.

[0135] The ability of certain viruses to infect stem cells or enter stem cells via receptor-mediated endocytosis, and to integrate into the stem cell genome and express genes stably and efficiently have made them attractive candidates for the transfer of foreign nucleic acids into stem cells. Non-limiting examples of viral vectors that can be used include adenoviral vectors and retroviral vectors. Adenoviral vectors include those constructs containing adenovirus sequences sufficient to (a) support packaging of a construct and (b) express a cell-specific construct that has been cloned therein. Retroviral vectors integrate their genes into stem cell genomes and are capable of transferring a large amount of foreign genetic material, infecting a broad spectrum of species and cell types (Miller, Am. J. Clin. Oncol., 15(3):216, 1992). Lentiviruses are complex retroviruses, which, in addition to the common retroviral genes gag, pol, and env, contain other genes with regulatory or structural function. See, e.g., Naldini, Science, 272(5259):263, 1996; Zufferey, Nat. Biotechnol., 15(9):871, 1997; U.S. Pat. Nos. 6,013,516 and 5,994,136). Some examples of lentivirus include the Human Immunodeficiency Viruses: HIV-1ad nHIV-. Lentiviral vectors have been generated by multiply attenuating the HIV virulence genes, e.g., the genes env, vif, vpr, vpu and nef are deleted making the vector biologically safe. Recombinant lentiviral vectors are capable of infecting stem cells and can be used for ex vivo gene transfer and expression of nucleic acid sequences. For example, recombinant lentivirus capable of infecting cells wherein a suitable host cell is transfected with ≧2 vectors carrying the packaging functions, namely gag, pol and env, as well as rev and tat is described in U.S. Pat. No. 5,994,136.

[0136] Promoters used in embodiments described herein may be “endogenous” (e.g., wild-type), “exogenous” or “heterologous.” An “endogenous” promoter is one that is naturally operably linked with a given gene in the genome. An “exogenous” promoter is one that is not native to the wild-type genome. A “heterologous” promoter is a type of exogenous promoter that shares at least 90% sequence identity with an endogenous promoter.

[0137] In CE, reporter gene constructs include a selectable marker. The disclosure is not limited to the use of any particular selectable marker. An exemplary selectable marker includes dominant selectable markers such as the bacterial aminoglycoside 3′ phosphotransferase gene (also referred to as the neo gene) that confers resistance to the drug G418 in mammalian cells. Other selectable markers are used in stem cell lines that lack the relevant enzyme activity. Examples of non-dominant selectable markers include the thymidine kinase (tk) gene that is used in conjunction with tk-deficient cell lines and the mammalian hypoxanthine-guanine phosphoribosyl transferase (hprt) gene, which is used in conjunction with hprt-deficient cell lines. A review of the use of selectable markers in mammalian cell lines is provided in Sambrook, J. Molecular Cloning: A Laboratory Manual, 2nd ed., Cold Spring Harbor Laboratory Press, New York (1989) pp. 16.9-16.15.

[0138] Gene constructs including vectors and reporter genes described herein can be inserted or “knocked-in” at a desired locus in a stem cell. Methods for generating gene constructs for use in generating knock-in cell lines and techniques for generating such cell lines are described in, e.g., Sambrook 1989, Molecular Cloning, A Laboratory Manual, 3^{rd} ed., Cold Spring Harbor Laboratory; Yoo, Neuron, 37:383, 2003; and Lin, Human Molecular Genetics, 10:137, 2001. Exemplary knock-in methods include ex vivo transfection (see, e.g., Wilson, Science, 244:1344, 1989; and Nabel & Baltimore, Nature, 326:711, 1987), optionally with Fugene6 (Roche) or Lipofectamine (Invitrogen); injection (see, e.g., U.S. Pat. Nos. 5,994,624; 5,981,274; 5,945,100; 5,780,448; 5,736,524; 5,702,932; 5,656,610; 5,589,466; and 5,580,859); microinjection (see, e.g., Harland and Weintraub, J. Cell. Biol., 101:1094, 1985; U.S. Pat. No. 5,789,215); electroporation (e.g., U.S. Pat. No. 5,384,253; Tur-Kaspa, Mol. Cell. Biol., 6:716, 1986; Potter, Proc. Nat'l. Acad. Sci. USA, 81:716, 1984); calcium phosphate precipitation (Graham & Van Der Eb, Virology, 52:456, 1973; Rippe, Mol. Cell. Biol., 10:689, 1990); DEAE-dextran followed by polyethylene glycol (Gopal, Mol. Cell. Biol., 5:1188, 1985); direct sonic loading (Fechheimer, Proc. Nat'l Acad. Sci. USA, 84:8463, 1987); liposome mediated transfection (Nicolau & Sene, Biochim. Biophys. Acta, 721:185, 1982; Fraley, Proc. Nat'l. Acad. Sci. USA, 76:3348, 1979; Nicolau Methods Enzymol., 149:157, 1987; Kaneda, Science, 243:375, 1989) and receptor-mediated transfection (Wu & Wu, Biochemistry, 27:887, 1988; Wu & Wu, J. Biol. Chem., 262:4429, 1987) and any combination of such methods.

[0139] In CE, brake pedal/potency and accelerator pedal/differentiation constructs and modified viable reporter ESCs can be described as follows: multimerized Oct4 promoters and multimerized Rex1 promoters that drive green fluorescent protein (GFP) and red fluorescent protein (RFP) respectively can be expressed in living ESCs. Following exposure to stress, the Rex1 potency loss should be greater and more permanent than Oct4 loss. These results can be determined by immunoblots for biochemical measures and FACS and microplate reader for visual assays. Microplate readers also provide for HTS for various stresses.

[0140] Modified ESCs with a GFP knocked into one of the endogenous Pdgfra loci differentiation reporters have been tested. In these embodiments, GFP expression is driven by the endogenous promoter as it is activated by normal or stressed mechanisms. The specificity of Pdgfra-GFP induction can be validated using other co-markers of 1^{st} lineage induced during stressed differentiation and later lineages that are induced during growth factor removal but suppressed during stressed differentiation. Thus DAB2, LRP2, and GATA6 are appropriate co-markers of 1^{st} lineage ExEndo, FGF5, and SPARC are appropriate markers of other later lineages suppressed by stress-induced differentiation but activated during normal differentiation by removing potency-maintaining growth factors.

[0141] CE of ESC reporter cell lines include: (1) Potency measuring viable reporters (decreased with stress): (a) Oct4 multimerized promoter-GFP (“Oct4-GFP”); (b) Rex1 multimerized promoter-RFP (“RexI-FRP”); (c) Oct4-GFP/Rex1-RFP co-expressing ESCs (“Oct4-GFP/Rex1-RFP”); (2) Differentiated 1^{st} lineage measuring viable reports (increased with stress): (a) Pdgfra promoter-GFP knockin (“Pdgfra-GFP”); (b) Sox17 Endo promoter-GFP knockin (“Sox17-GFP”); (c) DAB2, LRP2 Endo promoter-GFP; (d) GATA6 Endo promoter-GFP; (3) Later lineage measuring promoters (decreased with stress): (a) Brachyury Endo promoter-GFP knockin (“Brachy-GFP”); (b) FGF5 promoter-GFP knockin (“FGF5-GFP”); (4) Stress enzymes that regulate potency loss (AMPK) and 1^{st} lineage gain (SAPK/JNK): (a) Constitutive promoter AMPKAR (AMPK viable activity reporter); and (b) Constitutive promoter JNKAR (SAPK/JNK viable activity reporter).

[0142] In CE, modified viable reporters such as PL1 promoter-RFP can be used to measure transcription factors marking the differentiation to 1^{st} lineage available to TSCs.

[0143] CE utilizing Rex1-RFP for brake pedal, potency-loss testing and Pdgfra-GFP for accelerator pedal, 1^{st} lineage differentiation-increase testing represent preferred viable ESC-HTS reporters. Because submorbid, runting doses that cause differentiation are used, it is important, and technically feasible to add a nuclear stain to the color plate reader excitation and band pass acquisition and assay the level of diminished stem cell population expansion. At any stress dose, taken together or individually (i) decreased potency, (ii) increased 1^{st} lineage, and (iii) diminished cell population expansion should give an accurate analysis of stress impacts on embryonic and fetal development in response to toxicological stress and is completely unique amongst stem cell assays for toxicology.

[0144] In generating an expression profile, in CE a sample is assayed to generate an expression profile that includes expression data for at least 1 gene/protein, sometimes a plurality of genes/proteins, where by plurality is meant at least 2 different genes/proteins, and often at least 3, at least 4, at least 5, or at least 10 different genes/proteins, etc. The Luminex Xmap system (Luminex Corp, Austin, Tex.) allows for, e.g., 500 simultaneous fluorescent frequency multiplexing.

[0145] In the broadest sense, the expression evaluation may be qualitative or quantitative. As such, where detection is qualitative, the S/M provide an assessment, of whether or not the target analyte is present in the sample being assayed. In other embodiments, the S/M provide a quantitative detection of whether the target analyte is present in the sample, e.g., an assessment of the actual amount or relative abundance of the target analyte

[0146] S/M can include comparisons to reference levels. Reference levels can be obtained from a dataset. A reference level from a dataset can be derived from previous measures derived from a population. A “population” is any grouping of stem cells of like specified characteristics. The grouping could be according to, e.g., previous exposure to a stress condition or lack thereof.

[0147] A “dataset” as used herein is a set of numerical values resulting from evaluation of a sample (or population of samples) under a desired condition. The values of the dataset can be obtained, e.g., by experimentally obtaining measures from a sample and constructing a dataset from these measurements. As is understood by one of ordinary skill in the art, the reference level can be based on e.g., any mathematical or statistical formula useful in the art for arriving at a meaningful aggregate reference level from a collection of individual datapoints; e.g., mean, median, median of the mean, etc. Alternatively, a reference level or dataset to create a reference level can be obtained from a service provider such as a laboratory, or from a database or a server on which the dataset has been stored.

[0148] In CE, conclusions are drawn based on whether a measure is statistically significantly different or not statistically significantly different from a reference level. A measure is not statistically significantly different if the difference is within a level that would be expected to occur based on chance alone. In contrast, a statistically significant difference or increase is one that is greater than what would be expected to occur by chance alone. Statistical significance or lack thereof can be determined by any of various S/M used in the art. An example of a commonly used measure of statistical significance is the p-value. The p-value represents the probability of obtaining a given result equivalent to a particular datapoint, where the datapoint is the result of random chance alone. A result is often considered significant (not random chance) at a p-value less than or equal to 0.05.

[0149] Embodiments can be used with high throughput screening (HTS). In HTS, numerous different compounds can be tested for potential stress effects quickly. For example, stem cells (e.g., modified stem cells) can be provided to wells of a microtiter plate, including, e.g., a 96- or 384-well plate that can be read in a fluorescent microplate reader. The stem cell lines in the wells can then be exposed to different compounds and/or different concentrations of compounds. In additional embodiments, stem cells can be contacted with a single test agent, or, to facilitate HTS, to at least 2, at least 5, at least 10, at least 100, at least 1,000, at least 10,000, at least 100,000 or at least at least 1,000,000 test compounds at a time. Environmental conditions can similarly be screened, and test compounds and environmental conditions can be screened in various combinations. If the stem cells score positive for stress, a different set of stem cells can be subsequently tested with a subset of the test compounds or environmental conditions until the compounds or conditions creating the stress effect are identified.

[0150] High-throughput screening systems are commercially available from, e.g., Zymark Corp., Hopkinton, Mass.; Air Technical Industries, Mentor, Ohio; Beckman Instruments, Inc. Fullerton, Calif.; Precision Systems, Inc., Natick, Mass., Luminex Corp., etc. These systems typically automate entire procedures including all sample and reagent pipetting, liquid dispensing, timed incubations, and final readings of the microplate in detector(s) appropriate for the assay. These configurable systems provide high throughput and rapid start up as well as a high degree of flexibility and customization. The manufacturers of such systems provide detailed protocols for the various S/M of high throughput.

[0151] Kits to practice the S/M are also provided. Kits can include one or more containers including modified stem cells, primer pairs, probe sequences, binding proteins (e.g., antibodies) and/or reagents or supplies to assess expression of a gene of interest described herein. Components of the kit can be prepared for storage and later use. Associated with such container(s) can be a notice in the form prescribed by a governmental agency regulating the manufacture, use, or sale of the kit, which notice reflects approval by the agency of manufacture, use, or sale, when required.

[0152] Optionally, the kits further include instructions for using the kit in the methods. In various embodiments, the instructions can include appropriate reference levels to interpret results associated with using the kit; proper disposal of the related waste; and the like. The instructions can be in the form of printed instructions provided within the kit or the instructions can be printed on a portion of the kit itself. Instructions may be in the form of a sheet, pamphlet, brochure, CD-Rom, or computer-readable device, or can provide directions to instructions at a remote location, such as a website.

[0153] The Examples below describe the optimization of the methods. These Examples are included to demonstrate CE of the disclosure. Those of ordinary skill in the art should recognize in light of the present disclosure that many changes can be made to the specific embodiments disclosed herein and still obtain a like or similar result without departing from the spirit and scope of the disclosure.

### EXAMPLES

### Example 1

[0154] As an embryo implants into the uterus, stress can diminish placental TSCs proliferation inducing differentiation to create more essential differentiated product/cells. Xie, 2014, Xie, Int. Rev. Cell. Mol. Biol., 287:43, 2011 (Xie, 2011); Awonuga Mol. Reprod. Dev., 78:519, 2011 (Awonuga, 2011); Zhong, Reproduction, 140:921, 2010 (Zhong, 2010). This “compensatory” differentiation thus further depletes the size of the population of multipotent TSC. Most human embryos are lost before birth and the greatest loss occurs soon after implantation. Cross, Science, 266:1508, 1994. Understanding the cellular and molecular mechanisms of TSC stress responses informs strategies to ameliorate their consequences during implantation.

[0155] Implantation site O₂ is normally 2%, when O₂ levels are optimized, highest growth and least stress (activation of stress-activated protein kinase/SAPK) is at 2% O₂. Zhou, 2011. Also, dose responses of SAPK activation in response to TNFalpha, dioxin suggest that these stressors could activate compensatory and prioritized differentiation in TSC (Xie, 2008, Zhong, Reprod. Sci., 14:534, 2007 (Zhong, 2007)). Cigarette smoke condensate and IFNgamma also may activate compensatory differentiation through Rex1 loss in mouse ESCs.

[0156] Although stress at 20% is greater than at 2% O₂, only O₂<2% activates high levels of SAPK that are comparable to other stresses at 20% O₂, describing a U-shaped curve for stress that is proportional to levels of SAPK and inversely proportional to growth. Hypoxic stress for stem cells at 0.5% O₂ combined with FGF4 is maximal for priming TSC for differentiation by producing the lowest levels of three potency factors (Inhibitor of differentiation (Id)2 Caudal related homeobox Cdx(2), Estrogen receptor related, (Err)beta) and highest levels of three nuclear factors (heart and neural differentiation Hand(1), glial cells missing Gcm(1), and trophobiast specific binding protein Tpbp(a) that mediate TSC differentiation.

[0157] Fibroblast growth factor (FGF)4 is synthesized in the implanting embryo (Xie 2011) and is necessary for maintaining TSC proliferation and potency in culture (Tanaka, 1998) and in the embryo (Chai, 1998). To better emulate preimplantation stress effects, TSC culture was performed in this Example for 24 hr in the presence of FGF4. Furthermore, to study the longer period of postimplantation development, culture was extended to 7 days with FGF4 removed to stimulate normal differentiation.

[0158] During normal postimplantation placental development, the 1^{st} lineage differentiating from TSC is parietal trophobiast giant cells (pTGC) at E4.5 (4.5 days after fertilization), followed by spongiotrophoblasts at E7.0 and labyrinthine, chorionic syncytiotrophoblasts (synT) and sinusoidal TGC (sTGC) at E7.5. Simmons, BMC Genomics, 9:352, 2008; Simmons, Dev. Biol., 304:567, 2007. SAPK is needed to mediate stress-induced suppression of placental cell cycle and TSC differentiation to the earliest lineage, pTGC, in placental cells. Xie, Mol. Hum Reprod., 13:473, 2007 (Xie, 2007); Awonuga, 2011. Without being bound by theory, it is believed that stress “prioritizes” differentiation as hyperosmolar stress induces TSCs to differentiate into the earliest postimplantation lineage/marker (e.g., pTGC/Hand1) but not later lineages/markers (e.g., synTA/Gcm1; Xie, 2011, supra). Because SAPK mediates hyperosmolar stress-induced Hand1 and Hand1-dependent PL1 (Awonuga, 2011), whether stress-induced lineage choice during hypoxia was SAPK-dependent was tested. Because hyperosmolar stress induces the 1^{st} lineage but not later lineages from TSC (Liu, Placenta, 30:66, 2009), and SAPK mediates the induction of 1^{st} lineage markers (Awonuga, 2011), it was hypothesized that SAPK will mediate induction of the 1^{st} lineage/marker (pTGC/Hand1) and suppression of later lineage/marker (synTA/Gcm1) induced by hypoxic stress.

[0159] Here the effects on potency and lineage differentiation in cultured TSC of FGF4 removal during TSC culture with O₂ levels at 20, 2, 0.5, and 0% was tested. It was found that FGF4 maintains Warburg metabolism (suppression of mitochondrial electron transport chain and activation of aerobic glycolysis) at all O₂ levels, but during hypoxic stress at 0.5% O₂ differentiation was induced by O₂ levels that were insufficient to support increased mitochondrial activity or suppress aerobic glycolysis. This led to a rapid but incomplete differentiation and lineage imbalance as two lineages at the maternal interface of the later-developing chorionic placenta are largely suppressed at all O₂ levels <20%. Failure of these lineages is associated with spontaneous miscarriage, preeclampsia, intrauterine growth retardation, and preterm labor.

[0160] Materials and Methods. Materials. Reagents for maintaining TSC, delivering (O₂)s and for SAPK and actin antibodies and SAPK inhibitors were described previously (Awonuga, 2011; Zhou, 2011). The primary antibodies for pyruvate kinase embryonic form (PKM)2 (CS3198), PKM2 Tyr105 (CS3827) were from Cell signaling (Danvers Mass.), and pyruvate kinase adult form (PKM)1 antibody (AP7476b) was purchased from Abgent (San Diego, Calif.). Cyto-oxygenase (COX) subunit I antibody (MS404) was purchased from MitoSciences (Eugene, Oreg.). The mitochondrial membrane potential (ΔΨₘ) stains tetramethylrhodamine methyl ester (TMRM), MitoTracker red, and 5,5′,6,6′-tetrachloro-1,1′,3,3′-Tetra-ethylbenzimidazolylcarbo-cyanine iodide (JC1) were purchased from Molecular Probes (Grand Island, N.Y.). Mitochondrial inhibitors antimycin A and cyanide, the mitochondrial activator dichloroacetate (DCA), and the OxPhos uncoupler Carbonyl cyanide 4-(trifluoromethoxy)phenylhydrazone (FCCP) were purchased from Sigma (St. Louis, Mo.). FGF4 and heparin were from Sigma Chemical Co. (St. Louis, Mo.). Fetal bovine serum and RPMI1640 were from Gibco (Grand Island, N.Y.). SAPK inhibitor SP600125 and LJNKI1 SAPK inhibitor were purchased from Calbiochem-EMD (Emanuel Merck, Darmstadt)(San Diego, Calif.). Anaerobic bags to create 0% O₂ were purchased from Hardy Diagnostics (AN010C, Santa Maria, Ca).

[0161] Cell lines and culture conditions. The mouse TSC sources and culture conditions were described previously. Awonuga, 2011; Zhou, 2011. Briefly, mouse TSC isolated from E3.5 and E6.5 conceptuses were from Dr. Rossant (Lunenfeld Research Institute, Ontario, Canada) and cultured. Cells were cultured with premixed gas at 0.5%, 2% (O₂/CO₂/N₂ levels of 0.5/4.5/95, and 2/5/93, respectively, Praxair, Warren, Mich.), and 20% O₂ levels were obtained by mixing 5% CO₂ from a 100% CO₂ gas tank with ambient N₂ and O₂ levels. Media were pre-equilibrated under O₂ levels for TSC culture overnight prior to culture. Quantitative removal of gas phase O₂ requires 30 min in anaerobic bags, i.e., there was only a minimal period when 20% O₂ was ambient to media that was pre-equilibrated under 0, 0.5, or 2% O₂. Since 12-24 hr is required to equilibrate gas phase to complex media/liquid phase, there was no appreciable exposure of TS cells to 20% O₂ again after the switch to 0, 0.5, or 2% O₂.

[0162] RNA isolation and quantitative reverse transcription-PCR (qRT-PCR). All steps in RNA isolation, cDNA synthesis and qPCR performance and analysis were described previously (Zhou, 2011). Briefly, DNase-treated total RNA was isolated following cDNA preparation using QuantiTect Reverse Transcription Kit iScript (Qiagen). Assays were performed using Fast SYBR Green on a System 7500 instrument (Applied Biosystems), and a one-step program for 40 cycles. Each experiment was carried out in triplicate, and all three genes for TSC multipotency were normalized against 18S rRNA.

[0163] Primers used are shown in the following Table 1:

TABLE 1
List of primers used in qPCR assays

| | | |
|---|---|---|
| Gene | | |
| abbreviation | Gene Name | Primer sequence |

TSC Multipotency Markers

| | | | |
|---|---|---|---|
| Errβ | Estrogen- | F | 5′ GGGAGCTTGTGTTCCTCATC 3′ (SEQ ID NO: 96) |
| | related | R | 5′ CTACCAGGCGAGAGTGTTCC 3′ (SEQ ID NO: 97) |
| | receptor-β | | |
| Cdx2 | Caudal type | F | 5′ CCAGCTCTTTGCCTCTCTGT 3′ (SEQ ID NO: 98) |
| | homeobox-2 | R | 5′ TGCCTCTGGCTCCTGTAGTT 3′ (SEQ ID NO: 99) |
| Id2 | DNA-binding | F | 5′ TCAGCCTGCATCACCAGAGA 3′ (SEQ ID NO: 100) |
| | protein inhibitor | R | 5′CTGCAAGGACAGGATGCTGAT 3′ (SEQ ID NO: 101) |

Transcription Factors (Hand1, Tfeb, Gcm1) and other marker (Tpbpa)

| | | | |
|---|---|---|---|
| HAND1 | Heart- and | F | 5′GGATGCACAAGCAGGTGAC3′ (SEQ ID NO: 102) |
| | neural crest | R | 5′CACTGGTTTAGCTCCAGCG3′ (SEQ ID NO: 103) |
| | derivatives | | |
| | expressed protein1 | | |
| Tpbpa | Trophoblast | F | 5′ CGGAAGGCTCCAACATAGAA 3′ (SEQ ID NO: 104) |
| (4311) | specific protein | R | 5′ TCAAATTCAGGGTCATCAACAA 3′ (SEQ ID NO: 105) |
| | alpha | | |
| Tfeb | Transcription | F | 5′ AACAAAGGCACCATCCTCAA 3′ (SEQ ID NO: 106) |
| | factor EB | R | 5′ CAGCTCGGCCATATTCACAC 3′ (SEQ ID NO: 107) |
| Gcm1 | Glial cells | F | 5′ AACACCAACAACCACAACTCC 3′ (SEQ ID NO: 108) |
| | missing-1 | R | 5′ CAGCTTTTCCTCTGCTGCTT 3′ (SEQ ID NO: 109) |

Terminal Differentiation Markers for Giant Cell

| | | | |
|---|---|---|---|
| Pl-I | Placental | F | 5′ TGGTGTCAAGCCTACTCCTTT 3′ (SEQ ID NO: 110) |
| | lactogen-1 | R | 5′ CAGGGGAAGTGTTCTGTCTGT 3′ (SEQ ID NO: 111) |
| Pl-II | Placental | F | 5′ CCAACGTGTGATTGTGGTGT 3′ (SEQ ID NO: 112) |
| | lactogen-2 | R | 5′ TCTTCCGATGTTGTCTGGTG 3′ (SEQ ID NO: 113) |
| Plf | Proliferin | F | 5′ TGAGGAATGGTCGTTGCTTT 3′ (SEQ ID NO: 114) |
| | | R | 5′ TCTCATGGGGCTTTTGTCTC 3′ (SEQ ID NO: 115) |
| Ctsq | Cathepsin Q | F | 5′ AACTAAAGGCCCCATTGCTAC 3′ (SEQ ID NO: 116) |
| | | R | 5′ CAATCCCCATCGTCTACCC 3′ (SEQ ID NO: 117) |

Terminal Differentiation Markers for Syncytiotrophoblast

| | | | |
|---|---|---|---|
| synA | Syncytin-A | F | 5′ CCCTTGTTCCTCTGCCTACTC 3′ (SEQ ID NO: 118) |
| | | R | 5′ TCATGGGTGTCTCTGTCCAA 3′ (SEQ ID NO: 119) |

Loading Control

| | | | |
|---|---|---|---|
| 18S | 18S ribosomal | F | 5′ CGCGGTTCTATTTTGTTGGT 3′ (SEQ ID NO: 120) |
| | subunit | R | 5′ AACCTCCGACTTTCGTTCTTG 3′ (SEQ ID NO: 121) |

[0164] Mitochondrial staining by MitoTracker dye. TSC were cultured at different O₂ levels at least 24 hr stained with DAPI (D21490, Invitrogen) alone or with either MitoTracker Red FM (Invitrogen), TMRM (T668), or JC-1 (T3168, Invitrogen) alone or with the uncoupler FCCP (Sigma), and analyzed under a DM-IRE2 fluorescence microscope (Leica, Germany) using Simple PCI image acquisition software (Hamamatsu, Sewickley, Pa.).

[0165] In more detail, TSC were cultured on coverslips in 12-well plates at different O₂ levels either with or without FGF4, for 48 hr. Before experiments were conducted at low O₂ tension, TSC were adapted in a hypoxia chamber (Billups-Rothenberg, CA) at the given O₂ level described above for at least 24 hr. Nuclear dye 2.5 μg/ml DAPI (D21490, Invitrogen) was applied as a counterstain 1 hr before TSC were incubated alone with either 50 nM MitoTracker Red FM (M22425m, Invitrogen) for 30 min, 20 nM TMRM (T668) for 30 min, or 3.25 nM JC-1 (T3168, Invitrogen) for 45 min, or in combination with the uncoupler FCCP (1 nM, Sigma, C2920). After staining, the TSC were washed with PBS 2 times and immediately analyzed under a DM-IRE2 fluorescence microscope (Leica, Germany) using Simple PCI image acquisition software (Hamamatsu, Sewickley, Pa.).

[0166] Western analysis. TSC were lysed, protein assayed, separated by PAGE-SDS, immunoblotted and films exposed and analyzed as done previously. Zhou, 2011. In more detail, cytochrome c oxidase (COX) levels were determined by Western analysis. Proteins were extracted with lysis buffer (Cell signaling, #9803). Forty μg protein was loaded per well of pre-cast gels (Bio-rad, 161-1101). Proteins were transferred onto nitro-cellulose membranes and then incubated with anti-mouse monoclonal COX subunit I antibody (1:500; MitoSciences, MS404) overnight. After incubation with secondary antibody, signal was detected by chemiluminescence using ECL Advance (RPN2135, GE Healthcare Biosciences, Pittsburgh Pa.).

[0167] ATP measurements. TSC were washed, collected, centrifuged, frozen on dry ice, and stored. Cell pellets were boiled, lysed, iced, and solubilized by ultrasonication. (ATP)s were determined using the ATP bioluminescence assay kit HS II (Roche Applied Science) by the manufacturer's protocol. Data were standardized to the protein concentration. In more detail, TSC were washed with PBS once, collected by scraping, centrifuged at 10,000 rpm for 30 sec and then PBS was quickly removed. Cells were immediately frozen on dry ice and stored at −80° C. Cell pellets were supplemented with 300 μl boiling buffer (100 mM Tris, pH 7.75, 4 mM EDTA) and immediately transferred to a boiling water bath, lysed for 2 min, put on ice, and solubilized by ultrasonication. ATP concentrations were determined using the ATP bioluminescence assay kit HS II (Roche Applied Science) according to the manufacturer's protocol. Data were standardized to the protein concentration.

[0168] ROS measurements at 20% O₂. TSC were trypsinized, centrifuged, washed, and incubated with the ROS-sensitive probe 2′,7′-dichlorodihydrofluorescein diacetate (Molecular Probes), and analyzed on an Ascent Fluoroskan plate reader. Experiments were performed in triplicate and data standardized to cell number. As a control, cells were incubated in the presence of 100 μM H₂O₂.

[0169] In more detail, after differentiation at 20% O₂, TSC were trypsinized, collected by centrifugation, washed, and incubated with the ROS-sensitive probe 2′,7′-dichlorodihydrofluorescein diacetate (H₂DCFDA; D-399, Molecular Probes) at a final concentration of 7.5 μM for 20 min at 37° C. in the dark. Cells were collected by centrifugation, supplemented with media, and incubated in the dark for 20 min at 37° C. As a control, cells were incubated in the presence of 100 μM H₂O₂. Cells were collected by centrifugation, resuspended in PBS, transferred to a 96-well plate (Costar 3603; 200 μL per well), and analyzed on an Ascent Fluoroskan plate reader (488 nm excitation; 527 nm emission). Experiments were performed in triplicate and data standardized to cell number counted with a hemocytometer.

TABLE 2
Estimation of changes in PKM2 and COX subunit 1 activity
caused by removal of FGF4 at 20% or 0.5% O₂.
Dual regulation of rate-limiting steps in ETC and glycolysis
shown by removing FGF4 at 20% and 0.5% O₂.

| day 2 | 20% | | ETC | | | |
|---|---|---|---|---|---|---|
| usage | anabolic | | activity | 0.5% | | carbon |
| Total COX | FGF4+ | FGF4− | delta | FGF4+ | FGF4− | delta |
| | 1 | 2.3 | +2.3x | 0.4 | 0.4 | 1 |
| pCOX | 1 | 0.4 | +2.5x | 0.85 | 0.25 | +3.4 |
| total activity delta | +3.4 × 0.4 = +1.36 | | +5.8 | ×2.3 = +13.34 | | |
| Total PKM2 | 1 | 1 | 1 | 3.3 | 4.7 | +1.4 |
| pPKM2 | 1 | 0.35 | −3x | 0.9 | 0.3 | −3x |
| total activity delta | | | −3x × 1 = −3x | | | |
| | | | −4.2 × 4.7 = −19.74 | | | |

Values from FIG. 7
ETC activity is a product of changes with FGF4 removal of total protein (dependent on O₂ levels) multiplied by the change in posttranslational regulation (dependent on FGF4) and this product is multiplied by the total protein levels after FGF4 removal that is acted upon.

[0170] Statistical analysis. The data in this Example are representative of three independent experiments and indicated as mean±s.e.m. Data were analyzed with SPSS v. 19.0 using the Kruskal-Wallis non-parametric ANOVA for not normally distributed values, and if significant, the pairs of treatments were tested using the Mann-Whitney U-test with a Bonferroni correction for multiple comparisons. Groups were considered to be significantly different if p<0.05.

[0171] Results. SAPK increases the 1^{st} lineage and decreases later lineages proportional to the deviation from the optimal O₂ at 2%. Two SAPK inhibitors with different mechanisms, SP600125 and LJNKI1, were used to limit possible off-target effects. Both SAPK inhibitors prompted a 3-7-fold increase in the later chorionic lineage (Gcm1), with the highest inhibition occurring at 0.5% and 20% O₂ (FIGS. 1A and 2). Both SAPK inhibitors also increased later spongiotrophoblast lineage (Tpbpa) at all O₂ levels. In contrast, both inhibitors suppressed early lineage pTGC (Hand1) mRNA (FIGS. 1A and 2) with suppression being highest at 0.5% and 20% O₂. Furthermore, both SAPK inhibitors suppressed later lineages (Tpbpa and Gcm1) and increased the earliest lineage (Hand1, FIG. 1B and FIGS. 2, 3A and 3B). The smallest effects on Hand1, Tpbpa, and Gcm1 occurred at 2% O₂, but as O₂ levels deviated from 2% the mRNA levels are influenced by SAPK level upward for Hand1 and downward for Gcm1 (FIG. 1B).

[0172] The mRNA levels for 3 multipotency factors (Cdx2, Id2, and Errβ) were unaffected by 24 hr of O₂ at 2-20% but were greatly reduced at 0.5% O₂, despite FGF4. Neither SAPK inhibitor affected multipotency factors maintenance at 2-20% O₂, or the loss of the 3 multipotency factors at 0.5% O₂ (FIG. 1C). Hence during hypoxic stress, SAPK mediated prioritized differentiation (FIGS. 4A-4D), but not multipotency loss.

[0173] Loss of potency and gain of differentiation are O₂-dependent, and hypoxia suppresses labyrinthine placenta. It was 1^{st} tested whether the most stressful 0.5% O₂ level induces most loss of potency factor transcripts and increased differentiation after FGF4 removal. It was found that following FGF4 removal, the caudal homeobox related (Cdx2), Inhibitor of Differentiation (Id)2, and estrogen receptor related (Err)β—potency-mediating mRNA—were the most rapidly lost by 24 hr at 0-0.5% O₂ (FIG. 4A, 2). In contrast by day 7 0.5% O₂ sustained the highest potency factor mRNA levels while the lowest average level of the potency factors were observed at 20% O₂.

[0174] At 24 hr, 2 markers for the 1^{st} lineage pTGC showed stress-induced differentiation (PL1, Plf, FIGS. 4B and 4C, FIGS. 3A and 3B). First lineage markers PL1 and Plf were 2-3-fold higher at 0-0.5% than at 20% O₂ after 24 hr. Two later lineages found at the placental surface, sTGC (PL2+CtsQ) and syncytiotrophoblast A cells (synTA) were not increased (FIG. 4C). Transcription factors supporting 1^{st} and secondary pTGC, Hand1 and Tpbpa were upregulated in the first 24 hr at O₂<2% (FIGS. 3A and 3B). Thus the early response to hypoxic stress <2% O₂ is to differentiate to the 1′, but not later lineages. A marker of 1^{st} lineage (PL1) was induced by O₂<2%, but differentiation did not increase greatly at low O₂ and by day 7 PL1 was most highly expressed at 20% O₂ (FIG. 4D, FIG. 5). In contrast a marker of a later lineage (synTa) was not disproportionally upregulated by O₂<2% and was always most highly expressed at 20% O₂.

[0175] Through day 4, the average differentiation increased threefold at all O₂ levels over day 0. However, by day 7, while 0-0.5% O₂ maintained this threefold increase, increases of 10-fold and 25-fold were observed for 2% and 20% O₂, respectively. First lineage markers PL1 and Plf were much more highly induced at 2-20% than at <2% O₂ but by day 7 all five differentiation markers were highest at 20% O₂ (FIG. 5). Thus, after a fast, early increase in differentiation of especially the 1^{st} lineage, differentiation stalled at hypoxic 0-0.5% O₂ but increased greatly at 2-20% O₂.

[0176] Proliferin (Plf), placental lactogen (PL)1, CtsQ, and synTa had a maximal increase of 7-10 fold, and 1 marker (placental lactogen, (PL)2) had a 70-fold increase by day 7 at 20% O₂ (FIG. 4B,C). The two placental surface lineages, sTGC and synTA cells appear least supported by O₂ at <20%. Markers of these two lineages were suppressed by hypoxic stress at 0.5% O₂ to 10% of levels at 20% O₂ (FIG. 4C).

[0177] Hyperosmolar stress that induces differentiation at 20% O₂ cannot induce differentiation at hypoxic 0.5% O₂. O₂ at 0.5% does not support differentiation but also does not activate as much SAPK as 100 mM sorbitol at >20% O₂⁶. Thus, 100 mM sorbitol, which increases SAPK 5 fold and induces differentiation at 20% O₂ despite FGF4 was added. Awonuga, 2011; Zhong, 2010; Liu, supra; Zhong, 2007. However, the added stress did not increase mRNA expression of any of the 3 terminal differentiation markers (PL1, Plf, and synTa) during hypoxia (FIG. 6A). Thus, 0.5% O₂ cannot support differentiation after FGF4 removal or sorbitol addition.

[0178] Multipotent TSCs that differentiated for 2 days after FGF4 removed showed increased mitochondrial membrane potentials (Δψₘ). The roles of FGF4 and O₂ on Δψₘ associated with ATP production was determined. TSCs were incubated for 2 days with or without FGF4 and stained with the Δψₘ-sensitive probes MitoTracker (FIG. 7A-7D), JC1, or TMRM in the presence or absence of the Δψₘ uncoupler FCCP (FIG. 8A-8F). At 2 or 20% O₂, FGF4 maintained mitochondria with low Δψₘ. Some cells had high Δψₘ at epithelial edges despite FGF4. Similar to the MitoTracker stain findings (FIG. 7A-7D), both JC1 and TMRM stains showed increased Δψₘ levels only after FGF4 removal (FIG. 8A-8F). FCCP completely depolarizes the Δψₘ, showing the specificity of the Δψₘ effects. Thus, FGF4 maintains mitochondrial inactivity in TSCs at all O₂ levels and O₂ does not play a role in mitochondrial initiation to full activity.

[0179] FGF4 and hypoxia co-regulate low Δψₘ, but Δψₘ does not increase with FGF4 removal during hypoxia after 7 days. The JC1 stain was used to assay Δψₘ and to test whether hypoxia limited Δψₘ generation when differentiation was maximal after FGF4 removal for 7 days (as in FIG. 4A-4D). There were 4 levels of JC1 stain color and intensity. FCCP produced no fluorescence, indicating complete Δψₘ depolarization (FIG. 6B). TSCs cultured with FGF4 at 0.5% O₂ showed a low level of green fluorescence, indicating low Δψₘ, but TSCs cultured at 2% or 20% O₂ with FGF4 removed showed two levels of increasing red fluorescence, indicating higher Δψₘ. FGF4 and hypoxia play additive, regulatory roles for Δψₘ but even with FGF4 removed, 0.5% O₂ could not sustain high Δψₘ levels.

[0180] Hypoxia induced morphological changes. At 0.5% O₂, stress significantly increases nuclear size despite FGF4 and nearly all TSCs with small nuclei were lost and all differentiated cells were TGC (FIG. 6B, 6C). Hypoxic stress-induced giant cells in (C) with FGF4 were the same size as those induced by FGF4 removal at 2% or 0.5% O₂ (E,F), but 20% O₂ sustained the largest giant cells (D). This finding is similar to hyperosmolar stress at 20% O₂, where all cells lost Id2 and expressed the TGC marker PL1. Awonuga, 2011; Zhong, 140:921-930, 2010. Multinuclear synTA cells and giant cells were visible at 20% O₂ with FGF4 removed, but synTA cells were not observed or extremely rare at 0.5% O₂. Although hypoxic stress initiates differentiation to TGC morphologically while suppressing syncytiotrophoblasts, terminal differentiation does not complete at 7 days (FIG. 4B) and size of TGC is lower at 0.5%<20% O₂. Thus, FGF4 is most important in suppressing Δψₘ when O₂ is ≧2%, but O₂≦0.5% limits Δψₘ generation, and morphological differentiation of TSCs is limited at 0-0.5% O₂.

[0181] Cytochrome c oxidase (COX) and pyruvate kinase embryonic form M2 (PKM2) are co-regulated by FGF4 and hypoxia, and their total protein levels do not change during hypoxia despite FGF4 removal. Without being bound by theory, a likely mechanism for decreased differentiation at 0.5% O₂ is insufficient mitochondrial OxPhos, which normally consumes >90% of cellular O₂. COX is the terminal, proposed rate-limiting enzyme of the electron transport chain (ETC). Villani, J. Biol. Chem., 273:31829, 1998; Pacelli, Mitochondrion, 11:334, 2011. COX, with other ETC complexes, generates the Δψₘ which is required for increased ATP synthesis, but also increased mitochondrial ROS. To biochemically corroborate the findings regarding Δψₘ inactivity, the amount of COX protein and its inactive Tyr304-phosphorylated form was assayed. Lee, J. Biol. Chem., 280:6094, 2005; Samavati, J. Biol. Chem., 283:21134, 2008.

[0182] At all O₂ levels COX is maintained at highest, phosphorylated (inactivated) state by FGF4 (FIG. 9A), corresponding to low Δψₘ in FIG. 6B, Total COX is low at O₂≦2% levels, and highest at 20% O₂ when FGF4 is removed (FIG. 9B). Significantly, total COX levels do not increase with FGF4 removal at 0.5% O₂.

[0183] Highly proliferative stem cells require high anabolic rates that require aerobic glycolysis. Aerobic glycolysis, as is probable when FGF4 is present in (FIG. 6B), is mediated by pyruvate kinase embryonic form PKM2. Christofk, Nature, 452:181, 2008; Hitosugi, Sci. Signal, 2:ra73, 2009. PKM2 mediates the irreversible terminal step of glycolysis. In its Tyr105 form, however, PKM2 does not homotetramerize, which is necessary to bind phospho-enol pyruvate and catalyze pyruvate production. PKM2 is also a nuclear cofactor for genes involved in glycolysis and glucose uptake. Similar to COX phosphorylation, FGF4 maintained phosphorylation of PKM2 on Tyr105 at all O₂ concentrations (compare FIGS. 9A and 9C). However, for PKM2, O₂≦2% without FGF4 resulted in the highest protein levels, with less PKM2 protein at O₂>2% (FIG. 9E). At 20% O₂. PKM2 protein decreased after FGF4 removal. The adult splice variant, PKM1, was higher with 2-20% O₂, but there was no coherent pattern of regulation by FGF4 or O₂ (FIG. 9D). Despite FGF4 removal, hypoxic O₂ at 0.5% O₂ maintains high glycolysis by maintaining high PKM2 protein levels.

[0184] Mitochondrial antagonists and an agonist show that mitochondrial function is necessary and sufficient to mediate the differentiation of two labyrinthine placental lineages. To test the necessity and sufficiency of mitochondrial function for TSC differentiation, 2 mitochondrial inhibitors and an agonist were used. The mitochondrial activator dichloroacetate (DCA) was tested at 0.5%-20% O₂ (FIG. 10A). There were no effects at 0.5% or 20% O₂. But at 2% O₂, of 5 markers only 2 markers increased 2-fold with DCA treatment; PL2 and synTa. These are markers of sTGC and synTA cells of the labyrinthine placenta, although PL2 is detected in other cell types. The other 3 markers were equally highly expressed at 20% and 2% O₂, suggesting maximal differentiation at 2% O₂ that could not be increased. Thus, DCA increased the 2 lineages that could be increased at 2% O₂. In contrast 0.5% O₂ is likely to be insufficient to support increases in differentiation induced by DCA.

[0185] Cyanide and antimycin A inhibit COX (part of mitochondrial complex IV) and complex III, respectively, and were used to inhibit the ETC and thus the generation of Δψₘ for 7 days of culture at optimal differentiation conditions (FIG. 10B). Sublethal concentrations of inhibitors were used that had significant effects on mitochondria. For all 5 differentiation markers tested, both mitochondrial inhibitors decreased mRNA levels. Markers emphasized (PL2; inhibited 98% and 56%) or specific (Ctsq; inhibited 81% and 71%) for labyrinthine sTGCs were decreased greatly by antimycin and cyanide respectively (FIG. 10B). A marker specific for labyrinthine synTA cells (synTa; inhibited 42% and 34%) was inhibited by antimycin and cyanide respectively (FIG. 10B). Thus, mitochondrial antagonists block differentiation of 2 lineages of the labyrinthine placenta under conditions mediating maximal differentiation, whereas a mitochondrial agonist increased those lineages at 2% O₂.

[0186] ATP decreases in an O₂-dependent manner as TSCs differentiate, but highest ATP accumulation occurs where hypoxic differentiation is lowest. To understand energy use during O₂-dependent differentiation, TSCs were cultured for 1-7 days without FGF4, and ATP levels were determined on days 1, 2, 4, and 7, the same as those used to test differentiation (FIG. 4B,4C). At 0%, 2%, and 20% O₂. ATP continuously decreased from days 1-7, with the lowest ATP in TSCs cultured at 2% or 20% O₂ at day 7 (FIG. 11). Thus, energy levels were lowest when differentiation was highest.

[0187] In contrast, in TSCs cultured at 0.5% O₂ ATP increased from days 1-7. The greatest decrease in ATP at 2-20% O₂ occurred between days 4 and 7, when differentiation increased most (FIG. 4B,4C) but cells were already confluent (data not shown) and proliferation does not consume ATP. Highest ATP consumption correlates with highest differentiation at 20% O₂, but surprisingly during hypoxic stress when differentiation is lowest ATP accumulates. Thus ATP is not the only factor that limits differentiation during hypoxia.

[0188] FGF4 suppresses ROS generation by TSCs. FGF4 regulates mitochondrial function through COX1 and PKM2 phosphorylation, which reduces ETC by preventing carbon entry into mitochondria. Mitochondria produce ROS, which can endanger DNA and are suppressed in stem cells. Simon and Keith, Nat. Rev. Mol. Cell Biol., 9:285, 2008. TSCs produce twice as much ROS (H₂O₂) 48 hr after FGF4 removal (FIG. 12). Thus FGF4 maintains low ROS.

[0189] Discussion Since the seminal work from the Fisher lab, O₂ effects during imbalanced or blocked placental stem cell differentiation have focused on the insufficient “hypoxia” at 2% O₂ (Genbacev, Science, 277:1669, 1997) which does not support differentiation. Those findings are corroborated and extended here; 2% O₂ provides for insufficient placental differentiation for almost all lineages. Specifically 2% O₂ is insufficient for the full development of two lineages at the surface of the labyrinthine placenta; gas exchange-mediating synTA cells and secretory sTGCs. But hypoxia also does not support continuing increase in PL1 from days 4-7 after an early disproportionate peak at day 1.

[0190] However, it is emphasized that “hypoxic” stress for stem cells is at 0-0.5% O₂ where these lower levels fail to support differentiation but also cause differentiation, particularly of the 1^{st} lineage. Hypoxic stress creates an approximation of the higher stress levels (SAPK activation) for TSC caused by sorbitol or benzopyrene at 20% O₂. Awonuga, 2011; Zhong, 2010; Xie, Mol. Reprod. Dev., 77:533, 2010 (Xie, 2010). Like other stresses at 20% O₂, hypoxic stress at 0.5% O₂ induces potency factor loss and gain of differentiation factors. Specifically, hypoxia-induced Hand1 mediates differentiation of the 1^{st} lineage, pTGC. Rapid loss of potency factors and gain of differentiation factors are induced dominantly by stress with or without FGF4. However, 20% O₂ provides for an exit from aerobic glycolysis and an increase in mitochondrial membrane charge (Δψₘ) that supports the most energy-requiring lineages from 4-7 days after FGF4 removal. The average differentiation at all O₂ levels is equivalent at 4 days after FGF4 removal. But, differentiation increases to much higher levels only at 2-20% O₂ where free ATP levels approach zero as highest differentiation is reached at day 7. The highest level of Δψₘ, highest level of differentiation, and lowest ATP suggests that the final increase in differentiation requires the levels of energy supplied by efficient mitochondrial OxPhos, not aerobic glycolysis. It has been suggested that proliferation requires aerobic glycolysis to preserve carbon for proliferation, but cells are confluent at 2-20% O₂ by day 4. Lack of cell death or proliferation at day 7 suggests nearly all ATP would support differentiation and that ATP production limits differentiation.

[0191] It is only at 20% O₂ that total COX protein increases and total PKM2 protein decreases. It is only after FGF4 removal that tyrosine phosphorylation of COX and PKM2 proteins decreases. This loss of phosphorylation of COX and PKM2 leads to increased Δψₘ and ATP production, and decreased aerobic glycolysis, respectively. Thus 0.5% O₂ cannot support the differentiation initiated by hypoxic stress or added hyperosmolar stress that induces robust differentiation of TSC at 20% O₂. A key problem during the hypoxic stress at 0-0.5% O₂ is that it induces TSC differentiation in the 1^{st} 24-48 hr increase, marked by increases in cell size and PL1 and Plf levels (early lineage markers), but these markers are less than at 20% O₂ between days 4-7 due to mitochondrial insufficiency. The tendency is that 1^{st} lineage markers, which are favored early with hypoxic stress here and by all stresses at 20% O₂ as reported here and previously (Awonuga, 2011; Rappolee, Syst. Biol. Reprod. Med., 58:33, 2012), have a low “ceiling” of differentiation at 0.5% O₂ after 7 days with or without sorbitol. This suggests that energy or another mitochondrial function is rate-limiting.

[0192] Several lines of evidence suggest that mitochondrial insufficiency and failure to leave glycolysis (Warburg metabolism) are the fundamental limits to normal differentiation after FGF4 removal. These lines of evidence also pinpoint the two lineages at the labyrinthine surface as the highest energy- and mitochondrial function-requiring lineages. First although FGF4 is dominant over oxygen at all oxygen levels in maintaining phosphorylation of COX subunit 1 and PKM2, oxygen is dominant over FGF4 at low oxygen levels where total COX cannot increase and PKM2 cannot decrease with FGF4 removal. This suggests that mitochondrial ETC cannot increase at low O₂ and the inefficiency of glycolytic production of ATP cannot change at low O₂, even after FGF4 is removed and differentiation can begin. Also, both mitochondrial inhibitors decrease all differentiated lineages but the largest effects are on the labyrinthine surface lineages. But the highest inhibition occurs in the order 20>2>>0.5% O₂ after FGF4 removal, suggesting that mitochondrial function is required only at levels of O₂ that support full development of Δψₘ and OxPhos. In addition the mitochondrial agonist has no effects at 20% or 0.5% O₂. At 20% O₂, this suggests that differentiation is already maximized 7 days after FGF4 removal to the point that ATP is depleted and rate-limiting. At 0.5% O₂, this suggests there are no agonist's effects because mitochondria are inactive due to high PKM2 diverting carbon from the mitochondria, and insufficient COX and O₂ to enable OxPhos. Taken together, these lines of evidence suggest that full mitochondrial activity is needed to enable full differentiation after the mitochondria are fully active three days after FGF4 removal.

[0193] It should be noted that the highest accumulation of ATP after 7 days of FGF4 removal occurs at 0.5% O₂ suggesting that other factors besides ATP insufficiency truncate differentiation. Two candidates are residual high potency factors or induced hypoxia inducible factors (HIFs) that attenuate TSC differentiation. Caniggia, Placenta, 2000; 21 Suppl A:S25-30. HIFs are a prime candidate because they maintain glucose uptake and aerobic glycolysis (Semenza, Cold Spring Harbor Symp. Quant. Biol., 76:347, 2011; Qing, Cancer Res., 70:10351, 2010) and may contribute to the mechanism that prevents PKM2 loss with FGF4 removal at 0.5% O₂. Another candidate is reactive oxygen species (ROS) generation by mitochondria which is attenuated during hypoxia and supports differentiation of some stem cells. Testing of these candidates is underway, but underlying mitochondrial ATP insufficiency due to hypoxia remains a fundamental problem aside from the other candidates. Despite FGF4, at 20% O₂ hyperosmolar stress induces TSCs to differentiate to the 1^{st} lineage, producing Hand1 positive pTGC and Hand1-dependent PL1. Awonuga 2011. During induction of pTGC hyperosmolar stress does not induce later lineages such as sTGCs or synTA cells at 20% O₂, suggesting that stress prioritizes TSC differentiation. Liu, supra. Hyperosmolar stress induced-differentiation of Hand1 and PL1 proteins require SAPK enzyme function. Awonuga, 2011.

[0194] Similarly departure from the optimum at 2% O₂ increased stress, SAPK activity, and SAPK-dependent increase in Hand1 mRNA transcripts. But, here it is shown for the 1^{st} time that SAPK also mediates a decrease in Gcm1 mRNA transcripts proportional to the departure from the optimum O₂ for stemness at 2%. Although the SAPK effects are not the dominant effects, possibly because of mitochondrial insufficiency limiting some lineages, this is the 1: evidence for an enzyme that mediates prioritized (aka “default”) differentiation. SAPK knockouts do not affect placentation in a normal vivarium (Xie, 2011; Rappolee, Reproduction, 145:R139, 2013 (Rappolee, 2013) so it will be important to study the effects of gestational hypoxic stress in SAPK knockouts.

[0195] Gestational hypoxia has revealed that placental and uterine hormones that are unnecessary during normal development become essential during hypoxic stress in vivo. Xie, 2011; Rappolee, 2013. In addition, gestational hypoxia produces a phenotype in vivo that has similarities with the phenotype observed here during hypoxia in culture. In both cases there was an increase in pTGC and a suppression of labyrinthine placenta.

[0196] A key interpretation is that stress leads to decreased stem cell growth and the further depletion of stem cell potency to enable differentiation of early essential function. A similar outcome is seen in preeclamptic human placenta where proliferative cytotrophoblasts are depleted while differentiated villous surface function is maintained. Longtine, Placenta, 33:352, 2012.

[0197] Stress induces differentiation but hypoxia for stemness, 0.5% O₂, truncates this and leads to rapid but incomplete differentiation that suppresses all lineages but two at the labyrinthine surface are suppressed the most. The mechanisms mediating the suppression are important to understand because diseases such as intrauterine growth retardation and preeclampsia feature labyrinthine dysfunction. It is important to test for these hypoxic effects in human 1^{st} trimester villous explants or human TSCs.

### Example 2

[0198] Introduction. Transcription factor (TF) expression and therefore lineage identity in the peri-implantation embryo and its stem cells may be influenced by extracellular stresses. Fauque, PLoS One, 5:e9218, 2010; Zhong, 2010. Perturbations of the embryo during the critical period of implantation frequently lead to loss of the pregnancy. Smart, Clin. Reprod. Fertil., 1:177, 1982; Wilcox, N. Engl. J. Med., 319:189, 1988. Understanding the integration of stress enzyme signaling of the developing embryo may help to improve early pregnancy success rates, and avoid or mitigate long-term negative effects on the health of offspring.

[0199] In vivo, the earliest placental lineage to differentiate after embryo implantation is trophoblast giant cells (TGCs). TGCs maintain early pregnancy by producing the hormones that stimulate uterine changes necessary to support an embryo. When placental trophoblast stem cells (TSCs), precursors to TGCs, were confronted with hyperosmotic stress in vitro, the stress enzymes that were activated modulated lineage TF expression. Zhong, 2010; Xie, 2014; Xie, Stem Cells Dev., 22:1564, 2013 (Xie, 2013)); Awonuga, 2011. Nearly all surviving TSCs terminally differentiated to 1^{st}-lineage TGCs (Xie, 2014; Awonuga, 2011; Liu, supra) and later lineages were suppressed. Xie, 2014; Liu, supra. This would hypothetically provide for the nutritional needs of the implanting embryo but leave insufficient stem cells to populate the other necessary placental lineages, jeopardizing long-term survival of the embryo.

[0200] Murine embryonic stem cells (mESCs) derived from the inner cell mass (ICM) of an E3.5 blastocyst are also highly sensitive to extrinsic signaling. Lander, J. Biol., 8:70, 2009. Extracellular signal regulated kinase (ERK) signaling can induce differentiation of mESCs; its suppression allows pluripotent stem cells to be derived from refractory mouse strains, and also allows the self-renewal of mESCs in culture. Burdon, Cells Tissues Organs, 165:131, 1999. Phosphoinositide 3-kinase (PI3K) regulates both the proliferation and pluripotency of mESCs, in part by its ability to maintain Nanog expression. Storm, J. Biol. Chem., 282:6265, 2007. p38MAPK signaling is necessary for mesoderm development (Duval, Cell Death Differ., 11:331, 2004; Barruet, Stem Cells Dev., 20:1233, 2011), and mESCs lacking c-Jun N-terminal kinase (JNK)1 fail to undergo neuronal differentiation. Amura, Mol. Cell. Biol., 25:10791, 2005. All of these enzymes may be activated by external stressors, such as hyperosmotic stress. Sheikh-Hamad and Gustin, Am. J. Physiol. Renal Physiol., 287:F1102, 2004. Therefore extrinsic stress signaling through stress enzymes may influence the kinetics and/or lineage allocation of differentiating mESCs.

[0201] Pluripotency in both murine embryonic stem cells (mESCs) and human embryonic stem cells (hESCs) is maintained by a network of TFs-Oct4, Sox2, and Nanog-which suppress the differentiated state. Boyer, Cell, 122:947, 2005; Lee, Cell, 125:301, 2006. The TF Rex1 is another common marker of the pluripotent state. Sharova, Dev. Biol., 307:446, 2007. Toxicological stressors can decrease potency in hESCs via a decrease in Oct4, Sox2, and Rex1 that potentially leads to abnormal differentiation. Pal, J. Cell. Physiol., 226:1583, 2011).

[0202] Oct4 maintains pluripotency in part by suppressing trophectoderm in both the ICM of the embryo and in the derivative mESCs in culture. Nichols, Cell, 95:379, 1998; Niwa, Nat. Genet., 24:372, 2000 (Niwa, 2000). A loss of 50% of Oct4 levels results in differentiation to trophectoderm, while a 50% increase above normal expression triggers differentiation to the early appearing primitive endoderm (PrEndo). Niwa, 2000. This is a reflection of the transient higher levels of Oct4 in the delaminating primitive endoderm derived from ICM of the E3.5 blastocyst. Palmieri, Dev. Biol., 166:259, 1994. Recent evidence suggests that Oct4 is required for differentiation of extraembryonic endoderm (ExEndo) by non-cell autonomous fibroblast growth factor (FGF)4 function and by cell autonomous upregulation of ExEndo TFs. Frum, Dev. Cell., 25:610, 2013; Frankenberg, Dev. Cell., 21:1005, 2011. Thus, small, transient changes in Oct4 levels change the potency of mESCs and stress may contribute to transient Oct4 regulation.

[0203] Nanog suppresses PrEndo and its derivative ExEndo expression in the blastocyst. High Nanog expression is found only in pluripotent cells; low expression sensitizes mESCs to differentiation signals, committing them to PrEndo and later ExEndo lineages. Chambers, Nature, 450:1230, 2007; Singh, Stem Cells, 25:2534, 2007. Rex1 expression correlates strongly with pluripotency in mESCs (Sharova, supra); its expression is lost as mESCs differentiate to either PrEndo/ExEndo or the later-appearing embryonic ectoderm (EmEcto). Rathjen, J. Cell. Sci., 112 (Pt 5):601, 1999; Lake, J. Cell. Sci., 113 (Pt 3):555, 2000; Toyooka, Development, 135:909, 2008. In contrast to Oct4, Rex1-homozygous-null-mutant mESCs can be isolated, but have a higher spontaneous differentiation rate to all lineages. Scotland, Dev. Dyn., 238:1863, 2009. In vivo, Rex1-null embryos express some visceral endoderm markers at lower levels (Masui, BMC Dev. Biol., 8:45, 2008 (Masui, 2008)), suggesting a role for Rex1 in ExEndo differentiation.

[0204] Therefore, cells of the ICM and its immediate successor lineages, PrEndo and EmEcto, may be identified by measuring the relative quantitative expression of potency TFs. The current Example used hyperosmotic stress to concurrently activate multiple stress enzyme signaling pathways in mESCs. The stress-enzyme-dependent changes in TFs Oct4, Nanog, Sox2, and Rex1 were subsequently measured to reveal the impact of stress on pluripotency. After screening 21 signaling kinases in 11 subfamilies using 14 inhibitors, 5 protein kinases (PKs) were revealed to affect the kinetics and/or the allocation of lineages from differentiating mESCs. While hyperosmotic stress did not trigger morphological differentiation of mESCs cultured in monolayer, it primed mESCs to initiate 1^{st}-lineage PrEndo/ExEndo differentiation, altering the response of mESCs to differentiation cues.

[0205] Materials and Methods. Reagents. MG132, lactacystin, and sorbitol were from Sigma (St. Louis, Mo.). Enzyme inhibitors LY294002, U0126, PD98059, SB202190, AKTi, and L-JNKi-1 were from Calbiochem (La Jolla, Calif.). Amido black was from MP Biomedicals (Solon, Ohio). Rabbit polyclonal to mouse Oct4 (sc-5279), goat anti-human Sox2 (sc-17320), anti-rabbit MEK1 (sc-219), and anti-mouse MEK2 (sc-13159) antibodies were from Santa Cruz Biotechnology (Santa Cruz, Calif.). Antirabbit Nanog was from Chemicon/Millipore (AB5731; Billerica, Mass.) and Rex1 antibodies were from Abcam (AB28141; Cambridge, Mass.). Anti-rabbit p38 (CS9212), phospho-p38 (Thr180/Tyr182 CS9211), JNK (CS9252), phospho-SAPK (Thr183/Tyr185 CS9251), phospho-MEK1/2 (Ser217/221 CS9121), ERK1/2 (CS9102), phospho-ERK1/2 (Thr202/Tyr204, CS9106), phospho-AKT (Ser473 CS2965), b-actin (CS4967), and cleaved-caspase 3 (CS9664) antibodies were from Cell Signaling (Beverly, Mass.). For real-time quantitative PCR (RT-qPCR) the RNeasy Mini Kit was used for RNA isolation and QuantiTect Reverse Transcription Kit, both from Qiagen (Germantown, Md.), and Fast SYBR Green Master Mix from Applied Biosystems (Foster City, Calif.). RNA primers (Oct4, Nanog, Rex1, Dab2, Lrp2, and Fgf5) were from Integrated DNA Technologies (Coralville, Iowa).

[0206] Cell culture and stimulation. mESC-D3 cells (ATCC, Manassas, Va.) were cultured in the absence of feeder cells in Dulbecco's modified Eagle's medium (Gibco, Grand Island, N.Y.) supplemented with 15% mESC-screened fetal bovine serum (HyClone, Logan, Utah), 2 mM L-glutamine, 1 mM sodium pyruvate, 1 mM nonessential amino acids, 0.1 mM 2-mercaptoethanol (Sigma), and 1,000 U/mL murine leukemia inhibitory factor (LIF; Millipore, Temecula, Calif.) on 0.1% gelatin-coated dishes at 37° C. in humidified air with 5% CO₂. Masui, 2008. mESCs were cultured overnight after passaging before stimulation with sorbitol. Osmolality was determined by freezing point depression using Advanced Instruments Wide Range Osmometer 3W2 (Advanced Instruments, Norwood, Mass.). One liter of a very dilute aqueous solution at room temperature very nearly has a mass of 1 kg, so at low solute concentrations (<0.50 M), osmolarity and osmolality are considered equivalent.

[0207] Enzyme inhibition. Enzyme inhibitors were chosen according to the specificity reported in the kinase inhibitor literature. Alessi, J. Biol. Chem., 270:27489, 1995; Davies, Biochem. J., 351:95, 2000. Inhibitor concentrations were determined following dose response experiments for each inhibitor based on the range of concentrations determined from the mESC and kinase inhibitor literature. Alessi, supra; Davies, supra; Gross, Mol. Reprod. Dev., 70:324, 2005); Hamazaki, Mol. Cell. Biol., 26:7539, 2006; Bain, Biochem. J., 408:297, 2007; Lee, Cell Prolif., 41:230, 2008. The single doses selected for use in ongoing experiments and shown herein were the lowest doses impacting Oct4 protein expression following 4 hr of sorbitol exposure (as determined by western blot) with minimal toxicity (as determined by phase microscopy). Inhibitors were suspended in dimethyl sulfoxide (DMSO), diluted to the proper concentrations, and preloaded for 1 hr prior to sorbitol stimulation. Vehicle-only control experiments were performed and expression of Oct4, Nanog, and Rex1 was determined by western blot to be not significantly different from nonvehicle control (data not shown). Inhibitor-only experiments were performed for 24 hr to determine the impact of enzyme inhibition on Oct4, Nanog, and Rex1 expression.

TABLE 3
Table 3. Inhibitor only effects on Oct4, Nanog, and Rex1 expression.

| Inhibitor | Oct4 | Nanog | Rex1 |
|---|---|---|---|
| AKTi (10 μM) | 0.88 ± 0.03 | 0.97 ± 0.04 | 1.1 ± 0.12 |
| LY294002 (10 μM) | 1.34 ± 0.06 | 1.02 ± 0.08 | 1.11 ± .12 |
| L-JNKi-1 (2 μM) | 0.90 ± 0.06 | 0.63 ± 0.16 | 0.96 ± 0.10 |
| SB202190 (10 μM) | 0.91 ± 0.28 | 0.71 ± 0.20 | 0.78 ± 0.18 |
| U0126 (40 μM) | 1.16 ± 0.31 | 0.94 ± 0.15 | 0.72 ± 0.06 |
| PD98059 (20 μM) | 1.24 ± 0.21 | *1.54 ± 0.10 | 0.93 ± 0.06 |

mESC were cultured for 24 hr in the presence of inhibitor only.
Values shown represent percentage of protein expression compared to 24 hr, no inhibitor (set to 100%).
ANOVA with Student-Newman-Keul post hoc test, n >= 3, p < 0.05.
*There was a significant effect on Nanog expression during 24 hr of PD98059 inhibitor-only treatment (p = 0.0007). However in Table 4, PD98059 targets had no significant effect on the recovery of Nanog during 24 hr of stress, so the biological significance of PD98059 inhibitor-only is nil.

[0208] In 14/18 conditions, inhibitors had no effect on potency TF levels; in 2 conditions, the inhibitors decreased expression by 20% and, in the remaining 2 conditions, TF expression was increased above baseline. Inhibitor-only experiments were performed for 4 and 24 hr to determine the impact of enzyme inhibition on Oct4, Nanog, and Rex1 expression. There were no significant differences in expression after 4 hr of inhibitor-only treatment (Oct4 P=0.78, Nanog P=0.81, and Rex1 P=0.55; data not shown). There were no significant differences in expression of Oct4 (P=0.23), Rex1 (P=0.053), or 5/6 of the Nanog inhibitors (P=0.19) after 24 hr of inhibitor-only inhibition (Table 3). There was a significant effect on Nanog expression during 24 hr of PD98059-inhibitor-only treatment (P<0.001). However in Table 4, PD98059 targets had no significant effect on the recovery of Nanog during 24 hr of stress, the biological significance of PD98059 inhibitor only is nil. DMSO-only controls were also done. DMSO at 0.6% did not impact Oct4, Nanog, and Rex1 expression at 4 or 25 hr. This (0.6%) was higher than the highest diluent concentration in any of the described experiments (0.4% in the U0126 experiments).

TABLE 4
Table 4. TF expression levels during 24 hr of hyperosmotic stress
+/− enzyme inhibition in mESC monolayer culture.

| 24 hr inhibition | Oct4 | Nanog | Rex1 |
|---|---|---|---|
| Unstressed | 1.00 ± 0.00 | 1.00 ± 0.00 | 1.00 ± 0.00 |
| Stress only (S) | 1.03 ± 0.16 | 1.15 ± 0.20 | 0.35 ± 0.08* |
| PD98059 (MEK1) + S | 0.78 ± 0.06 | 0.80 ± 0.09 | 0.51 ± 0.01* |
| U0126 (MEK1/2) + S | 0.27 ± 0.03*, a | 0.67 ± 0.32 | 0.31 ± 0.12* |
| SB202190 (p38) + S | 0.51 ± 0.07*, a | 0.10 ± 0.01*, a | 0.19 ± 0.07* |
| L-JNKi-1 (JNK) + S | 0.91 ± 0.15 | 0.71 ± 0.15 | 0.89 ± 0.08a |
| LYZ94002 (PI3K) + S | 0.65 ± 0.08 | 0.44 ± 0.07*, a | 0.00*, a |
| AKTI + S | 0.84 + 0.19 | 0.97 + 0.03 | 0.44 ± 0.04* |

Values represent percent of unstressed expression.
*means statistically different from unstressed.
‘a’ means statistically different from ‘stress only’, n >/= 3, ANOVA and Student-Newman-Keul's post hoc tests, p < 0.05.

[0209] Cell accumulation and apoptosis. Cell accumulation was assayed by counting cells using a hemocytometer following trypan blue exclusion. MESCs were trypsinized, plated, and cultured overnight to allow for adaptation after passage. Time-zero counts were taken at least 1 day after passage and all subsequent counts were normalized to this. Apoptosis was measured by immunoblot for cleaved caspase 3. Mullen and Critser, Methods Mol. Biol., 254:393, 2004.

[0210] Microscopy. Indirect immunocytochemistry was performed as described previously. Wang, Dev. Dyn., 231:72, 2004; Xie, Mol. Reprod. Dev., 71:1, 2005. Photomicrography was performed using a Leica DM IRE2 automated epifluorescence microscope (Wetzlar, Germany) controlled electronically by Simple PCI AI software (Hamamatsu Corporation, Sewickley, Pa.). All micrographs were taken at a magnification of 100×, except where indicated.

[0211] Westem blot analysis. Sodium dodecyl sulfate-polyacrylamide gel electrophoresis and western immunoblot analysis of mESC lysates were performed as previously described. Xie, Mol. Hum. Reprod. 13:473-81 (2007). Cells were harvested with cold lysis buffer (Cell Signaling) and protein was quantified by BCA assay (Pierce, Rockford, Ill.). Ten to twenty micrograms of aliquots were fractionated on 10% polyacrylamide precast gels (Bio-Rad, Hercules, Calif.), transferred to nitrocellulose membranes (Amersham Biosciences, Aylesbury, United Kingdom), probed overnight with primary antibodies, and developed as previously described. Xie, supra, 2005. Protein bands were visualized using the ECL Advance Western Blotting Detection Kit (GE Healthcare, Waukesha, Wis.), blot was scanned to obtain an electronic image, and intensity of protein bands was quantified using Image J analysis software (rsbweb.nih.gov) and normalized to amido black staining. Aldridge, J. Neurosci. Methods, 172:250, 2008. Data are expressed as the change in expression relative to no treatment at time zero.

[0212] RT-qPCR analysis. mESCs were trypsinized and harvested for RT-Qpcr analysis using a 7500 Fast Real Time PCR System (Applied Biosystems). Total RNA was isolated from cell lysates using RNeasy Mini Kit (Qiagen). RNA content was measured using ND-1000 Spectrophotometer (NanoDrop and ThermoScientific, Wilmington, Del.). Complementary DNA (cDNA) was synthesized from 50 to 100 ng of total RNA using QuantiTect Reverse Transcription Kit (Qiagen) according to the manufacturer's instructions, and diluted 1:5. One microliter of cDNA template was added to 1 mL of both the forward and reverse primers for each specific transcript and 10 mL of Fast SYBR Green Master Mix (Applied Biosystems) for the RT-qPCR. Primer sequences are shown in Table 5.

TABLE 5
RT-qPCR primer sequences.
Table 5

| Gene | Forward primer sequence | Reverse primer sequence |
|---|---|---|
| Oct4 | AGTTGGCGTGGAGACTTTGC | CAGGGCTTCATGTCCTGG |
| | (SEQ ID NO: 122) | (SEQ ID NO: 123) |
| Nanog | TCTTCCTGGTCCCCACAGTTT | GCAAGAATAGTTCTCTCGGGATGAA |
| | (SEQ ID NO: 124) | (SEQ ID NO: 125) |
| Rex1 | CCCTCGACAGACTGACCCTAA | TCGGGGCTAATCTCACTTTCAT |
| | (SEQ ID NO: 126) | (SEQ ID NO: 127) |
| Dab2 | CCCCTGAACGGTGATACTGAT | AAGTCCTGCTTTACGCCATTC |
| | (SEQ ID NO: 128) | (SEQ ID NO: 129) |
| Lrp2 | AAAATGGAAACGGGGTGACTT | GGCTGCATACATTGGGTTTTCA |
| | (SEQ ID NO: 130) | (SEQ ID NO: 131) |
| Fgf5 | TGTGTCTCAGGGGATTGTAGG | AGCTGTTTTCTTGGAATCTCTCC |
| | (SEQ ID NO: 132) | (SEQ ID NO: 133) |
| Gapdh | CATGTTCCAGTATGACTCCACTC | GGCCTCACCCCATTTGATGT |
| | (SEQ ID NO: 134) | (SEQ ID NO: 135) |
| 18s | SEQ ID NO: 120 | SEQ ID NO: 121 |
| ribosomal subunit | | |

[0213] Primer pairs were checked for specificity using BLAST analysis and were checked by both agarose gel electrophoresis and thermal dissociation curves to ensure amplification of a single product, and to rule out formation of primer dimers during the RT-qPCR. The RT qPCR cycling parameters were as follows: enzyme activation, 95° C. for 20 s; denature, 95° C. for 3 s; and anneal/extend, 60° C. for 30 s for a total of 40 cycles. The expression of the target genes was quantified against that of two internal reference genes, glyceraldehyde-3-phosphate dehydrogenase (GAPDH) and 18s ribosomal RNA subunit (18s rRNA). GAPDH was determined to be the most stable of 10 reference genes tested during mESC differentiation (Murphy and Polak, Tissue Eng., 8:551, 2002; Willems, Int. J. Dev. Biol., 50:627, 2006), and 18s rRNA was selected due to its stability during hyperosmolar conditions in TSCs. Liu, supra. Fold change was determined using the ddCt method. Livak and Schmittgen, Methods, 25:402, 2001. Data are expressed as the fold change in expression relative to no treatment at time zero.

[0214] Statistical analysis. Results of these investigations were described as the mean-standard error of at least three independent experiments. Data were analyzed using SPSS v. 19.0. In some cases, hypotheses were restated and additional replicates with increased numbers of controls were performed to obtain higher statistical confidence. Thus, the sample size for each data point in some figures may vary. Statistical analysis included ANOVA with Student-Newman-Keuls post hoc tests, or Kruskal-Wallis nonparametric ANOVA tests (due to non-normal distribution of data), followed by Mann-Whitney tests on each pair of groups with Bonferroni correction of the P-value. Groups were considered to be significantly different if P<0.05.

[0215] Results. mESC growth and colony morphology during hyperosmotic stress. 400 mM sorbitol is the dose that induces the highest levels of stress enzyme activity and function in mouse TSCs and embryos. Xie, 2007; Zhong, 2007; Xie, Mol. Reprod. Dev., 75:689, 2008. The described mESC studies therefore began with this dose, but it proved to be lethal in mESCs (FIG. 13A). 200 mM sorbitol was then established as the nonlethal experimental dose, and the effects of this dose were tested on mESC proliferation and apoptosis. Osmolality was measured at 330±4 mOsm/kg H₂O before sorbitol addition (described in “Materials and Methods” section; Zhong, 2007), and 531±7 mOsm/kg H₂O after addition of 200 mM sorbitol. At low solute concentrations, osmolality and osmolarity can be considered equivalent because the mass of 1 L of a dilute aqueous solution is very close to 1 kg. The osmolarity of mouse uterine fluid has been reported as 330 mOsm. Harris, Theriogenology, 64:992, 2005. Thus the described baseline media were isotonic with uterine fluid.

[0216] To establish the optimal, nonmorbid hyperosmotic dose, mESCs were cultured for 72 hr in three experimental conditions: isosmotic media +LIF, isosmotic media −LIF, and hyperosmotic media +LIF. Cell counts were done (FIG. 13B) and micrographs were taken at 24, 48, and 72 hr of culture (FIG. 13D). Stress slowed growth rates from an overall doubling rate of 17.4 hr in untreated cells +LIF to 30.8 hr in treated mESCs (FIG. 13C).

[0217] To test whether the reduced accumulation of cells during stress was the result of slowing of the cell cycle or apoptosis, apoptosis was assayed for by probing for the small cleavage product generated when caspase 3 is activated. It has been reported that mESCs do not express a functional death ligand (Fas/FasL) system. Brunlid, Stem Cells, 25:2551, 2007. Nevertheless, caspase 3 is activated in both the extrinsic (i.e., extracellular induction) and intrinsic (mitochondrial) apoptotic pathways. This cleavage product was detected following 1-2 hr of stress (14% of cells; FIG. 13E), and occasionally at 4 h, but by 6-24 hr the remaining cells had adapted to the stress with cleaved-caspase 3 detected in fewer than 5% of cells by immunofluorescence, and no protein detected by immunoblot. mESC survival in hyperosmotic conditions was dependent on PI3K signaling (FIG. 13F); inhibition of PI3K with LY294002 led to massive cell death of up to 90% of mESCs during 24 hr of hyperosmotic stress. Thus this level of hyperosmotic stress produced transient apoptosis followed by diminished but positive cell growth and survival that was PI3K dependent.

[0218] Hyperosmotic activation of signaling enzymes. A small subset of the 500 PKs in the kinome typically respond to stress stimuli, suggesting these as candidates for mediating cellular responses to hyperosmotic stress. Zhong, 2010; Xie, 2011. After screening 21 signaling kinases in 11 subfamilies using 14 inhibitors, 5 kinases in the mitogen activated protein kinase (MAPK) and PI3K families were identified as producing differentiation-priming effects in hyperosmotic conditions. To determine the kinetics of activation of these five kinases in the described system, mESCs were treated with 200 mM sorbitol for 1 hr. Expression levels of the activated (i.e., phosphorylated) enzymes were assayed by western blot analysis (FIG. 14), including phospho-p38MAPK, phospho-JNK, phospho-MEK1/2, and phospho-AKT (the downstream effector of PI3K signaling). Activated p38MAPK was 1^{st} detected at 10 min of stimulation; activation persisted throughout 1 hr of stimulation. Similarly, activated JNK was 1^{st} detected at 20 min of stimulation, and persisted throughout 1 hr of stimulation. Activated MEK1/2 and activated AKT were present endogenously at low levels at time zero; sorbitol stimulated higher activation levels of each. Increased MEK1/2 activation was stimulated within the 1^{st} 10 min of stress exposure, but returned to baseline levels by 20 min. In contrast, increased AKT activation occurred by 20-30 min of stimulation, and persisted through 1 hr of sustained stress exposure.

[0219] Efficacy of enzyme inhibitors. Efficacy of the pharmacological inhibitors for these enzymes was tested under stress conditions (FIG. 15). LY294002 and AKTi inhibited AKT activation by an average of 88% and 95%, respectively. PD98059 directly inhibits new MEK1 activation; its efficacy was determined by measuring the activation of MEK1's downstream targets, ERK1/2. PD98059 inhibited ERK1/2 activation by an average of 30%. This is consistent with the literature that describes the mechanism of action of PD98059; it binds to inactive MEK1 thus preventing new activation, but does not shut off endogenously active MEK1. Dudley, Proc. Natl. Acad. Sci. USA, 92:7686, 1995; Goueli, Promega Notes, 69:6, 1998. U0126 inhibited ERK1/2 activation by an average of 87%. SB202190 inhibited p38MAPK activation by an average of 60%. L-JNKi-1 inhibited JNK activation by an average of 50%. Thus highest inhibition and specificity was identified and attained in line with the encyclopedic testing by Bain, Biochem. J., 371:199, 2003.

[0220] Hyperosmotic stress modulated expression of TF markers of pluripotency. mESCs were treated with 200 mM sorbitol for 24 hr to test for stress-induced differentiation through loss of potency TFs and/or gain of TFs that mark differentiated lineages PrEndo/ExEndo or EmEcto. FIG. 16A illustrates the relative expression of these TFs in the undifferentiated ICM, modeled by mESCs, and each of the potential downstream lineages of mESCs, PrEndo that gives rise to other ExEndo lineages, and EmEcto. Expression levels of Oct4, Sox2, Nanog, and Rex1 were determined at multiple time points up to 24 hr by western blot analysis and RT-qPCR. Hyperosmotic stress rapidly activated the differentiation program, with expression of Oct4, Nanog, Rex1, and Sox2 TF proteins decreasing within the 1^{st} hour and reaching a nadir between 2 and 4 hr of continued stress (FIG. 16B). The nadir of Nanog expression was more variable than the other three TFs, occurring as early as 2 hr in some experiments or as late as 6 hr of stress. By 6 h, the overt differentiation program was aborted, and the decline in Oct4, Sox2, and Nanog expression halted. Over the next 2-20 h, expression of these three TF proteins rebounded toward the unstressed baseline with both Sox2 and Nanog achieving complete, robust recovery to their prestressed protein levels (FIG. 16B). Because Nanog, Oct4, and Rex1 expression was adequate to identify mESC or subsequent lineages, Sox2 expression was not continued. Nanog and Oct4 recovery was maintained through 72 hr of ongoing stress (FIG. 16E, Oct4, data not shown). Recovery at the mRNA level also occurred, with both Oct4 and Nanog moving toward their unstressed baseline, although this recovery had not reached significance at 24 hr (FIG. 16C).

[0221] In contrast, Rex1 protein levels did not rebound, remaining at <40% of its unstressed levels throughout the 24-h time course (FIG. 16B). Rex1 mRNA levels, however, recovered to 70% of their unstressed levels by 24 hr (FIG. 16C). Overall, stress induced a rapid, transient loss of protein and mRNA in potency TFs, but this loss was reversed in some TFs as mESCs adapted to the stress. Rex1 protein was exceptional in its persistent stress-induced suppression through 24 hr.

[0222] Hyperosmotic effects on lineage markers during monolayer cell culture. The persistent suppression of Rex1 during hyperosmotic stress suggested that some mESCs were differentiating to PrEndo/ExEndo or EmEcto. RT-qPCR was therefore used to look at markers of these lineages after 24 hr of hyperosmotic stress in a monolayer culture system (FIG. 16D). Lrp2, which arises in the E3.5 PrEndo (Frankenberg, supra; Gerbe, Dev. Biol., 313:594, 2008), and Dab2, which arises in the E4.5 ExEndo (Frankenberg, supra; Yang, Dev. Biol., 251:27, 2002) were selected as PrEndo/ExEndo markers, and Fgf5, which arises in the E5.5 EmEcto (Haub & Goldfarb, Development, 112:397, 1991; Hebert, Development, 112:407, 1991), was selected as the EmEcto marker (FIG. 16A). mRNA expression was compared in stressed mESCs with LIF with that of both unstressed mESCs cultured in the presence of LIF (a pluripotent control) and unstressed mESCs cultured following LIF removal (a differentiation control).

[0223] Sorbitol induced significantly higher levels of Lrp2 and Dab2 expression compared with either of the time-matched controls (FIG. 16D). In contrast, although 24 hr of LIF removal was sufficient for unstressed cells to upregulate the EmEcto marker Fgf5, the presence of sorbitol suppressed this upregulation in stressed cells. Thus, the stress-induced loss of Rex1 correlated with upregulation of markers of the early appearing PrEndo/ExEndo lineages, but suppression of the later EmEcto lineage marker.

[0224] Hyperosmotic-stress-induced loss of potency TFs due to proteasomal degradation. To determine the mechanism of TF protein loss during stress, mESCs were treated with one of two proteasome inhibitors, MG132 (FIG. 17) and lactacystin (FIG. 18A-18D). Both inhibitors prevented the stress-induced loss of Oct4, Nanog, and Rex1. Oct4 loss was reversed by 75%, Nanog by 93%, and Rex1 by 310% in 4 hr of proteasome inhibition by MG132.

[0225] MEK1 and other enzymes trigger mESC initial stress response: initiation of differentiation program. mESCs were cultured in the presence of pharmacological inhibitors and hyperosmotic stress for 4 hr to identify the enzymes that mediated the stress-induced loss of potency TF proteins, reported in FIG. 16B. The complete results of p38, JNK, MEK1/2, and PI3K inhibition during 4 hr of hyperosmotic stress in mESCs are summarized in Table 6.

TABLE 6
Table 6. TF expression levels during 4 hr of hyperosmotic stress
+/− enzyme inhibition in mESC monolayer culture.

| 4 hr inhibition | Oct4 | Nanog | Rex1 |
|---|---|---|---|
| Unstressed | 1.00 ± 0.00 | 1.00 ± 0.00 | 1.00 ± 0.00 |
| Stress only (S) | 0.52 ± 0.03* | 0.65 ± 0.07* | 0.63 ± 0.06* |
| PD98059 (MEK1) + S | 0.93 ± 0.09 a | 2.57 ± 0.50*, a | 1.20 ± 0.05 a |
| U0126 (MEK1/2) + S | 0.44 ± 0.13* | 0.24 ± 0.02*, a | 0.98 ± 0.04 a |
| SB202190 (p38) + S | 0.81 ± 0.21 | 0.52 ± 0.12* | 0.59 ± 0.23* |
| L-JNKi-1 (JNK) + S | 0.21 ± 0.04*, a | 1.08 ± 0.11 a | 0.47 ± 0.04* |
| LY294002 (PI3K) + S | 0.92 ± 0.12 a | 0.55 ± 0.10* | 0.36 ± 0.14* |
| AKTi + S | 0.57 ± 0.05* | 0.47 ± 0.06* | 0.43 ± 0.14* |

Values represent percent of unstressed expression.
*means statistically different from unstressed.
‘a’ means statistically different from ‘stress only’, n >/= 3, ANOVA and Student-Newman-Keul's post hoc tests, p < 0.05.

[0226] MEK1 activation triggered a loss of expression of all three TFs; when its stress-induced activation was prevented by PD98059, expression of both Oct4 and Rex1 remained at the unstressed baseline, while Nanog expression increased to 2.5 times its unstressed level (FIG. 19A). This effect was repeated for Rex1 during inhibition with the MEK1/2 inhibitor U0126 (FIG. 19B); due to inhibition of both MEK1 and MEK2 during stress exposure, Rex1 expression remained at unstressed levels. This suggests that MEK1 was the regulator of Rex1 protein destruction during stress.

[0227] In contrast, MEK1/2 inhibition with U0126 did not prevent Oct4 or Nanog loss during stress for 4 hr (Table 6). Instead, inhibition of MEK1/2 kinase activity allowed even greater loss of these two TFs. Therefore a U0126 target that is not targeted by PD98059, putatively MEK2, protected Oct4 and Nanog from being completely lost during stress. This indicates that the targets of U0126 and PD98059 produce opposite effects on pluripotency, and perhaps interact negatively with each other.

[0228] Several other enzymes were also implicated in the stress-induced loss of potency TFs. PI3K signaling led to loss of Oct4 expression during the 1^{st} 4 hr of stress; its inhibition with LY294002 prevented the stress-induced loss of Oct4 (FIG. 19B). This effect was not mediated through the AKT pathway, as specific inhibition of AKT did not prevent Oct4 loss (Table 6). When both PI3K and MEK1 signaling was inhibited simultaneously, Oct4 levels did not rise significantly above baseline (data not shown). This suggests that both PI3K and MEK1 use a common pathway to destroy Oct4 protein under stress conditions. A third stress enzyme, JNK, was involved in the loss of Nanog expression during stress; its inhibition allowed Nanog expression to be preserved during stress (FIG. 19B).

[0229] p38MAPK and other signaling kinases produced mESC adaptive response to hyperosmotic stress: differentiation program aborted, and pluripotency restored at 24 hr. The enzymatic mechanisms that mediated the recovery of potency TF proteins during stress that persisted for 24 hr was next tested. mESCs were cultured in the presence of hyperosmotic stress for 24 hr with or without pharmacological inhibitors of PKs; the complete results of p38MAPK, JNK, MEK1/2, and PI3K inhibition during 24 hr of hyperosmotic stress are summarized in Table 4. p38MAPK signaling mediated the recovery of Oct4 and Nanog proteins to their unstressed baselines during 24 hr of stress (FIG. 20A). When stress-induced activation of p38MAPK was prevented by SB202190, Oct4 expression did not recover from its 4-h nadir of 50% of unstressed levels. Similarly, Nanog expression during ongoing stress decreased to 10% during p38MAPK inhibition. Micrographs of p38MAPK-inhibited mESCs are shown in FIG. 8B; although 24 hr is not adequate to see outright differentiation, the colonies do appear to show the initial signs of differentiation, with some migration of cells away from the colonies, larger cobblestone cells characteristic of ExEndo (Brown, PLoS One, 5:e12016, 2010), and more projections of the cells along the colony borders. Thus, p38MAPK inhibition affected the stress-induced changes in morphology and appeared to enable stress-induced differentiation.

[0230] Inhibition of both MEK1 and MEK2 with U0126 also prevented Oct4 recovery (FIG. 20C), whereas inhibition of only MEK1 with PD98059 did not prevent Oct4 recovery (Table 4). When taken together with the U0126 results at 4 hr of hyperosmotic stress, this suggests that the unique U0126 target(s), putatively MEK2, plays a role in reserving pluripotency during adaptation to stress conditions after 4 hr. Similarly, PI3K signaling played a role in Nanog recovery during ongoing stress; its inhibition prevented Nanog recovery.

[0231] JNK-dependent signaling produced persistent suppression of Rex1 during 24 hr of hyperosmotic stress. In contrast to the p38MAPK-dependent effects on Oct4 and Nanog during 24 hr of hyperosmotic stress, p38MAPK signaling was not able to reverse Rex1 suppression, neither was PI3K signaling (FIG. 21A). Instead, JNK signaling suppressed Rex1 expression during 24 hr of hyperosmotic stress (FIG. 21A). To test whether the stress-induced suppression of Rex1 was reversible, mESCs were subjected to only 4 hr of hyperosmotic stress and then returned to iso-osmotic media. Rex1 expression at 24 hr recovered to baseline; this indicates that continued stress was required for persistent Rex1 suppression (FIG. 20B). The persistent suppression of Rex1 throughout the duration of stress stimulation suggests that at least a subpopulation of mESCs may be primed by stress for differentiation by maintaining chronic Rex1 loss as well as transient loss of Oct4, Nanog, and Sox2.

[0232] Discussion. In this Example, the level of hyperosmotic stress analyzed slowed mESC accumulation due to slowing of the cell cycle, not ongoing apoptosis. PI3K signaling was responsible for cell survival under these stress conditions. Stress initially triggered mESC differentiation through MEK1, JNK, and PI3K signaling, leading to proteasomal degradation of Oct4, Nanog, Sox2, and Rex1 proteins. Concurrent with this posttranscriptional effect were the stress-induced decreased levels of their mRNA transcripts. In addition to the increase in degradation of potency TF proteins and decrease in mRNA transcript levels reported here, suppression of new translation is also caused by the levels of hyperosmotic stress used here. Patel, Eur. J. Biochem., 269:3076, 2002. Simultaneous increases in protein degradation rates and decreases in synthesis rates enable rapid changes in the cellular “stemness” program. However, as stress at levels studied here continued beyond 4 h, cells adapted, cell cycle resumed, and Oct4 and Nanog mRNA and protein expression returned to near normal levels by 24 hr. The recovery of potency TF proteins was mediated by p38MAPK and PI3K signaling, as well as by that of an unknown MEK1/2 inhibitor target. Rex1 protein levels, however, did not recover; its persistent suppression was due to stress-induced JNK signaling. Table 7 summarizes the enzyme effects reported in this Example.

TABLE 7
Table 7. Summary of enzyme effects on Oct4, Nanog, and Rex1 following
hyperosmotic stress in mESC monolayer culture.

| | Enzymes regulating initial | Enzymes regulating long-term |
|---|---|---|
| Transcription | stress responses; loss | adaptive stress |
| Factor | of TF expression at 4 hr. | responses at 24 hr. |
| Oct4 | Mek1 > Mek2 | p38MAPK (rescue of |
| | PI3K | expression) Mek2 (putatively) |
| Nanog | Mek1 > Mek2 | p38MAPK (rescue of |
| | JNK | expression) PI3K |
| Rex1 | Mek1 | JNK (ongoing |
| | | suppression) |
| | | (no rescue enzyme identified) |

[0233] Stress-induced loss and regain of four potency TFs in mESCs by enzymes was characterized for the 1^{st} time in these studies. MEK1 mediated potency loss at the 4-h nadir of Oct4 and played a role in regain of Oct4, Nanog, and Rex1 from 4 to 24 hr. The mediator of regain of Oct4 by MEK1/2 is not clear. However, MEK1 is a weaker enzyme that blocks the stronger enzyme MEK2 in a heterodimer (Catalanotti, Nat. Struct. Mol. Biol., 16:294, 2009), and both MEK1 and MEK2 are expressed in TSCs/ESCs/blastocysts (Wang, supra) and should heterodimerize. One possible interpretation is that PD98059 suppresses MEK1 and reactivates MEK2 that reverses stress-induced Oct4 loss from 0 to 4 hr. U0126 inhibits both but importantly MEK2, blocking Oct4 recovery from 4 to 24 hr. It was hypothesized that MEK2 protects Oct4 from 0 to 4 hr unless MEK1 activity is dominant and reverses Oct4 loss from 4 to 24 hr if MEK2 activity becomes dominant (Table 7). Activity and chemical inhibitor data for MEK1 and MEK2 support this but further attempts to test this hypothesis using siRNA to MEK1 and MEK2 failed due to insufficient specificity of the knockdowns (data not shown).

[0234] JNK mediates both Nanog loss from 0 to 4 hr and continuing Rex1 loss between 4 and 24 hr. Both JNK-dependent effects would mediate predisposition toward endoderm, which is suppressed by Nanog (Frankenberg, supra; Hamazaki, J. Cell. Sci., 117:5681, 2004; Mitsui, Cell, 113:631, 2003), although Rex1 may mediate later ectoderm and specific subtypes of extraembryonic endoderm. Scotland supra; Masui, 2008. Interestingly, JNK prioritizes differentiation of TSCs stressed by hyperosmotic sorbitol, benzopyrene, or hypoxic O₂ below 2%, by inducing 1^{st} lineage (Xie, 2014; Awonuga, 2011; Abdallah, Fertil. Steril., 92(3):S136, 2009) and suppressing later lineages. Xie, 2014. JNK appears to mediate stress-induced endoderm, the 1^{st} lineage arising from ESCs.

[0235] In stressed ESCs, 1^{st}-lineage markers show that nutrient acquisition is a function associated with the increased expression of Lrp2 and Dab2 in the primitive endoderm. Lrp2 marks the earliest allocation of primitive endoderm in the E3.5 blastocyst and is accompanied by a suite of other proteins, such as cubilin and megalin (e.g., SEQ ID NO:69), that are also expressed in the earliest ExEndo in the blastocyst and are part of lipid uptake mechanisms shared by many absorptive epithelia. Frum, supra; Maurer & Cooper, J. Cell. Sci., 118:5345, 2005; Assemat, Biol. Reprod., 72:1079, 2005; Smith, BMC Dev. Biol., 6:30, 2006; Drake, Anat. Rec. A Discov. Mol. Cell. Evol. Biol., 277:163, 2004. Dab2 arises during primitive endoderm lineage fixation at E4.5 and anchors the absorptive complex in the apical surface where it may function to feed the endoderm and adjacent ICM in the blastocyst or inner stem cells subjacent to the outer visceral endoderm of embryoid bodies. Frum, supra; Yang, J. Biol. Chem. 282:13114, 2007. Biochemical evidence and evidence from the 1^{st} peri-implantation-null lethals that were endoderm specific resulted in death of the overlying primitive ectoderm by E6.0 suggesting that the early endoderm feeds the embryonic ectoderm (reviewed in Rappolee, Mol. Reprod. Dev., 52:234, 1999). Thus, induction of both Lrp2 and Dab2 by stress suggests that a primary function of stress-induced differentiation is to provide function that becomes essential rapidly after blastocyst implantation. Hyperosmotic stress begins to induce this absorptive capability in mESCs in monolayers, similar to the induction by several stressors of the placental hormone PL1 from TSCs (Xie, 2014; Awonuga, 2011; Liu, supra; Rappolee, 2013) that increases nutritional supply to the fetal-maternal interface in vivo.

[0236] PI3K and p38MAPK protect potency after adaptation to stress, leading to recovery of Nanog/Rex1 and Nanog/Oct4 between 4 and 24 h, respectively (Table 6). Oct4 recovery may occur for several reasons. One is that a sufficient, successful stress response occurs during the 1^{st} 4 hr and allows substantial ESC proliferation and accumulation, and thus induction of full differentiation is not required to compensate for fewer cells. Alternately, the function of early stem cells is to retain potency and divide exponentially between days E4.0 and E11.0 (Embryogenesis in mammals. (1976). Elsevier, Amsterdam; New York; McLaren. Embryo growth during the immediate postimplantation period. In Embryogenesis in mammals. (1976). Elsevier, Amsterdam; New York) so stress-induced differentiation of all cells would not be tolerated. A third hypothesis is that Oct4 function is required to mediate the ongoing stress response as established also for Oct1. Kang, Trends Biochem. Sci., 34:491, 2009; Kang, Genes Dev., 23:208, 2009; Tantin, Cancer Res., 65:10750, 2005; Riley, Dev. Biol., 284:377, 2005) If the function of transient Oct4 loss is to enable sufficient ExEndo differentiation, then this may have been accomplished and longer culture in monolayer of embryoid bodies would show that a larger subpopulation of these cells arises. The ESC survival effects corroborate previous studies for PI3K function in ESCs, TSCs, and embryos (Gross, supra; Riley, supra), but the role of mediating Oct4 loss from 0 to 4 hr is novel and unexpected.

[0237] JAs in the described Example, Mao, found that mESCs maintained a pluripotent phenotype during long-term exposure to hyperosmolarity, although proteins involved in both protein synthesis and degradation via the ubiquitin-proteasome system were decreased. Mao, J. Proteome Res., 7:3968, 2008. In many cell types, such as cardiomyocytes, hyperosmotic stress at these levels causes an 80% decrease in new translation within the 1^{st} 30 min. Patel Eur. J. Biochem., 269:3076, 2002. When stress decreases new translation and increases potency factor degradation, rapid, adaptive programmatic changes are possible.

[0238] The ubiquitin-proteasome system has been reported to have a role in the self-renewal and differentiation of both human and mouse ESCs (reviewed in Naujokat & Saric, Stem Cells, 25:2408, 2007). Inhibition of proteasomes decreased levels of four Oct4, Sox2, Nanog, and Rex1 mRNAs (Vilchez, Nature, 489:304, 2012) and Oct4 and Nanog mRNAs in unstressed human ESCs and thus proteasome function is proposed to be part of potency maintenance. It is not clear from these studies or the Examples described here whether stress would increase proteasome-dependent protein destruction in human ESCs or proteasome-dependent increase in potency mRNA occurs in unstressed mouse ESCs, respectively. The activity of the 20S subunit of the proteasome is normally upregulated during mESC differentiation (Hemebring, Proc. Natl. Acad. Sci. USA, 103:7700, 2006); its suppression during hyperosmotic stress supports the finding that mESCs are not enabled to differentiate fully during extended hyperosmotic stress.

[0239] The reported half-life of Oct4 protein ranges from 1.5 to 8 hr. A half-life of 90 min has been reported for Oct4 protein in undifferentiated P19 (Sax, PLoS One, 4:e4467, 2009), 6-8 hr in NIH3T3-overexpressing Oct4 protein (Wei, J. Biol. Chem., 282:21551, 2007), 6.9 hr for Oct4 mRNA in mouse ESCs (Sharova, supra), and a few hours for Oct4 mRNA in differentiated cells undergoing reprogramming. Taranger, Mol. Biol. Cell, 16:5719, 2005. Oct4 is required to exclude Cdx2 in nonpolar inner cells of the blastocyst (Niwa, Cell, 123:917, 2005) and is required for FGF4 secretion that sustains adjacent trophectoderm (Arcuri, Mol. Cell. Endocrinol., 141:13, 1998; Ma, Dev. Biol., 154:45, 1992) and primitive endoderm cells in the three-dimensional (3D) blastocyst. Frum, supra; Frankenberg, supra; Cho, Development, 139:2866, 2012; Krawchuk, Dev. Biol., 384:65-71, 2013. However, Oct4 also plays a transient, cell-autonomous role in establishing primitive endoderm. Frum, supra. Importantly, Oct4 is a stress response factor that controls stem cell metabolism in mESCs in culture before and during stress (Kang, Trends Biochem. Sci., 34:491, 2009; Kang, Genes Dev., 23:208, 2009) and metabolism of cultured mouse embryos. Frum, supra. Thus, the cohort of potency TFs with Oct4 at its apex is dynamically poised under normal circumstances to regulate potency, allocation, stem cell metabolism, and stress responses.

[0240] Nanog has a half-life of 2 hr in human ESCs, and is controlled by proteasomal regulation via the PEST motif. Ramakrishna, Stem Cells Dev., 20:1511, 2011. In mESCs, a half-life of 5.2 hr has been reported for Nanog mRNA. Sharova, supra. Rex1 half-life has been reported to be from 30 min (Gontan, Nature, 485:386, 2012) to 2.2 hr (Sharova, supra) in mESCs (Gontan, supra). In mESC system, inhibition of the proteasome for 4 hr led to a 3-fold increase in Rex1 expression, suggesting a short half-life of this protein. The rapid turnover of Rex1 as compared with Oct4 and Nanog allows it to respond more quickly to changing conditions. That Rex1 was the only pluripotency marker that did not recover to normal expression levels during stress is unique, as it normally recovers quickly during fluctuations in expression. Toyooka, supra. This may be due to increased protein destruction, JNK-dependent silencing of the Rex1 promoter despite Oct4 (Boyer, supra), or JNK-dependent phosphorylation of Oct4 that decreases binding to the Rex1 promoter. These data suggest that the stressed mESC monolayer may act more like the epithelial embryonic ectoderm of E5.5 that has lost Rex1 since differentiating from the ICM, but still expresses Oct4, Nanog, and Sox2. During normal, unstressed mESC culture, subpopulations of both low-Rex1- and high-Rex1-expressing cells exist. Toyooka, supra. Low-Rex1-expressing cells have poor ability to differentiate into primitive endoderm, and predominantly differentiate to primitive ectoderm lineages. High-Rex1-expressing mESCs were pluripotent and, upon reinjection to embryos, they contributed to multilineage chimeras. Toyooka, supra. These populations were interconvertible during culture without added stress; low Rex1 expressors could revert back to high Rex1 expression regaining developmental potential, and vice versa.

[0241] In the current Example, hyperosmotic stress maintains low Rex1 expression in mESCs and suppresses interconversion back to high Rex1 expression. This result led to the expectation that the stressed mESCs would induce epiblast markers, such as FGF5, due to their inverse regulation. Pelton, J. Cell. Sci., 115:329, 2002. This did not prove to be the case, however, as epiblast was suppressed while primitive endoderm markers were induced. Rex1 expression is required for complete development of extraembryonic lineages. Rex1-negative mESCs were defective in some visceral endoderm markers although the major marker, α-feto protein (AFP), was expressed (Masui, 2008) and Rex1-/-F9 teratocarcinoma stem cells were only able to differentiate to parietal endoderm. Thompson & Gudas, Mol. Cell. Endocrinol., 195:119, 2002. The data suggest that Rex1 plays a role in directing lineages of endoderm differentiation in F9 cells but data should be interpreted cautiously as, unlike mESCs, AFP requires Rex1 expression and F9 cells may not emulate complex regulatory mechanisms of mESCs. In this Example, persistence of some Rex1 expression in stressed cells presumably allows mESC priming toward primitive endoderm. However, the persistent suppression of Rex1 expression raises the question of whether visceral endoderm downstream of primitive endoderm will be decreased in favor of parietal endoderm. Brown, supra.

[0242] In the current Example, JNK activation by continuous hyperosmotic stress suppressed Rex1 expression, but was not adequate to trigger outright differentiation of mESCs. JNK may not be activated long enough to irreversibly commit ESCs to differentiation, or there may be insufficient activation of other enzymes needed to complement JNK-induced differentiation, or insufficient 3D interactions may occur. Unlike TSCs, ESCs may require the 3D interactions available in embryoid bodies. However, it was not defined whether JNK directly decreased Rex1 protein or indirectly suppressed it during induction of differentiation. In each case of stress-induced differentiation of mESCs and TSCs, JNK was active within a pathway required to produce a new lineage, but in none of the cases was it capable of initiating differentiation on its own. JNK may work with other differentiation cues and enzymatic mechanisms. But during the stress response, the activation of multiple pathways with competing effects prevented outright or complete differentiation of large cell subpopulations. For example, JNK suppressed Rex1 expression during 24 hr of stress, while PI3K signaling was simultaneously maintaining Rex1, preventing total Rex1 protein loss. This additional signaling masked but did not negate JNK's action on Rex1. Of course if a single ESC lost the three potency TFs undergoing transient stress-induced loss, and the continuing loss of Rex1 for a long enough period, then it might differentiate irreversibly.

[0243] Finally, the stress-induced differentiation of TSCs occurred even in the presence of FGF4 signaling that sustains their multipotent state. Xie, 2014; Xie, 2013; Awonuga, 2011; Liu, supra; Zhou, 2011. Stress signaling was dominant over FGF4 signaling at doses where stem cell populations expanded, but at diminished rates. In the current Example, mESCs integrated stress-response signals with potentially competing signals from exogenous LIF and bone morphogenetic protein (BMP). The cytokine LIF promotes mESC self-renewal by activating the TF STAT3. BMPs are a serum component that induces expression of inhibitor of differentiation genes that block expression-lineage-specific TF function and facilitate the self-renewal response to LIF/STAT3. Ying, Cell, 115:281, 2003. In the described system, the integration of all these signals during hyperosmotic stress led to preservation of a pluripotent population; stress was not dominant in overt changes in mESC monolayers. However, in vivo the pluripotent ICM is a transient stage that stem cells move through to populate the lineages that will eventually make up the embryo and its support cells. LIF in the four-cell-stage embryo and interleukin-6 at the blastocyst stage are necessary to maintain phosphorylated STAT3 and Oct4 in order to maintain pluripotency in vivo. Do, Genes Dev., 27:1378, 2013. If stress occurred in an environment that was more characteristic of the nonepithelial ICM, one where differentiation was not repressed, then the stress activation of the differentiation program may proceed unimpeded. Thus, stress may drive preimplantation ICM to Ex-Endo but suppress other lineages that arise at gastrulation.

[0244] The data suggest that the period when stem cells 1^{st} allocate at E3.5, differentiate soon after, and mediate gastrulation at E6.5 is critical and can be affected critically by stress. The understanding of how stress enzymes mount successful adaptation to stress through regulation of potency and differentiation-mediating TFs during this critical period is of profound importance. The goal is to understand the mechanisms and thresholds between healthy, adaptive and unhealthy, maladaptive responses that are important in the general population but also during medical procedures such as in vitro fertilization that alleviate infertility.

### Example 3

[0245] The embryo undergoes stress in vivo and in vitro and this decreases developmental rates, stem cell growth rates and causes potency loss (Puscheck, Molecular Biology of the Stress Response in the Early Embryo and its Stem Cells. In: Cell Signalling During Mammalian Early Embryo Development. Henry Leese D B ed. Springer, 2015 (Puscheck, 2015, MB); Xie, 2011). ESCs respond to hyperosmotic stress with transient loss of Oct4 and long-term loss of Rex1 proteins in a proteasome-dependent manner and this correlates with induction of 1^{st} lineage and suppression of later lineages during stress (Example 2; Slater, Stem Cells Dev., 23:3049, 2014). Early embryos at the 2-cell and blastocyst-stage also undergo stress-induced potency loss as do placental trophoblast stem cells (TSCs) derived from the blastocyst (Xie, 2013; Zhou, 2011).

[0246] Oct4 and Rex1. Oct4 is a DNA-binding transcription factor that mediates stemness in gametes and early embryos and in pluripotent cells through the start of gastrulation (Pesce & Scholer, Mol. Reprod. Dev., 55:452, 2000). Oct4 null lethality occurs at the blastocyst stage when ICM lose pluripotency and fail to synthesize FGF4 (Nichols, Cell, 95:379, 1998) that maintains adjacent polar trophectoderm (Chai, 1998). Oct4 promoter methylation is diminished in oocytes undergoing in vitro maturation (IVM) (Milroy, Fertil. Steril., 95t:2094, 2011) and Oct4 expression is decreased in embryos derived from smoke-exposed mouse females (Huang, Fertil. Steril., 92:1456, 2009). Oct1 and Oct4 have been used to test for toxic stress in HTS of embryonic stem cells ESCs (Pal, J. Cell. Physiol., 226:1583, 2011) and both transcription factors have stress domains that prepare stem cells for stress and are phosphorylated and regulate the stress response (Kang, Genes Dev., 23:208, 2009). Rex1 is also a transcriptional factor that is lost from ICM as they differentiate to either extra-embryonic primitive endoderm or embryonic primitive ectoderm fates (Toyooka, supra) but its null is not lethal at the blastocyst stage and it is not required to initiate and maintain pluripotency of ESCs (Rezende, Dev. Biol., 356:370, 2011). Taken together the data suggest that Rex1-driven reporters should be more useful than Oct4-driven reporters to create HTSs for toxicants or other stressful stimuli that negatively affect embryo and stem cell stemness and differentiation, thus depleting stem cells and imbalancing differentiation.

[0247] In order to produce modified reporter mESCs without the stress of electroporation or cationic lipids, lentivirus infection can be used (Kaufman, Theriogenology, 82:1043, 2014) and in place of antibiotic selection ESCs are passaged in the normal manner but fluorescence activated cell sorted (FACS) to select stem cells reporting pluripotency. This creates viable potency reporter ESC lines with normal growth rates and without cell loss during infection and selection. These mESCs also report potency factor activity loss using 1) visual microscopic inspection, 2) microplate readers, 3) FACS, and 4) immunoblots. The assays provide similar results as in Example 2. The analysis by flow cytometry also provides important new information on the size of the bright (potent) subpopulation that goes to zero potency and the microplate gives a platform of high throughput analysis of toxicants or other potential stressors that may induce potency loss and for performing high throughput screens to further elucidate the mechanisms of potency loss.

[0248] Materials. Germline competent mESC-D3 cells were purchased from ATCC (Manassas, Va.). DMEM medium was from HyClone (Logan, Utah). Gibco™ glutamine and sodium pyruvate supplement solutions were from Life Technologies (Grand Island, N.Y.). ESC-qualified EmbryoMax fetal bovine serum, 0.1% gelatin solution and ESGRO™ Mouse LIF medium supplement were from EMD Millipore (Billerica, Mass.). Oct4 promoter reporter lentiviral particles that express the green fluorescent protein copGFP and TranDux™ transduction reagent were from System Biosciences (Mountain View, Calif.). Rex1 promoter reporter lentiviral particles that express the red fluorescent protein mApple were from Allele Biotechnology (San Diego, Calif.). Rabbit anti-Rex1 antibody was from Abcam (Cambridge, Mass.). Rabbit anti-cleaved caspase 3 antibody, Rabbit anti-β-actin antibody and HRP-conjugated second antibodies were from Cell Signaling Technology (Danvers, Mass.). Pierce RIPA lysis buffer, protease inhibitor cocktail and BCA protein assay reagents were from Thermo Scientific (Rockford, Ill.). ECL chemiluminescence reagent was from GE Healthcare Bio-Sciences (Pittsburgh, Pa.). MEM non-essential amino acid solution, sorbitol, 2-mercaptoethanlol and other chemicals were from Sigma (St. Louis, Mo.).

[0249] Low stress production of single and double viable potency activity reporter mouse ESCs. mESCs were cultured in 24-well plates pre-coated with 0.1% gelatin. The starting confluence of cells was 20% or 100,000 cells/well. The cells were incubated in 37° C. for 2-3 hr for attachment and readiness for virus infection. Virus infection medium was made by mixing Oct4 and/or Rex1 promoter reporter lentiviral particles into regular growth medium supplemented with TransDux. The final concentration of the viral particles was 10/ml. The infection medium was applied to mESCs at 400 μl per well. After infection, the cells were cultured for 3 days to allow the expression of the fluorescent reporter proteins. After expansion of the total cell number by passaging, the infected cells were subjected to flow cytometry sorting using BD FACS Vantage SE cell sorter (BD Biosciences, San Jose, Calif.) at the Wayne State University Microscopy, Imaging and Cytometry Resources (MICR) core facility. Pure, fluorescent cells were obtained after two FACS repeats. But, as indicated in FIGS. 25A and 25B and as previously reported by Toyooka and colleagues Toyooka, supra) heterogeneity reestablishes after sorting and culture and normally a small population becomes Rex1 dim.

[0250] mESC culture and stimulation. Germline competent mESC-D3 cells (ATCC, Manassas, Va., (Doetschman, J. of Embryology and Experimental Morphology, 87:27, 1985)) were cultured in the absence of feeder cells in DMEM (Gibco, Grand Island, N.Y.) supplemented with 15% mESC-screened fetal bovine serum (HyClone, Logan, Utah), 2 mM L-glutamine, 1 mM sodium pyruvate, 1 mM nonessential amino acids, 0.1 mM 2-mercaptoethanol (Sigma, St. Louis, Mo.), and 1000 U/mL murine leukemia inhibitory factor (LIF; Millipore, Temecula, Calif.) on 0.1% gelatin-coated dishes at 37° C. in humidified air with 5% CO₂ (Masui, 2008). mESCs were cultured overnight after passaging before stimulation with sorbitol. Osmolality of ESC media with and without added 200 mM sorbitol was determined as in Example 2.

[0251] Fluorescence determination by plate reader of pluripotency reporters. mESCs that stably express Oct4-copGFP and/or Rex1-mApple promoter reporters were plated on 96-well plates at a starting confluence of 5%. Four identical plates were made for the time course study. Cells were grown for 24 hr in incubator till 10% confluence was reached; an addition of stimuli was designated time zero. The cells were stressed for a time period selected from 1, 2, or 3 days. At each time point, the medium was removed and the cells were rinsed with D-PBS. At 50 μl/well, ESCs were measured for fluorescence using the Synergy H1 microplate reader (BioTek, Winooski, Vt.). The excitation and detection wavelengths for Oct4-copGFP were 485 nm and 528 nm, respectively. The excitation and detection wavelengths for Rex1-mApple were 568 nm and 611 nm, respectively. After live-cell reading, the cells were lysed with 50 μL of lysis buffer (1% NP-40, 0.5% TX-100, 100 mM NaCl, 2 mM EDTA, 50 mM Tris-HCl, and pH 7.5) and measured for fluorescence with the same parameters above. After fluorescence determination, the cell lysates were further measured for total protein concentrations by adding 100 μl of Pierce BCA protein assay reagent (Thermo Scientific Inc.) following the manufacturer's instructions. Finally, the fluorescence readings from either live-cells or lysates were normalized to total protein concentration readings, in which higher readings represent higher pluripotency of the cells.

[0252] Flow cytometric analysis of mESCs expressing pluripotency reporters. Fluorescence determination by the plate reader reported an averaged biochemical result from a population of cells inside the tissue culture vessel. In order to get insight into the heterogenic nature of the cells that respond to the same stress condition, a flow cytometry assay that provides quantification of cells that show different levels of pluripotency under stress was used. mESCs expressing potency reporter Oct4-CopGFP or Rex1-mApple were plated at a starting confluence of 10% and grown for 24 hr until reaching 25% confluence. This time point was designated as time zero. The cells were then treated with different sorbitol concentrations for 1-3 days. At each time point, cells were trypsinized and re-suspended in ice-cold D-PBS for flow cytometry assay using an LSR Fortessa flow cytometer (BD biosciences) and the FACS Diva Software version 7.0 (BD biosciences). Non-stressed mESCs that express Oct4-copGFP and/or Rex1-mApple and the non-modified, parental mESCs were used to set up the parameters that define the fluorescent cells and non-fluorescent cells.

[0253] From the histogram of FACS, two peaks are seen. The right peak represents the bright fluorescent potent ESCs. The left peak represents the dim fluorescent non-potent ESCs. An arbitrary vertical line is drawn here at the 5×10³ position on the PE-A axis to separate the low potency ESCs. The peak areas were calculated using Image J by counting the area pixels.

[0254] Immunoblot. After treatment, the ESCs were rinsed with PBS, lysed with RIPA buffer supplemented with protease inhibitors and sonicated briefly. Total protein concentration was determined using Pierce BCA protein assay reagent admixed with Laemmli sample buffer, and boiled for 5 min. Equal total protein amounts from the lysates were size-fractionated by 5-20% gradient SDS-PAGE and transferred onto nitrocellulose membrane. Rex1 immunofluorescent signals were detected using ECL reagent with X-ray films and quantified using ImageJ 1.48v software (NIH, USA).

[0255] Statistics. Data collected over at least, three independent experiments were analyzed using SPSS Version 22.0 and presented as means±SEM. Data distributions met the assumptions of independent t-test and one-way ANOVA. Dunnett's post hoc test was performed following significant ANOVA test. For FIGS. 23A and 23B, Independent t-tests were performed to examine the difference between control and treatment for Oct and Rex. Significance was detected for Rex (p=0.019) but not for Oct. For FIG. 24, One-way ANOVA was performed followed by Dunnett's post hoc test using 0 mM as reference. All treatments were different from the control (highlighted p-value in excel). For FIGS. 25 and 26, One-way ANOVA was performed followed by Dunnett's post hoc test using 0 mM as reference for parental dim, intermediate dim, and bright separately. Differences were detected for parental dim and bright groups, but not for intermediate dim (highlighted p-value in excel). For FIG. 27: One-way ANOVA was performed followed by Dunnett's post hoc test using 0 mM as reference. Differences between treatments and/or groups were considered insignificant if p≧0.05 and significant if p<0.05.

[0256] Results. It was previously shown that Oct4, Sox2, and Nanog transcription factor protein underwent stress-induced transient loss at 4 hr, rebounding to baseline pre-stressed condition by 24 hr and later. However, Rex1 protein loss due to stress is not transient but chronic. Here Rex1-RFP ESCs were developed and their kinetic and dose-dependent responses to stress were tested. To create the Rex1-RFP vector, and compare it with Oct4-GFP activity in response to stress, ESCs were infected with lentivirus with either single vector or both vectors (FIG. 22A, 22B, 22C). Note that single infected cells were red for Rex1-RFP or Oct4-GFP, but expression of both produced yellow emissions (FIG. 22C). This was done with no cell loss in comparison with huge cell death using either electroporation or cationic lipids. In a second step modified ESCs, were trypsinized as for a normal passage, and a fluorescence-activated cell sorter (FACS) was used to purify Rex1-RFP (FIG. 22D), Oct4-GFP (FIG. 22E), and dual Rex1-RFP/Oct4-GFP expressing ESCs (FIG. 22F). To test for the stress response of these three modified ESCs they were incubated for 3 days with LIF and with or without 200 mM sorbitol, the sub-morbid dose that created a strong Rex1 protein loss as in Example 2. Oct4-GFP fluorescence intensity was similar without (FIG. 22G) or with (FIG. 22J) stress, but Rex1-RFP fluorescence was clearly higher without stress (FIG. 22H) than with stress (FIG. 22K). In corroboration, -d culture of Rex1-RFP/Oct4-GFP dual expressing cells were not affected by culture without stress (FIG. 22I), but stress decreased Rex1-RFP, removing red from yellow and re-exposing green fluorescence from Oct4-GFP (FIG. 22L). Thus, the visual data suggest that Rex1-RFP activity reporter is decreased in viable ESCs after 3 days of hyperosmotic stress.

[0257] The amount of stress-induced loss of Rex1-RFP or Oct4-GFP was next quantitated using a microplate reader. It was found that stress mediated by 200 mM sorbitol, despite the presence of LIF, induces a significant loss of Rex1-RFP but not Oct4-GFP (FIG. 23A,23B). This is in general agreement with the loss of Rex1 protein but not Oct4 protein after 24 hr of stress. However, the loss of Rex1 protein is greater than the loss of Rex1 activity detected by the multimerized Rex1 response elements driving RFP fluorescence assay in the microplate reader.

[0258] In the test of Oct4-GFP and Rex1-RFP reporter ESCs 200 mM sorbitol was used as described in Example 2. However, higher doses of sorbitol created increasing potency loss and toxicity. To test for higher dose-dependent stress, increases were used in increments of 25 mM from 200-300 mM sorbitol for three days in ESC culture with LIF present. A dose-dependent increased Rex1-RFP loss was found in triplicate biological experiments in which stress was dominant to Rex1 activity as measured by the microplate reader (FIG. 24). Although Rex1-RFP activity was less at 200 mM sorbitol, by 300 mM the 60% loss of Rex1 activity measured here was as high as the Rex1 protein loss reported previously and in FIG. 27.

[0259] To further define the nature of the response of ESCs to hyperosmotic stress, changes in the potency of ESC subpopulations using flow cytometry were tested. It was found that there was an increase in the dim subpopulation that was at 10² arbitrary intensity units, the level of fluorescence of non-modified parental ESCs (FIGS. 25A and 25B, FIGS. 26A and 26B). Unstressed ESCs had 8.6+/−1.0% dim cells but this increased to 24.4+/−2.9% by 300 mM sorbitol, despite the presence of LIF. In contrast 83.3+/−3.9% of unstressed cells were in the bright group (near 10⁴ arbitrary intensity units), but this decreased to 61.8+/−3.7% at 300 mM. There was a small increase in intermediate dim cells, from 10.7+/−1.2% to 13.8+/−2.1%. The 60% decrease in Rex1-RFP from 0 to 300 mM sorbitol determined by microplate reader in FIG. 24 is matched by a total change toward intensity decrease of 40.4% of cells; 3.1% increase in intermediate dim ESCs, 15.8% increase in parental dim ESCs, and decrease of 21.5% in the bright group (FIGS. 25A and 25B, FIGS. 26A and 26B). The additional decrease in brightness determined by microplate reader compared with subpopulation change producing decreased brightness may be a result of increased changes in brightness/cell.

[0260] Finally it was tested whether endogenous Rex1 protein levels decreased commensurately with decreases in Rex1-RFP activity levels assayed in FIG. 24. Rex1-RFP ESCs were cultured for 3 days with 0-300 mM sorbitol and assayed by immunoblot for endogenous Rex1 levels normalized to ACTB loading controls and with time zero unstressed Rex1 set to 100 as a baseline level. Whereas stress-induced decrease in Rex1 activity in FIG. 24 were 20% and 70% at 200 mM and 300 mM sorbitol, respectively endogenous Rex1 protein losses were 30% and 70% at 200 mM and 300 mM, respectively (FIG. 27). Through the series from 200 mM to 300 mM sorbitol there was generally good agreement between activity level and endogenous protein level for Rex1 at 3 days of stress and with Rex1 protein loss at 1 day (Example 2). To correlate stress-induced Rex1 potency loss with stress-induced diminished cell growth rates, cell counts were performed at time zero and at 3 days over the same sorbitol dose range as in FIG. 27 and FIG. 24 and FIGS. 26A and 26B. As in the past, potency loss was directly proportional to diminished growth, suggesting that the differentiation enabled by potency loss would compensate for fewer cells. Stress-diminished cell counts were also multiplied by stress-increased subpopulations of intermediate dull and parental dull stem cells that had loss potency and for several doses from 200-250 mM sorbitol the product, which equaled total numbers of cells which lost potency, was constant (Table 8, doses from 200, 225, 250 have constant numbers of cells with lost Rex1-RFP; see Brief Description of the Figures for Table 8).

[0261] Interestingly, in the 200-250 mM sorbitol range cell doubling rates decreased but in a lineage range between 34.1-39.3 hr, but total numbers of intermediate+parental dim potency loss cells decrease at 275-300 mM where doubling rates fell off to 51.4-103.4 hr. This is also predicted by the theory of stress-induced compensatory differentiation (Puscheck, 2015, MB; Xie, 2014). Taken together, dose-dependent stress effects on cell growth rates, Rex1 endogenous protein levels, decreases in Rex1 active subpopulation and increases in Rex1 low activity subpopulations suggest that stress induces potency loss in a coherent manner.

[0262] The goals of this Example were to 1) test whether four lines of evidence show consistent outcomes for potency factor activity reporter ESCs and biochemical data for stress-induced potency loss, 2) validate these reporter ESCs for use in HTS for toxicology, and 3) to further test the theory of stress-induced compensatory differentiation of stem cells.

[0263] The 4 lines of evidence confirm that Rex1-RFP potency activity reporter ESCs show consistency between micrographic analysis, biochemical averages from immunoblots and microplate reader, and subpopulation studies using flow cytometry. Endogenous Rex1 protein levels are consistent with Rex1-RFP activity levels measured in the same cells under the same stress exposures.

[0264] Rex1-RFP is a sensitive stress reporter and will enable an HTS for developmental toxicology of manufactured compounds, environmental pollutants, new Pharma and cosmetics and fluid collected during IVF ART protocols. These include follicular, vaginal, uterine, amniotic fluids and spent media. Hyperosmotic stress, which is a “gold standard” for discovery and characterization of stress enzymes (Xie, 2011), was used in this Example. There is also an exemplar set of toxicants used for the only government-validated ESC toxicology assay (Genschow, European Centre for the Validation of Alternative Methods. Altern Lab Anim, 30:151, 2002, and these will be used to further test the validity of the Rex1-RFP HTS. Similar results are expected; more particularly, however, similar in “shape” of the dose response curve. Because Genschow, used an ESC cytotoxicity outcome which requires high doses, the compensatory differentiation assay should be more sensitive in that differentiation is induced at lower doses than cytotoxicity.

[0265] The theory of stress-induced compensatory differentiation (Xie, 2011; Puscheck, 2015, MB; Rappolee, Syst. Biol. Reprod. Med., 56:168, 2010) states that stress 1^{st} diminishes normal stem cell population expansion and then compensates for fewer stem cells by differentiating more of the remaining stem cells to produce essential 1^{st} lineage differentiated function. This occurs despite the presence of growth factors that would normally maintain proliferation and potency and thus stress destroys potency. There are three lines of evidence for the theory. One is that dose-dependent stress diminishes stem cell growth and that was observed previously in ESCs (Example 2) and TSCs (Zhou, 2011; Puscheck, 2015, MB; Xie, 2014; Awonuga, 2011; Zhong, 2010; Xie, 2010; Abdallah, Fertility and Sterility, 92(3):S136, 2009) and here. A second, previously-established line of evidence is that stress induces increases in stress enzymes proportional to average decreases in potency factors and increases in differentiation factors in biochemical assays such as immunoblots and qPCR. A third prediction is that there is a putative subpopulation of stem cells that decreases potency and increases differentiation. Because the modeled stressed embryo is under duress, this prediction includes the stipulation that the subpopulation cell number should be constant; a minimal size but not larger.

[0266] The stress dose-dependent cell number of low potency cells can be determined by multiplying the fractional subpopulation size of cells with potency loss, which increases with stress and the decreasing cell numbers with increasing stress. This was done in Table 8 and compared with a previously published Venn diagram for compensatory differentiation (Puscheck, 2015, MB; Rappolee, 2013), modified to produce FIG. 28. In the stress-dose range where population size decreases, but increasing doubling rate is in a manageable range, the absolute size of the subpopulation of potency loss (intermediate and very low dim cells) is remarkably the same. At stress doses where very large doubling rate increases occur the subpopulation number with potency loss decreases, probably due to stem cell morbidity at these higher hyperosmotic stress levels (Example 2). Thus all three lines of evidence summarized here are consistent with the theory, but with limitations.

[0267] A Pdgfra-GFP ESC line can be tested for stress effects on differentiation of the 1^{st} lineage ESC-derived extra-embryonic endoderm that this line reports (Artus, Development, 137:3361, 2010). This will provide an even more direct test of stress-induced differentiation and the regulation and number of cells in the subpopulation undergoing stress dose-dependent potency loss and differentiation increase. Without being bound by theory, it is hypothesized that Pdgfra-GFP cells will derive primarily from the parental dim subpopulation of Rex1-RFP cells, but differentiated cells may arise from the intermediate dim or even bright groups of Rex1-RFP cells, but at lower frequencies.

[0268] It should be noted that a recent high impact paper claimed that a three-step stress regimen induces potency during reprogramming of adult differentiated cells (Obokata, Nature, 505:641, 2014) however this report was retracted (Obokata, Nature, 511:112, 2014). Many stresses were used (Xie, 2011); Puscheck, 2015, MB) and others have also shown (Soares, Trends Endocrinol. Metab., 18:114, 2007) that stress can induce differentiation in placental and embryonic stem cells TSCs and ESCs of the early rodent embryo. The modified stem cells (e.g., Rex1-RFP and Pdgfra-GFP potency and 1^{st} differentiated lineage ESC)) and their use in HTSs will be invaluable in rapidly compiling quantitative data on stress-induced differentiation from large sets of stressors of interest to toxicologists and reproductive scientists.

[0269] Any embodiment (e.g., modified stem cells, assays, HTSs) can be used in combination with any of the following markers of interest for pregnancy outcome including Cofillin (NM_005507), DIAPH1 (NM_001079812, NM_005219), ECT2 (NM_018098), MYLC2/MYL5 (NM_002477), DGCR8 (NM_022720), Dicer/DICER1 (NM_030621, NM_177438), TARBP2 (NM_004178, NM_134323, NM_134324), CPEB1 (NM_001079533, NM_001079534, NM_001079535, NM_030594), Symplekin/SYMPK (NM_004819), YBX2 (NM_015982), ZAR1 (NM_175619), CTNNB1 (NM_001098209, NM_001098210, NM_001098210, NM_001904), DNMT3B (NM_006892, NM_175848, NM_175849, NM_175850), TERT (NM_198253, NM_198255), YY1 (NM_003403), IFGR2/IFNGR2 (NM_005534), BTF3 (NM_001037637, NM_001207), and NELF (NM_001130969, NM_001130970, NM_001130971, NM_015537).

[0270] As will be understood by one of ordinary skill in the art, each embodiment disclosed herein can comprise, consist essentially of or consist of its particular stated element, step, ingredient or component. Thus, the terms “include” or “including” should be interpreted to recite: “comprise, consist of, or consist essentially of.” As used herein, the transition term “comprise” or “comprises” means includes, but is not limited to, and allows for the inclusion of unspecified elements, steps, ingredients, or components, even in major amounts. The transitional phrase “consisting of” excludes any element, step, ingredient or component not specified. The transition phrase “consisting essentially of” limits the scope of the embodiment to the specified elements, steps, ingredients or components and to those that do not materially affect the embodiment. As used herein, a material effect would cause a statistically-significant reduction in the ability of a method to detect stress in a stem cell.

[0271] Unless otherwise indicated, all numbers expressing quantities of ingredients, properties such as molecular weight, reaction conditions, and so forth used in the specification and claims are to be understood as being modified in all instances by the term “about.” Thus, unless indicated to the contrary, the numerical parameters set forth in the specification and attached claims are approximations that may vary depending upon the desired properties sought to be obtained by the present invention. At the very least, and not as an attempt to limit the application of the doctrine of equivalents to the scope of the claims, each numerical parameter should at least be construed in light of the number of reported significant digits and by applying ordinary rounding techniques. When further clarity is required, the term “about” has the meaning reasonably ascribed to it by a person skilled in the art when used in conjunction with a stated numerical value or range, i.e. denoting somewhat more or somewhat less than the stated value or range, to within a range of ±20% of the stated value; ±19% of the stated value; ±18% of the stated value; ±17% of the stated value; ±16% of the stated value; ±15% of the stated value; ±14% of the stated value; ±13% of the stated value; ±12% of the stated value; 11% of the stated value; ±10% of the stated value; ±9% of the stated value; ±8% of the stated value; ±7% of the stated value; ±6% of the stated value; ±5% of the stated value; ±4% of the stated value; ±3% of the stated value; ±2% of the stated value; or ±1% of the stated value.

[0272] Notwithstanding that the numerical ranges and parameters setting forth the broad scope of the invention are approximations, the numerical values set forth in the specific examples are reported as precisely as possible. Any numerical value, however, inherently contains certain errors necessarily resulting from the standard deviation found in their respective testing measurements.

[0273] The terms “a,” “an,” “the” and similar referents used in the context of describing the invention (especially in the context of the following claims) are to be construed to cover both the singular and the plural, unless otherwise indicated herein or clearly contradicted by context. Recitation of ranges of values herein is merely intended to serve as a shorthand method of referring individually to each separate value falling within the range. Unless otherwise indicated herein, each individual value is incorporated into the specification as if it were individually recited herein. All methods described herein can be performed in any suitable order unless otherwise indicated herein or otherwise clearly contradicted by context. The use of any and all examples, or exemplary language (e.g., “such as”) provided herein is intended merely to better illuminate the invention and does not pose a limitation on the scope of the invention otherwise claimed. No language in the specification should be construed as indicating any non-claimed element essential to the practice of the invention.

[0274] Groupings of alternative elements or embodiments of the invention disclosed herein are not to be construed as limitations. Each group member may be referred to and claimed individually or in any combination with other members of the group or other elements found herein. It is anticipated that one or more members of a group may be included in, or deleted from, a group for reasons of convenience and/or patentability. When any such inclusion or deletion occurs, the specification is deemed to contain the group as modified thus fulfilling the written description of all Markush groups used in the appended claims.

[0275] CE of this invention are described herein, including the best mode known to the inventors for carrying out the invention. Of course, variations on these described embodiments will become apparent to those of ordinary skill in the art upon reading the foregoing description. The inventor expects skilled artisans to employ such variations as appropriate, and the inventors intend for the invention to be practiced otherwise than specifically described herein. Thus, this invention includes all modifications and equivalents of the subject matter recited in the claims appended hereto as permitted by applicable law. Moreover, any combination of the above-described elements in all possible variations thereof is encompassed by the invention unless otherwise indicated herein or otherwise clearly contradicted by context.

[0276] Furthermore, numerous references have been made to patents, printed publications, journal articles and other written text throughout this specification (referenced materials herein). Each of the referenced materials are individually incorporated herein by reference in their entirety for their referenced teaching.

[0277] In closing, it is to be understood that the embodiments of the invention disclosed herein are illustrative of the principles of the present invention. Other modifications that may be employed are within the scope of the invention. Thus, by way of example, but not of limitation, alternative configurations of the present invention may be utilized in accordance with the teachings herein. Thus, the present invention is not limited to that precisely as shown and described.

[0278] The particulars shown herein are by way of example and for purposes of illustrative discussion of the preferred embodiments of the present invention only and are presented in the cause of providing what is believed to be the most useful and readily understood description of the principles and conceptual aspects of various embodiments of the invention. In this regard, no attempt is made to show structural details of the invention in more detail than is necessary for the fundamental understanding of the invention, the description taken with the drawings and/or examples making apparent to those skilled in the art how the several forms of the invention may be embodied in practice.

[0279] Definitions and explanations used in the present disclosure are meant and intended to be controlling in any future construction unless clearly and unambiguously modified in the following examples or when application of the meaning renders any construction meaningless or essentially meaningless. In cases where the construction of the term would render it meaningless or essentially meaningless, the definition should be taken from Webster's Dictionary, 3^{rd} Edition or a dictionary known to those of ordinary skill in the art, such as the Oxford Dictionary of Biochemistry and Molecular Biology (Ed. Anthony Smith, Oxford University Press, Oxford, (2004)).

The application's sequence listing, which the Patent Office published only in electronic form, follows.

SEQUENCE LISTING (135 sequences)

SEQ ID NO: 1 - DNA, 4108 bp, Homo sapiens
ccggccgtctatgctccaggccctctcctcgcggtgccggtgaacccgccagccgccccgatgtacagcatgatgatggagaccgacctgcactcgcccggcggcgcccaggcccccacgaacctctcgggccccgccggggcgggcggcggcgggggcggaggcgggggcggcggcggcggcgggggcgccaaggccaaccaggaccgggtcaaacggcccatgaacgccttcatggtgtggtcccgcgggcagcggcgcaagatggcccaggagaaccccaagatgcacaactcggagatcagcaagcgcctgggggccgagtggaaggtcatgtccgaggccgagaagcggccgttcatcgacgaggccaagcggctgcgcgcgctgcacatgaaggagcacccggattacaagtaccggccgcgccgcaagaccaagacgctgctcaagaaggacaagtactcgctggccggcgggctcctggcggccggcgcgggtggcggcggcgcggctgtggccatgggcgtgggcgtgggcgtgggcgcggcggccgtgggccagcgcctggagagcccaggcggcgcggcgggcggcggctacgcgcacgtcaacggctgggccaacggcgcctaccccggctcggtggcggcggcggcggcggccgcggccatgatgcaggaggcgcagctggcctacgggcagcacccgggcgcgggcggcgcgcacccgcacgcgcaccccgcgcacccgcacccgcaccacccgcacgcgcacccgcacaacccgcagcccatgcaccgctacgacatgggcgcgctgcagtacagccccatctccaactcgcagggctacatgagcgcgtcgccctcgggctacggcggcctcccctacggcgccgcggccgccgccgccgccgctgcgggcggcgcgcaccagaactcggccgtggcggcggcggcggcggcggcggccgcgtcgtcgggcgccctgggcgcgctgggctctctggtgaagtcggagcccagcggcagcccgcccgccccagcgcactcgcgggcgccgtgccccggggacctgcgcgagatgatcagcatgtacttgcccgccggcgaggggggcgacccggcggcggcagcagcggccgcggcgcagagccggctgcactcgctgccgcagcactaccagggcgcgggcgcgggcgtgaacggcacggtgcccctgacgcacatctagcgccttcgggacgccggggactctgcggcggcgacccacgagctcgcggcccgcgcccggctcccgccccgccccggcgcggcgtggcttttgtacagacgttcccacattcttgtcaaaaggaaaatactggagacgaacgccgggtgacgcgtgtcccccactcaccttccccggagaccctggcgaccgccgggcgctgacaccagacttgggttttagactgaacttcggtgttttcttgagactttttgtacagtatttatcacctacggaggaagcggaaagcgttttctttgctcgaggggacaaaaaagtcaaaacgaggcgagaggcgaagcccacttttgtataccggccggcgcgctcactttcctccgcgttgcttccggacggcgccgaccgccggagcccaagtgacgcggagctcgtcgcatttgttataaatgtagtaaggcaggtccaagcacttacaagttttttgtagttgttaccgctcttttgggttggtttgttaatttatacaaagagattaccaccaccaccccctccttcagacggcggagttatattctgggttttgtaaaactttatgtatctgagcatttccatttttttttttgggttttgtattatttcttgtaaatgcattgtgaaaaattttattttcggcgttgcaatgcggggaggagaagtcagattatgtacatagttttctaaaaagcctttcttctaaaaacgaaaaaagaccccccacccaaaatgtttcgagtcaacaaatttaagagacagagcccattttctccataaatttgtaacatgctatttttatgtgcatgttttatgagttcaaaatgcaatgaggaaatctgacagggaaattatctgtatgaactaaaagtaagggaaccccggggaatgggaggacaggatttttcaaggaacctttttcaatgaaagagaaggaagttaaaacctataggttattttgtagagctgagtgttaatacgggccgagaaataaaagtatcttctgctccggctgtttcactgcggacggctggggctgctgcgcgttaccttgctgcaagcggggcgccttccacctggctgggggtctgcgccacagtttggtccagaggagggaggaggaagggaagaccccagtggtgggaccctggaccaggccatggatgaaggacaaagaccagggcaggtcacgggtttcccaattccccagcaattaagatttcgagcagaatttatctaaatgtgtttcaaggaaacacaatcgctgaaccaaaacgtactgcagccgagccccctccgtccatcctctgcccctccccctggcttctttctcttgggaaaacgggcaaaataattgtgctggattctcacacacacagaaatatcgaccatcaccctcccccgcgtgaactgggatgcaagttgctaaccgatgtgaacgcaaaatgccttgttcattattcctgacgagatcttgaggttgtttgatgctttaaattttttaattatattattttctaggtgtttattggtacattgcagttttttttttgaaatttaaaaatttctgtaaaactttgtcttcaagtaatctgacagcattaaatattgcatttaaaaattatactgtagcaaatacatttaaaaattaatcacaacgttaagatgaaattatatttttggaaaaaaaaaacacttgaagcccagatggaaatacgtttatttcagcagccttaggtttcccctcgctttctcaacacccttccttgtcctggagtatggactgtccgtccaaaagtgagcctatgctataagtttaatgagaaccgaattcagcctgcattcgagaatagctttaagtataatgctgatctgacaattgacgtgtaatttgggaagtcattttgataattttgcttaaaccactcattcgttaaagtgattacaaaaaagttcaagaatgatgtccactgctttctaacaagataataaaccccccccctcttttctttttctttatttttatttcttttagctatttgatcctttctgaagcagttgtttctggaagagtctgtgcgcccatggatggctgagcaccactacgacttagtccgggataagggcctccccagtcctctccgggagatgatttgggaaattttataatgcttgttctgttaactcaccgggaccttgagggtccaatgggaccttgagggttttctctgaaatatacaaacttaaaggactctctctgaggttctttgactgacgtccactctcagtctggcccctgtgctcccctgtgtgtaccctggagtttctgtgtccaattgttggcatctaggtcttggctcaagattaggatgtgggccccactttagaggcacagactatgaaaagctgagttagtgcgcccgggacgccaggcaagcagcttttacagtttggcatcttattgcaggtgcttcgtgcacagtcagctgaaatagccaatgccaggtgctccaaccaccttatttccttgttttgttgattagaacaacacagaaaaaagcaaatataaatttttaatgactccatttaaaaatatcacagggtgggggcaaggaaattagctgagattcatctcaggattgagattctatccccccttccccgcccccagcagtgtcgctccaattcaaattagtggagaaaagattacagtaggccctgagccgactgtgaattcggtgcttggccaaggtaacactcatcgtattcacggagtgaaatactatatgatgatagttattatattatatgacgacttcattcacttcccaaatcacagggt

SEQ ID NO: 2 - DNA, 45872 bp, Pan troglodytes
gggggggaagaaatgttttgtgggtttagaagggaaggggggtcccgggtggaccaaaaaaggatggaagctggtgaaataggggtgcggggggataagcacccaggggggatgagattcaggcgtgagccaccacacccggccggggataaataaatactacttgatcaatatgtgttatcttttcatgaactgttaactttggctagctaatattttatttaggactattgcacttacatgtataagtgaaatgggtttatggctttcttatctagtttgagaatcaagattatatagctgtataaaattagctaggcaactgggcagcttttcttttgttcttttttattcattttctgaagcaattaatacaaaataggtattatctcacaaaaaatggtatgtgaggtaatacatatgttaattggcatgatttaactattccacaatgtaaacatattttaaaacatgttgtacataattatatataattttatttgccaattttaataaagaaataaaataagatacataccatcaaactcttgaaagttttgtaaaattccactggaaaactctgtaagctaggggctttttggtggggaggttatagcttctttttcttcagttattattttatatactgctgtaccttacaaaattaggatgatgtgaatgcataaaccatgcagaaagttacatacacatacatacacacctacacacaccccttttagaaaccagagaagaggccaggtgtggtggctcatgcctgtaatcccagcactttgggaggttgaggcgggcagatcacctgaggtcaggagttcgagaccagcctggccaacgaagtgaaaccctatccctactaaaaataccaaaattagccaggcatgatagtgggcgcctgaaatgccagctactcgggaggctgaggcatgagaattgcttgaacccaagaggcagaagttgcagtgagccaagattgtgccactgcattccagcctgggtgacacagcaagactctgtctcaaaaataaataaaataaaataaaatattaaaataattaaaatcagagaagtaatacataattattttattgactttttaatttttatggctgtataatagttttacatttctatggggtacatgtgaaattttgatgcaagcatacaatatgtaatgataaaatcaggataattggaatattaatcacctctaacatttattatatctttgtgttggaaacatgccaaatcttctagctattttgaaatatacaacaaattactgttaactataattgtcctactgtgctatcaaacgtgaaatcttattccttctatcaaactgtattttgttgtacctgttgaccaacccctccgtaacctcctccctccccactacctttcccagcctctgataaccaccattctactcagtacctccacaagagcaattttgttagctcctacatgtaaggacatgcaatatttgtctttctgtgccagacatattttacttaacataatgtcctccagctccatacatgttgctacaaatgacagtatttcatcatttttttagctaaataatattccattgtgtatatatacgccctattttctttatccattcatctgttcataggcattcaggttgattccatatctttgttattgtgaatagagctgtaataaacatgggagtacagacatcgctttgatatgttgatttatttcttttgaatatgtattcagcagtgggattgctagattgtgtggtaggttttattttttagttttttgaggaacttctatactgttttccatagtggctatactaatttacatttccaccaacagtgtatgagagttctcctttctctgcatagtcgtcagcgtttattattttatttttgctaatagtcattttaactggggtgagataatatctcattgtggttctgatttgcatttccctgatcattagggttgttaagcattttttcatatacgcattggccatttgtaagtcttatttttcagaaatgtctattcagatcttttgtccattttttaaattggattatttggtttttactattgagttgagtttcttatatattctgattattaatcccttgttggataaatagtttgcaaatattttcttccattccttaggttgtcttgatactttgttgattgttttctttactgtgtagaagtttttcagtttgatataatctcatttgtcaatttttgctttggttgcctgtgatttttaggtcttgtaagccagcggcttttttactcaagatatctttgcccagaacaatgtcctgcagaatttccccaatgatttcctctaatagttttatagtttcaggtcttacatttaaatatttaatccattttgatttgacttttgtgtatggtgagagagaggtctcatttcatttatttgcatatggatatacagttttcccagtaccatttattgcagactgtcctttccacaatgtacattccttggtgcctttgttgaaaatgagtttgccataaatgcgtagatttatttctgggttctttattatgttccaatggtccatgtgtcggttttcatgccagtaccaagctatgttggttactatggctttgtttttaaattcacataatccagtttgtgccacatatcttccatttaccaatccagacccttgccttccctgttctgcctcagaagcatgtatatatgtatatacatgttcccttgagagctagctttcaactgtgttagaccaatctccaacaagaaatccaagaaacaggggagtgcggtcaggatatgtacgtccctagttcccttcctggaagtcccttcagacttgttgtttccttgaccagagtcagaagcctggccaaggaagcagcctctaccacttggctatataatagttgtgcttgtctgtggggtacatgtggtcctccctctaccactcattctctctgagttccaaatattgcctcctctgctcatctatttggacctagggatgttaacttctgctattcctggcactgggatactacattatcttttgtggtttccctgcactttgcctacatattcgtaaatagtttctttactaagcccttgttaggtttagtaaaacctagaattatctcagtttgaatatgccatctgtttcctcctgggaccttgactaacatacctgactagtagagagaaaatctgacactgccacttccccaccacacacactcttccagtttaatgattactaatagttttgtgtgtgaatgccttcaaacacagaacattatttgtgagacatataacaccaaagacatatggaagaaacatagacaatgtttttaacatgagaacttttttgaaaaagtgaaaatttctggttgctactgaccatgcctcattttgtaaattcctttcctgatccctataacccttcacaattttagtattcctttgatctttttgatgactcattgtctccccttatgggcttatcttcttaaatgtaggtgtctgggttctccatttttctcttctctcaccatcccccttctctctctctttgagattttatttccttgaatagcttaaattattgtcactatgccaaagattccaaaatctctacctccagccctgacctatctcccaaattcatccattttcattactctctgaaagctatccccaacttgaacattctaacagtaattcaaatacaacaggatcaaaaccaaattcatatatttcccactaaactagttcttccacctgactttcccatttctattctcaacacccccaatctcctcttctcagcccaaaattttggtgccatacttgactcctgtttgttgcttttcatcactcctatttaggacactccaatagctacactattcatccagtattcatcttctcctttcaattgccacagccaaaatccaatataatattctcatcccagaatttcataacaccctcccaactcagcttcccagagctagtttttcctccccttacacctagccatctaacagattgacagcctgatcttcccccaaaatacaatatttctattctctgatttaaaaaataactgcccagtgttccctgaatttaagtctagacttcatggtctgtatataaatgtctctactatgtgacctcaacctatgcaagcccccatcccagtatgtcccccaggttccagtcaagaaaacttaactagcacatcatactgttttctctgcttatcaaaccttccacacatctccgcagatttacattcttcaaggtccaactcaaatcttacctccctaatgtgcttttcgtaagactttaattatattctgctttacaatacattatttttgtattgtcatcttatataccagattcaaagttctctgagagcagggactatttcttactcattttttttcctcacagcacctatataagcccccttcacataatccgtgatcaataaatattcattgaataaattaataaatgaaaaatcatcagaaatatctcatttttaataaagatctggaagacatttcctttgtttcttaggatttttttctttttagatgcatgcatagctatattctgtagcatctgtttatttttagactttttaaaggttttagattctgtaaaatatgtacagaatattccgttcaacatagggtgtgagattgatcacagcatgacccataattgtataatttctaatcaaaagtaagtgtgactttggcataagccaaactttaagaggaagtaagagtagaataaaaattctcggccgggcgcggtggctcacgcctgtaatcccagcactttgggaggccaaggcgggcggatcacgaggtcaggagatcgagaccatcctggctaacacagtgaaaccccgtctctactaaaaatacaaaaaaattagccgggcttggtggcgggcgcctgtcccagctactcaggaggctgaggcaggagaatggcgtgaacccgggaggcggagcttgcagtgagccgagatagcgccactgtgctccagcctgggcaacagagtgaaactccgtctcaaaaaacaaacaaacaaacaaacaaacaaacaaacaaaaaacctcagtctattgggccttttactgaagtacttcttgtggttacttcctccttaaatacaccatccgaatctatcttaacaaaactatgttaattgtatttttacaaataatcagtgaaaataaaaaataaatatgatacttctggatatcagaagttgaacatattgagtaaccagctcatcttagaagctaatctatgaagtattatgtataaaataaaaaagatgtgttgttaaagatagagatagagtgacacaggtggctgagtagatctgttttctacttccatatgaagaaaagcttaaacatgtttgtttatttattccttcattcattcataatcctatactatgtgccaagcactatgttaggcatgagggatatcataaagcataaatgtatgatcccttctttaaagagaagaaagaactacaaacaaacgataggaaaataattcaaatgtaaagtttgttccaggcatagcagtagcacagaggagaaaaaaacttgtgacagtttcatccttgaatggcttcactaatctagctttctataacttactgtaaaatatcacccactggacaaagccaggaagaaagaacatattataagacttaagtatttgaataatttataatggtttcattgcttggaaaacttcaattcattttggcaacatatgagatcactggtctcaatgtggaagataaagcatacagcattgcagggcctgaaaaagaatatccaattgtaattacagtattttaaaagggaatgctagtcattattattttcagtggtcaggactgaaaatgcttgtttacttcaagttttagcagcatatttacctaccttagatttgttatctctgagctaaacaaaccattttaatttcaagcaaagccacaaagcattatttctcaaaatatacatttaattaatagcttatttgctttcttctcacttgactgtgagtttcatctaggacagaaattatttcttattgatctttacatttcatgcctaagcataattcctggcacacagcagacaatacttgttaatagaaatacttgttaaatagttgttaaaagaaaaatgtaaatgtagacctttagctccttaccaactgtcgatattcaagtgttctagtgcccatgatttgcaaccttttcttgtttttttctcctgataagatcaggcaaaggagaaggatttccaaatagcctgatagtgtatcagtgtttcaaaaagttaaagccccaagacttaccagggaactttaattctcataaaaagaaaataaaccttatattaacctttacgtgtaaactcaaaatggtgcactccctgaaagtattcctcttgttagatatttacgagatacctttgcaaatagaaaactgcagacatgacccctaagcttcatgtaaaatgactgtatttattatttttattttgatcttcacttttgcagtagttgctgtaaatggcttggaacatgcaaaatatgctaaacaagaaacctagcccctacctgaagagttagccgttgaaaggcacaaagaagtacaatggatataaaagcctcttgaagaacagccttttgctgcatagatgctaggcaagacagtatgtggcaggaaaagagttggggaaactgctttaaaaacctattaactaggaatgtgaaaagcaaggaacaattgggaaaggagggaggtgctcactgtttaaaagccttttaaaggtgaccatatttttgttggctttttgcctgcaacataaaatgaggatgatgtactgaatggctagctggctggtgaaggtagaatgaatggcctgggctaggaagtcaaggctgaattttgagatgctactctggactatgtgcagctgttgaaacaattctcagcaatgaccacttagactttgaagtaaagacaaaattcagtcagcctcctcaatcaccctttcatttttgtgtgtttttctcggtctcataaatatttgcctgtgctgcctttgctgcagatattaaggagttaataaattagacagccaacaagcaggaattgggaaaagccacagaacttagaattgaacagctgacagcagattctgcaggtgcaagatgggaatcagctctgcattttctatgtagcacagttttctctgcctggcctgtggcctgatttcctggcctctttgggataagctgaattataagacagagaattccagaagatctagctctgtgatcctatgaactctagcgcttcaaaaggaagcaatctccttctatgtttagactgacaatattacatattggtggcagccttgtaagattttggtttcacgttaggaaagaaaaatgctctaaatgccatcctacttaaagaaaaaatggttgattaaactgcactgcataacaaattagcctcctgcaattgggtgtctaggaatgtgtagtgtgtgtgtgtgtgtgtgtgtgtgtgttgtgtatgttaaagggaatcactacttattaaatatataagtaccacagtgaatattaaggtcataatagggtatgggaaaggagagaaatgggctgcattcaagtgcatatttctaatcaactacttttttgtattcttctaatcattgtatttgatagtaatggacattcaaggctaaactctgcattgtggcagttcttccaaatctttttggctctatagtggtaaaaatattaattccattacacttgaaaatgtccaatatgatcccttgattaacaaaacattccggtgtttcttctgtgaaggactttgggctgcctgcaaggatgatggtaggagtggctgattgaattgataataggaaaattaatttttttccatgctggtgaatatggcctacacatccaaacccttttgacaaaactattttgaggaatatatttgtaataaggacagaaaaacttggagatctgggatttttttttacctaaatggactccaggaaggacagataaatacctctagttagcaacagttaaaatgggagctaataccaactattaattcccagtttggatcttctctttctctcaggactactttaagtccccaaaattccatgcttccaatttccccttctacaactgaagatcctatgatttaaatcataaaagattagctatatttggacactggccttgtattagtttgacagaaaattctgaaaagatctccccattccaaaaatgtctttctcagactttttgtggagacctaaaattccaccactagaaattttaatatttagagtaatgctgtgtcccttactgacaaattcaatttcaaaacacagtaaaattaaataaacataaaaataaatgtattaaataaatataatttttaagtatttgtgggccaaagatcaggagggaatatagaaatgttatttgtggcgtgaaggtagtagtattacagattacatcttcattttataatttctctttactatgctgatataaacatcaatagggaaaaaaatagtgttacttttgaaggctcaattctacctgaccactgtatctctagctagtggaacttaaaatataagtcaccaaaattttaaaataaaaaaattaaagaatactctcacttagtgatttacaactagatttagggagaaaaaaacaaaactcgacaaatattcacttaaaagttaatgagtatttgctatggagaaggcattttgttgagtgatacagaggatacaaaaatgaccaagatctgcaacccccctctttcaaaagcttatggcataaggctagtaactttgaagaaaaagcacattgttatcagtcatcagtatattttggtgaatccatctactagccatttgtttcagattttgaaaagctgaaggatggggcaagcctaggatactacctaggaaagatcagcctggattaagacacttaatgaaagaagatgagggaagtaggcacaagccgggggaggcgatagcacaaaagagggtagaagatgagagcacgctgactgcaaactgtgtgtgtttcagagggtggatttcctagctctgacttctagcaaataattttcacaatgtaaagtggaccctaacaacgtaatattcctctcaatccaagagtgccaagcaatcaaggagagagatttacagacagtgtactttcaaattcacaatgcaaactctaaagtaatatgtattttcttataagcttaactttagtaaagaatgatttttgaagttcactcaaatatctaatatttgcagatatccttatttcattactttgctccaaatatttaaaaccagatgaaaaaaagtaatgtccttaaggagtcaaattcattattaaaataagatattttccaagttgtttggaaaatggtttactttctttttttccccctttactagacctcaaaatacattgagttttcctcactggtaaagaaatacaacattgagaagtatcaagtgaatccatttgaacaggcttcaaaaccataccactaacgtattattttaaaatgtttctctaagacgcatttattacaagggaacactctttaggaagcattaacactcacagtccctaaattttaaattggtccctaatattccatttggtaatcaatatcctcctttgctcctcccccaccctctcagatggccttattctctgtcagtatctatcacattttcttttttcttttcctttttttttttttttgtcaccttcttcattcttaatccttccttttgggccaagctgtctgccctttgtagctatatttacttcctccttctctttcccctttaactctttgtagacctttagattatgaatgctgaaatttgtgattcattgtttttgccatattgacctcctattaataaaatttgcctcctccacaagattattctaagaaagcatacttttaagcatccacaactattgcccaaagagagacaaccatttggttcaacttcatatgtgttaagccaaatatattcaaaaatgatttcctactccgattcttattcagtattttctgtgattctcctttattatacctttctagtgcaatggaaacttcagctatctgtggtctagtctgaactgtacatggggtagtgacaatggccttctgaccctatggctcttcctggctgtggatagaattgatagcacttttccaatttctcccttgtctttgcttgaacatactggaattacaacctctgacaaaggtaacatcccttttgtagtggaaacaaaaggggtgtgtaatgaattggttaagattacattgcatgtttagatgatgaaatccaactgcagctcaattcctttatttcctctccctggacctggtctttcaataagacattattgactggcatcttccccagaacaggtgcttaggaatatagtcttgctgctttgagtcctttagactggaaaacaactatggaataggtcaagagaatcaggtatgagacaataatgcccagtaccttaggacatgcactgtagatgattcatatccaggtggtattaatggaataaagggtccttagacttatatggggagctagcgcttttcaaattaactaaggtggaaggatatgagttacaggtttatttgccatttttctgcaaaaattctatgaccaggaggagatagaggaggaaggcaatttttaacataattcaccactatagattgtgctataattatattataaaaggaatttttaatttttatgaagatgaaatcaatgccacagtgtgtggtattaacaaatgctatctttttaccacaaatcatatcacctttggttactctggatagcaaattattggcctctttcttctttttcccttaaattactttggcttgtggtttgtctttttttttatttttcaaaaacaagatcgcttacaatttttgcttttaaaaatgatataatacccatattggctgcagaaaatatttaaaatgtgtgcttttcaaagaatgatcagatcatttattcatctttagataaagatgattatattcatctcaattatttttgccaaggactgtaacactaattttactctttctaaaaattaaaatagcaaacagtttatataaggtgttgataattacctatattattgtactgctgtgacagatgttggcaaaaaagcctaaaatgcctacagctgtgcactccatgccatctagtttatactcagacagaaggctaacagatgttctgaactgtcactttgcctaaatgtttttaaagtctaaggacctgctttataattcgccggagtctggtttggtttcacagaggttctcagaattcccatctgtgacaattaatgctgaagacattgataaatcaacccttgtgttttctctcttctttaacaaacagacatcagtttatacatggatggtagattgtgaaggctgtttttatatacatcctgtttgtaaaattatctccttaaacacagatagaattgggctataagaatacgtggaggtttgttttgagccatggaaagggccaggaaatcacctattattttctttctgctaaattttatgcaccttggaagtaaaatgttaaccatttccaatgacaattttccaaagttatatttgttctagtgaataaaaaaagtttttatttttattcagcatgttaacagttctgctcataacaataactcttaattgtgcagcctgttagaaaaatgaaagaagacaataaatggcattgagaaagtacacagcacatcttctccagcttgacaccctaatacttcctcttcccaaacataccttcagatccctcatacagaattactgccccgtgcaaaggccatcaatgccttatttgctgttgctcttaattttaacaagctggattcctgtagtacacttgcttaatagtttaaacattctgttaacaatcaggtgtttggcctatcctgtttctcctctattctgtaaagaaatataactccaaatagtacatctttctgggtttgtttctaaattagtccccacacttaattatgaggatgagagggatgccttattcctctttgttataggctaagctctcagtaatcccaaacaaaagagccagttctggaagatacaggatttgctagcaggattatggtctcatagataatgatgtgcagtcagcagaagcgaagctttattttaattcaaataagctagtaaacaaaccactgacaagtctgctggtgagagtaactggctgctgttgccacattggcagcaaaattatagaaaatctattataccctgttcaccatatgtttaatttaatacaagatacaaattaaactattcacagtgcctattaaaataacaatacttttttatatttgaatgttttaaaataatttctactgaccttttaaagggcagttttgatataggtgactatcaggggtggagggaggtagttaataaaagtcaaaaaattgtaattgccttcctgaaaaaataaaagtataaatgttcactggtttgcagatgttaataaggttaattagcagtcatgtgttctgctactactatatttccctcccatcctttgggtttctgaggctagagttttaagagtgatacttagtttgacctatgtgagtctgtcctcatgaaatcattacctggatcaagccagcctatgggtagccttagaactaacgccaattgagacctataatctgaaaattgagtttaaactctaggcccaactttggtatggaaaaaggcacagacttttatattattgctttcagtcaatttctccgtagccaaaagatcctaaggggagccagaattaagaggctttcttccagagacaggagagaagaaaaagacaagcccacaacaaatttgtttataacaaatttttctcttgtacccacaacagtcggcaaccagtgatgcttgcttgagtctatggggactcagtctaccagattctaaagaccagactgggttttaaagttatagagctagatttgaaacccatatctattatttcccagctgtgaaaccacagatctttaacctagctggatcttcctttattctgtaatgaggggacgttggggtgaggggaagtataataattccaattttatagtattattatgagaagtaaataagagaaagtatctggtacataatagatactcattaaagattggttcctttcctctttcactctcaagcaaatagacatgttgccctttcttcaaaggtgaagggagagtgttaggaggaggagctggagggggagatatgaacaaaaattcgtggaatcaatttctttggatcattaattcctttctacctccaaaacccaaaatggcattctccttttctctcaaaattcaccataatacttactctctttaagactgtattggtaagccacccaaaccagctccctattgttgggcatatgaattagaaaaataaaatataaccattgcactttgagatatcttttccaacttttatgtacagattttgcactgagtctacaattgtgttcatggggttgcctcatgtgaattttggttcagagaatagaagtctagcagatccaactacgtactggtaattacaatatgcataaggtgtacacttggaaaatggccttagtttcaattgttcttgaagtccaacagatgatattaatattttacccaaaaaactagtaaatttatctcagattgatgcaagaagcgattttcaaagcatggtcctggtaaggatatgccagagaaacaccagacaaatatccatggtcccttcccctctctccagtaacctgttattcagaggttgagagatcagagatatttccatttattgaaacactggatatatcgttaaattaagaaactggaaaaaaaaagggtgacaaaatttgtggcatattttaagtgtttagcattttaaaattaatacttttaacacatgaagacaaaacacgattgtacgtataacttcattttgtatataacaaaggaatttaaatggatttaaaggctctccacaggccttgcttctacctctaaatttccacttagttacatccttctctagtccctgttgtcaggtcccagagcataaaacagactgagggagcctcagagctccagaagtgtgagaagggtgagaaggcaggccatgctggctaggtacatggccacttagcagacaggccgccaagcgagcctgcactgtcaccttccccacctcaggtttccaggtccgtggctcctgacctgagagccgctctcctctgagagggtctcccagtcccttgctggcccaatctcggttcctgactttccacccccgaaccctccccgctctccagggaaccacgatccagccctccagagaggttctcctgggctcgccgtttcgcccacggggtacggggaacgaacccaactggacacactgtgcacccggaaaaacagacggttccaaattcatttccgcatttgagtctagagtcagcaagatcttggccgcccgcctgcgcctcggagcagcccacgagccggtgaaggcgcgtggggaaggggggcctggaaagcccgggcttcgactcactgggccagtaccgctccgaggaggggcctcagcctccttcggagccagggccgcgcccgagccgcgctaggccagggggccggacgcgcacggaagggggctggcggacacggccgggtggtggcgcagttcctgggggcacagggcagtccagcccgccggcccgcgcctccgcttccccactccagcgaaactggacaaggccgacccacccagccgggcccgatccctcaagacactttcggcctccgcccccgtgtctcctcgggtttccacagacccagggaaggacagaggcggcgagcaggctgacaagtttattctagaggctttgaaaaatgaggtttccaggtctcttcgcacgcgcgcgcgcgcgttctcgggctaaaggttcgaagctagagtttgaatttaagccacgtcctgggacaggtcgcgttcagcgtgggcgtcggccccgccgcggccccaggcctcttcgaagtgcgcgtcaagtggggtgtcgggtcgttttgttgtttcactaagtgaataattcaatcgtgttaggccagattacatgctcataatacccgggtgtatttaaaagcacccgcgtttctaaacctcccgcagaaagtgggaagcaatcgccccctcggacctggcgccgctgcgcctgctggagcctcgcttccccacagtcgggcggccagtggagggcgaggagcgcgcgcgtcacgagaggcggccccggcctcccagagcccgcaccgggaggccgagggctcgggactcgagccgtctgagtccgatttctttccacgtgcagagggtagaaagtcagggcgtgattgattgcttaaggaaagagaagctacagctttcacggtagttgataactaaagcatgacatgatgccatctgtgtgaaactcgtgatgtgtgtggtcattggctccctggaacatccagaccctgatcgtgcgtatcgtgtttccttataagcagcactcgcgatttaaaaacaggtcccggtgcccctcttgctgatcctctctgccattagcccgcttaattccctttttgtaaattcccctctttacctttctttcgtccctccctccctctctttcttctttcctcctctccttttcccctttctctttttcttcctcaatctaggtcgtttctgctgaatgatatttattcaccgaagtcccaatctgagggtgaggggaaaaccccaccctccacatctccccagctaggcttgcgcttgtaaaatatggggttcagctttggctccagagcgcttttgaacagtaaagtttccaattcagagccacctctaaataaatgcccataaatttcccaaccccgtgagaaagccatttctacaacccagcatcgtctgggtgatgtgtgtttgttccaactagagaggcactggtcagtcacctcagtttctgccctctggatacagaaagtgcttttgtttgtgttttttttggtttgtttattgtttgttttttttaaagcagctttccagttgtagactactggttcctgattccctcatctatcaagacagtttgtcagtttggccctgcaccttgcgtttcacattctacgttttttagttaaacgttgaagcctttccctatgtcagatgggatgtcattgcattacagtttttgagacaacttttgctgacttgcctaaaaaaatatgtcgtcctgatctcccacaggagagcgaggtcaactgagggatttttcagctttcttatggctgggattgaatagatccaagtaataagatatctcaggtttcctcacctttagtcaccttgggctactcatggatgcactcctatcttacagtcttagattcagcccaaaacccctcagtggaaagaagacagcagttcagattcttctttcaggttgttgtaaaaaaaaaaaaaaaggaaatggctttttttcagttaggagcatcctttgtaagttttgatatccaaaaaatacatatgacacaagaagcaggaagagatcttcagttattccagtggattacttttttatgaaaacactggctaaaacattttacattcacccttcctcattccacttttagttggaagaagtttctaatattgatttaattttgtataaggcccctaccctctcctacaataccattaagtaacaagttcacccaccttagccttttctggtgaaagtcactcttgatttactctcttcacttcccttctatccccaatgcactcatacttttacagacacatttttcttgatccagagagtattgggaggtacataactttttagtattgtcttgactttcattcttttctaactgagattggactctttatcctgtgatacaaaatgaatttttgagaaacaaccatgggaaaaattacttaattttctgttttgatgtatttgtttttcaagcttcataggaaaggctttagttggtgtttaaatgatagtccatgaaaattccttattagatgactccagaccaattgtaaaccaataacataattgtttccaaaagggaaagtggaagttgagatcagttagtcgagggattcatttgagtgtgtttatctttaaaatggtttatgagaagaaagggagaaatgaactgggtggaggacagaggtagagaatccagtgaaaacatgtttttaagattaaagccatttttccacattattgtcttgccacaagtgacaacacagagcaggagtcatgaaagtggattactgtcactctgggctattggaggcccagagagccctggcattaattcctatagaaaggtagacaaacctagtcagtaactaacactgtcccccacagcgccctcactgccaagtgttcaggctctctcagagttgatacagacctcggggggtctaggtggcagggcttcccttgtgagaggaagcggaggctctctgtggaactgagagggaggaagccaggtggctgtaagagcaagcctgaggggatagggtgctgtaataggaaggctgtggccaccagtccctcacatggctgcaattagtgagtcaaagctagctaatgatgaatcaaaaagagccaagagtaggaccttctgggtgctaaagactaacctttagcttgttccactcctcccactgggctcccatcctaggttttccaggactggagaccttactggaggaaagggcaagtatgttaagaaaacatgcctagcccctgtctagcatgcgcatactggcggggtcttgcagagatggggagaaacaccttgggatgaaagaagccctcagtgatctgtgtgtctggctcatacagttgtgcacggccaaccagagagtgggggagaggaaagcctcattttttttcagtcactctatctggggttgcttatctcctctcccgcaaccctctgcctcaccccaccaggaccaaatagaattgaaacttcattgcctttgcctgtactgagcctaaaaactcagggtttgataaggttactgcaccaatgatacaattgtagatttttaaaagcctcctcaaagagacagatgtttgggctgattaagaattgaggaggaaacctgcagctgcaccaaggaataatctattggacaaatattttaataaaaaaatatgaagagatcagcccgaccttgcaaggtcttctgctttaaaaaaatctttatcaaacccctattctatggcttcaataaacagaacccattacctcacggcatcttttgttggccccatacaagagagaacaaaatggttattcaggggaacgctttcgatttttattgtgggtagcctgcacaaagagccgtgttattgtatttaaaagaaccatctgtagcagaaacaatggcatcaaattatctttgaatacccactgaaaaaacataaagcttttttttttattcttcttctgtacggtggggggatagagcagtgttaggataactgacttttttgttgttctctgggtgcattcttctcgctccccctctctctccccctcaccctctctctcttctctctctccctctccctctctctctctctctctcttttaaaaaatcagccatttggggttttaagccataaacgatttttcttgttgcaggggattgcagtggcaaagctaggctaggtcttggaggctggtgtaaggcgatgcgggtgaaggcaggaggctgatggagagactggggggaagaaaagccgaaatggattcacggtgccttggatgaaggacgagaggggaactgcaagctccttcaactggttctgtccggtgagaagtgatcaagcttgggctgacaagaggctcagggagccctcacgttctttcgcttttttacctgccaatcaaactgctacaagacaacaccctgatctggcatggacatgtaagtagcttgcaacccaactttgacattcactgctagctcactcctccccccacctcactttcttccccactcattctgtttttctttctttctttttttttcttttgacctttaagagatctggaaatacaccctgtgtggcagtcatttaacactggtagatttaagtctgaaagcgttaacttttggaattaaattctaatttagatttaacaaatgcagaaatgaaatgacattatttcattctattttggacggttttggtactgaacttaatcagttgtcttacaagggtgtgtttcttttactatgaaactgaagaaatagatctgtgagcccccagaaagaaacccactaatgaaaaattcaggcttccatcgtaaaaatgttaaactctagcatttcacccccataaagaacctcttccagaccaatgttactaaatggaaagagtgatttgattcaaaaggtacatatcattaaggggttgctactacttcaatcggcgtcttaactattttggtggtggttacgggtaggggcaagttgcaaaacaagaggaaggggacatggcgatacctcgttttttataagagattgacatagaggaagatagaaatgcatgggggcagaataagcaggaaatattacctgagagaaggaattacagagcatggcgaagctggaaggtgggagggtttctgcgggaagtcgagcgaggggtgacggggcttgctctttggcgccctctaatggcaacttgaaccaatgttttactttcgtaatgcagtactgggaaaagcagctgggtttttgttattgctgttggtttttttcctccgcagacttagaaactagagactattagtggagtaaattgattgttttcagcctaggaacttatatatatatgtcttaaactcaccagtgtttcctcctcaaacatcccctcctctccctaaatcttgttagactaatagaagaggacaggctaatggcaaattgacttatggagggtggtccacgcccaattagccattgcgggcgggggagagggtgtaggattcgtttcctacctgaacagcattctgactcttctaacatactcgagaggtgtagggggtggagtaggaagggatgatttggaaattgcagattctgacacgggctcattataatacacttttaagggggctcttgggaacctctgttattgcgacatgtggtggtcagggggctttccttcccgccttctttttcttttttctttttcttctttctttccttcttttttcttttctttttttttaatttgatagataaaggttaatcttgggctgaatgatagagctatgattgacaagagaaaaggtgttgagggcaggtcgcgctgtcttatttacagcccactgcttgctgtagagtctttgttaggactggaaagctaatttagtgctgatcaaaagcaccacagagttaaaggactggtaatgactgctaatttcatttcagcctcatgcatccccaactgctgtaattaaagacacgctatttaaatacaggtgaagggtttttttttttttttaagttgggtgggggggggggtgggtggattacaattttatttagatcttttcttctactctacttgggtgttatgtagtcccaaattagattttattattattattatttagagccgctccttgtcatttatacctggctttgcagaatcggaagtgtgaaatgtgtcactcacataaaagcccctgtttaaagaaagggtggggcgggggagtgcagaggagtaactatttaggggtgatttaaatatttaggtctcctttttttctccttcaaattaatagaaaggccttctatatagttaaaagtatttgaaactgggggcaaggttaacaggccaaagggatcagtgtcagctttttaagtacttctaaaaagatcatgtgaacagatggaaaaatatatttttaattaaataatttcccccacactatagctgcagtgttggctcagaaaccgtgtaatttctcatccgataggagtttctttatgagaacatcaaaggataaaaagctctgcattttcgtagttggttaaaattgataaccacccccccatgcgcgcgcgcgcgcacacacatacacacacacacatacacatatacacacacacaccccaacacacacacacacacacacacacacacacacacacacacacatacatatacccaaaaaagaatttagcctttaatctctttttatccacgaagactaaagctctgtactcgaccccgcgagcggctctcgccttccggggctggaacccgactcagatgtgaagcggcactgagccgctgcgcaggttcgtgcccagcgccccctgttggacacagtaggagctgcgcagcgccagtcccggaaatcgctggaatcctgctctggggttagagaaaactctttattgccctccaaaaaagaaacgggatgcgaaaacaaatttttatatccttgaaaaataatataatattaactcaataaaaaactaaagaggcgatactacaattttaattcaataaaaaataaagactgtcctcctcacatcccagccatcccccacccggtttggttttgtaactcttttgaaaggttctgcgatggtaaaacaggtaaagaaaagtgacgaaaaacaaagcatttttctgtagccgtggagaatcaagcaaagtatacttcctccgttttgtccacatttcaaaaaattaaacggaagatgctgctgcttgctgttttgacgttgtcagcagcgtcttgaatgccctcagaggtcctgcaagtatcgtaactgagccttcgagtaaacgaaataacttgcttctatgtgtttatttccagagtataattaaaagaccagtctcttctttgagtgtttcccatcccccagaccaatcctggtcaaagtttttccttcccagatactggctaagaaacacatactggctaagaaacaggtgcctggtatcttttttctttcatcttagccgtaggatttcggggaaggtgtgccaatggtagggaaggttttctttgaaattcagcatttcgttgaccaggaatccaaattatcctagggaagggggagtatttttacacttccaaaaaactacctgcctacataataaagagctttgccttttttattattattatttcttcttcttctttttggtcagcaagtgagggcaaaagtagcctttgaattatttcagaaagagaaactgtaaaaatggcacatcctctgaatttaaaacaatagggaaatgtgggtttgcttaattgtttaaaatcaaatagaaataattactgtgctaaatgaacaagatgttttaagatttacgtcttcagggttatggttattgattttaactttacccttaagaagtttagagatcgcgttttttaaagtttgcttattgacggaaatcggcttaatttttcataaaagaatggctttttaaaatattgaatactatggctatgcaaggtttatgatacctttatgtttattcttcccacctcccaaaattagcgaattcgagataacatttcaaggggaattgctatttagtgcgatgagagatgacttctccatctggttccagaattagatctcggcttaggttttttagtcagtaggttcagatgcaatggcaggagagaagaatcaagccttttgataaaatctctaccccgaattctatcgaaaagacaggcaagcgggattccagccacagcacccccaccttttgctctaccaaaaggcttgtccccattacagaaacaatatagtcggtgctagttttgtgaacccgcgccaaccggtaaggtaagaaacggtgcgctgacagccgaggtccgaaggctgctcagtggttcccgcagcccgtggggtagggaggccaaagccagcaaaatgttggaggcgacgccagaaagagagtatatgcctgctattcggaagtgatgtcgaacgtgcaatagcagagtcctggagatttccaccccgttccgcacccagggatcccagcctgtggggtagcaggttgttgggtgaaggcaggagggagaagccgcacctggctgagggcgggtgggcgtgccgggagcgagtgcccaactttctagggcccatggagaaagcataacccctagttgaggaaagagagctaaacaagtgggtggcccaggcctgggaatgccacccagctctcccgacgcagtgttatttctgtggtcccagggggccccagcacctgcccgaatcccactccccaaggccgccagcaggaaggcagcccctccatctttgagggctgaggagggggcagcgagtgactgattccttagtagcagggaaaaccgcagcggctggcaacgggccgcgtttctccgcggcggcaaagcgccctttaggggcggggcgggcatttttggtctcctgtcccagcgtccaggcctgagcccgcgcgggttggctgggcgccctgctttgtaagtaaccaatcttgctggattctgaggactatccaggcggatgggcccacttagcttaggcccactgagaccctgccaactcctcagacccttttccccttcatccctcacacctttcatgatgaacccaggaaagaacccgaactctgaaaaacaggacatgtagtttgaagtttgatagttatttgggtgtgagggacatgactctattaataaagactaagattcaaggctgagctctcatttattaaatttgctctttcactctgtttttaaactctggagatctttcagtttcgttgctccaaccctgacacagacaaaggcgccagggagaaagcccaggcgggcttgaagcagttgaggtatagactgatactcatctctccatcactcagacgggcagataagcactgccagactgggggtcctaatccagggcccagcggctacgtgggttgctgcggggtgttgaaaccacaagtacaacttgacaccattgagcccacggtgcttgtcaataatctgtgaattaggtgcagagattgtcactgtagatcataacagtttctgaaggactcattacagcctatcgtgtcaatgatcttcaaattaaggagggggggggtggggcgagacgaaaaaggagtggggagagccggcaaaaagggaagaagggtgggagggaagataaaagtcagagccccagctccgaaggagcctttaaagattatcaggccagcgatctgagaattccattgggatgggtttggaaacccaactccatctgagccaggactggaagaggggcgctgggggcaagcagaagtgggcccctgggaaggccgacttctcaggcatttcttttgaggccggaatagcttttgggagagggttctagatgtcaatgggaggccttgaggatgccagcccgcccaggatgggtgtacactttgatttagagcactttccagggcaagccgcagctgcagatctttgaaaaaagtggtaatagtttcgtttagggatgatggtgattgtaggatgacttttttttccaatggtttgctttaacttcttttcatgccacaggtgaaagctttcttccttttcctctgatagtattcctgtctgtccctcacatgttacgtagatctaatttctttccccaacttgtttttttgggtgccaaacacatcagccctctgagatttttatcacttttgtggtttgtattgagtccaactgtacttctggaaagggaacttgtggataacacagtagcagtatgttccataagattccagaagaaagaagactaaattccatttatgcggtgtggcaggggccaggctaagggaaagaggttttccctgcttggtaaattgtccttgcagtgaaagggtagcccagccttcactggagtgtcatttaatactggctagagaaaggttaaggaaagtgtaggtttgtttttcccacaaaagttgtggtcacaactaaacgaagtaatcacagttggagaatttaaaacaactgttttttctctaaaatgagggtaataaccctagccactggaaaattgggattctaaggaaaaccttttcctttggtataattaattgcataagatagtgtggtcaatcagagacatatgtatttagactcaagcaatgatttacaggtgtaaaaggtccagtggctttttgggctacctggagttcctactgatcattttgccttttaaaaaattttcttctaattttaaaaataaaagtcatagatttaatgcaactgaaaaccactggtggcagctcttcaggttttcagtttatgtttttaaaagggaatttatatttaaaataattaaatcatttaatggtcacactacattttctcctggacaacagctgtagtgcagggatagaatcttaacttatgttaaaattgcttgataattcagaaatggaaatgaaattgtgaattaatttctccagaaaatatttgagctagaatataagaaggatgttcatatataatactgtaagtaacatgatgattattatatgcagcttgaaagacctacacaaatgattatatactacttctgttgctataatttaaagtaaggggaaatatatttagttttataactattgaattcttttcaaaatgtatttatttcatcaatgagcattagatgaaagagaatgagtaaaaaggggagctgaatgcaaagctgttctgcattccttaggtttcaagggtacttacagctcttgagtgaaattatttggtgaaattgggtctggactgaaacagcaattgttatcccttgttcatttgttaagtgtaataccacttctggaaattaaaggcaaggtgctgaagggacagacaagaagaaaaaaatatgattaagcaatttgaaattgccaatgtaccatgcagccatatgcatatctctatcttagtaaatagaaagggatagagatatatgtttattctttttatcatctggaaacattcattatagttactgtcactaatccttcacacttccaaaatctgacaagtttgacataggaaaaaaatggggaaaatgtagatgaaagagtttctatcattttgaaaattgtgttataaaaattaaggtgtctatcccctctaggaattcctatgagggatccttcacagtctaaaggaaatgaagtttgacaatggtacaattcagttttgaatttttgctcttactttctatatcctaaccttttccagcttatttcttgtggattgtttttggaaagtatgcaatgctcttttaagggaaaaaaaaatcttctaatgcacttatttaccttcatttatatgtgtttgtttctgaaatgaagaatcaagctttggtcattctggaagtcgtgtagcatgctccaatttgaagtgactgagatcttttgtgacttacagaggagaaggaaatgttttaaaaattggcttatgccagtctccttactctgaaattctcaactttcttgtattacaggataaatataaatatcatctcaccaaattgtaccagcattgtcctaaacatttaaattttcctttatttttggcctttaaaattagaaaattttctccagttgctgtacttagctttttaattttgttttcttctcacttaccagactactggtatgatctctttcactgcagtatgattgctgctatggtcacttttagaggagattgtgggaaggttaggattcggaggaaacatgacaaaaaagggaagaaaaaaaaaccttcatttgaccacatctggctgcttgtatatttaaccagttctagaattagaaaacctttctgtacattttcttctatttttctcacttttttccttacataatgaaattaaaacttttggagcccacagttgacatttttcagaaaattgagttatcaaggcagtaattatttcacggggagataaaactctcatagccctaactgtcaaatagggcccttttcagattttaattacaaaataaaattagtctgctcttcctcagaatggtttgtgagtggttaaacagagctttcccccaatactggtggtcgtcaaactctgctaattagcaatgctgagaaattccagttaacaaggacattctccaagactctgcaggttccctgccgtttgccttcatttccataagaagattaagagaggaggggaacacactcaaatgcagatgcagaaaagaagcgttttttaacaagcatcataatagtaagatgcttggctagttctcacctaattactgcaagttaaacctctatttgacactaagaagaaaaaataagtctacagtcccctgtctccacaaaattgttagttggtttcagatataatacttgaggagtgctgaggagactttaggagagaaaaatcaatgtgcaagattttgaaataaaattgagttacacttaacagttaaggccttttggctagggcctataatagaacaaaataaaatcagaatattccaggagtcatgcaactactaatcttgctctaaaagtatgtatctttttgttgcccatggaaggtaagtgttacactccctttagattaagcactttcaattttcgtaaattgtgccaatggcaacattttagattctcagaggatgaagcatcctgttccaagtcttttttgattgtctagtagtcaatggtatattgttgttagtactgtagctgtctattacaaacctaaaacagtgttgcttctgtcatctattggaatcgttatagttattatatttagggatcagtgatggtgctggattgaaatagagtgggcagtgatctgattttttaaaatgcatatgttctaaaaaatctaatgagaaaatgttcctgctatcaccatcttctttaatcttattttcatagcacattattatgcataaccgccagccacagttagtttattgtctcgataagtacagcaggcttaattaaaataaagctgtaaataaatgcaaccaatgataacacaattgtaacgtaattccatagcttattaatgtgataaaagcaattaataaaagacctagccaacccctttaacctcttaaatacattattatagagttcatgcacaaacacatgcatctgagaatgtgtaaaagctgttatatatcctcccaaggaaaaaaattgtgccttgagagaaaagcaacgagatttaaaagatttgtgtctataaccatctgttattagtatttattttaacaaatatacaccacccttatccacaccaattccctggttgtttcttcaaacaattatccacaagctttttaaagtttttagaataatgctattaagcagaccgatgcatacacaatcataaagtgaattcttggtctgccctttgtggcgtctggacaatcataattcattcacatgttgaatctcataatttgtacctattttttcccatggtctaacctcccacttatctcgaggttgtatgtatatttctaagttaggcaaattaaatctgattcttatgatttggttccgcagcttataagatatgttaacttttcttttgttttgattatgtataattagtctgatcttccatccccctctttttttttttttttttactttaattattttcaaataccttcttttaaaggtaaaagcaatagtcttggaaaagcgaatctaccagcagggggcgcaccagccacatccctgaaaccagccgcgctgaaaagccggtggccgccttctcttctccagatcttctcaaccttttctctttcctaatctccaggtccgtgtttaccttaatattacacctcgattaaacagaaaacagtgctgtattttgaagagcgccgaatatgtatgcattttgagaaacccaatctcaccctttccgggttcccaagaactaaaacaagccataacttgagagaaaaaggagaaccttcggggggcaggaaggttgattggaaataacttaaggaaagtctgcagaattcttttttttacaacttttctgagtttccagtgggtatatttagtgtgagtttgacagtaacaggctagggagggcagagattggagaaattgggggtcgggggagtgattatgggcagaaggttagtaaggaacaaaacaatgcaccgttttgtaaagataataaatggaacgtggctggtagatactattcagtacattttcttagggtgagtaagggtagaccaggggaggagggggcggagagagtgttacagaagaaagaaaataagtaaccctgatggtttaagccctttataaaaaagaaatggcatcaggttttttttttttctttattcccccccaccccaccctttgtagtcaagtgcattttagccacaaagatcccaacaagagagtggaaggaaacttagacgaggctttgtttgactccgtgtagcgacaacaagagaaacaaaactacctatttgtaacggacgtgctgccattgccctccgcattgagcgcctacctattgaaatctttacgtcgggacaatgggagagcggctaaaattaccctctcgggtcctgggcgggcaagattcctgagcccctacccccgcccccatctcatcctcctctaacccgggccttgctgggctcccccttccccagtcccggccgccttctcccagtgtgcgctgcctgcacctgtgcctggagagcatcgaccccgcctcccaggccttgagcccctttgcggcgcagccccagccttgcgcggcctgggctttgcggccaccacaatggaaatctacggggaaaatgccagggctggttctgctggagtcctgggaactctgcgtgggagggagtttgtgactgcggcccaaaagccacctccatacagtgccgtgggatgccaggaagttgaaatcaccctcccccatcgcctgcacttttgagcgcccttccgtctgtgtctttccccagcccccatttgaaacccgcacgaccgaaacccttctttcggggaggcatgggatgggaatggggagtggggggagacagtagaagcatcccctttgctacggttgaatgaagacagtctagtgggagatatggctggggctaagaggaagagctgcagtttcctgggccaaagagctgagttggacagggagatggcagcttaccaaggcctgcttgttctcagctctagagtctgccttatggtccgagcaggatttatttttaagaacagagcaagttacgtggaagcaaggaaggttttgaggacagaggtttgggtctcctaacttctagtcgggactgtgagaagggcgtgagagagtgttggcacctgtaaggtaagagaggagagcggaagaacgcagtacgggagcggcaccagaggggctggagttgggggggagtgctgtggatgagcgggagaacaatgacacaccaactcctgcactggctgtttccagaaatacgagttggacagccgccctgagccacccactgtgccctgccccacccccgcaccttagctgcttcccgcgtcccatcctcatttaagtaccctgcaccaaaaagtaaatcaatattaagtttaaagaaaaaaaaccccacgtagtcttagtgctgtttacccacttccttcgaaaaggcgtgtggtgtgacctgttgctgcgagaggggatacaaaggtttctcagtggctggcaggctggctctgggagcctcctccccctcctcgcctgccccctcctcccccggcctcccccgcgcggccggcggcgcgggaggccccgccccctttcatgcaaaacccggcagcgaggctgggctcgagtggaggagccgccgcgcgctgattggtcgctagaaacccatttattccctgacagcccccgtcacatggatggttgtctattaacttgttcaaaaaagtatcaggagttgtcaaggcagagaagagagtgtttgcaaaagggggaaagtagtttgctgcctctttaagactaggactgagagaaagaagaggagagagaaagaaagggagagaagtttgagccccaggcttaagcctttccaaaaaataataataacaatcatcggcggcggcaggatcggccagaggaggagggaagcgctttttttgatcctgattccagtttgcctctctctttttttcccccaaattattcttcgcctgattttcctcgcggagccctgcgctcccgacacccccgcccgcctcccctcctcctctccccccgcccgcgggccccccaaagtcccggccgggccgagggtcggcggccgccggcgggccgggcccgcgcacagcgcccgcatgtacaacatgatggagacggagctgaagccgccgggcccgcagcaaacttcggggggcggcggcggcggcggcaactccaccgcggcggcggccggcggcaaccagaagaacagcccggaccgcgtcaagcggcccatgaatgccttcatggtgtggtcccgcgggcagcggcgcaagatggcccaggagaaccccaagatgcacaactcggagatcagcaagcgcctgggcgccgagtggaaacttttgtcggagacggagaagcggccgttcatcgacgaggctaagcggctgcgagcgctgcacatgaaggagcacccggattataaataccggccccggcggaaaaccaagacgctcatgaagaaggataagtacacgctgcccggcgggctgctggcccccggcggcaatagcatggcgagcggggtcggggtgggcgccggcctgggcgcgggcgtgaaccagcgcatggacagttacgcgcacatgaacggctggagcaacggcagctacagcatgatgcaggaccagctgggctacccgcagcacccgggcctcaatgcgcacggcgcagcgcagatgcagcccatgcaccgctacgacgtgagcgccctgcagtacaactccatgaccagctcgcagacctacatgaacggctcgcccacctacagcatgtcctactcgcagcagggcacccctggcatggctcttggctccatgggttcggtggtcaagtccgaggccagctccagcccccctgtggttacctcttcctcccactccagggcgccctgccaggccggggacctccgggacatgatcagcatgtatctccccggcgccgaggtgccggaaccggggggcccccgtagagatcacatgtcccagcactaccagagcggcccggtgcccggcacggccattaacggcacactgcccctctcacacatgtgagggccggacagcgaactggaggggggagaaattttcaaagaaaaacgagggaaatgggaggggtgcaaaagaggagagtaagaaacagcatggagaaaacccggtacgctcaaaaagaaaaaggaaaaaaaaaaaaatcccatcacccacagcaaatgacagctgcaaaagagaacaccaatcccatccacactcacgcaaaaaccgcgatgccgacaagaaaacttttatgagagagatcctggacttctttttgggggactatttttgtacagagaaaaccaggggagggtggggagggcgggggaatggaccttgtatagatctggaggaaagaaagctacgaaaaactttttaaaagttctagtggtacggtaggagctttgcaggaagtttgcaaaagtctttaccaataatatttagagctagtctccaagcgacgaaaaaaatgttttaatatttgcaagcaacttttgtacagtatttatcgagataaacatggcaatcaaaatgtccattgtttataagctgagaatttgccaatatttttcaaggagaggcttcttgctgaattttgattctgcagctgaaatttaggacagttgcaaacgtggaaagaagaaaattattcaaatatggacattttaattgtttaaaaattgtacaaaaggaaaaaattagaataagtactggcgaaccatctctgtggtcttgtttaaaaagggcaaaagttttagattgtactaaattttataacttactgttaaaagcaaaaatggccatgcaggttgacatcgttggtaatttataatagcttttgttcgatcccaactttccattttgttcagataaaaaaaaaccatgaaattactgtgtttgaaatattttcttatggtttgtaatatttctgtaaatttattgtgatattttaaggttttcccccctttattttccgtagttgtattttaaaagattcggctctgtattatttgaatcagtctgccgagaatccatgtatatatttgaactaatatcatccttataacaggtacattttcaacttaagtttttactccattatgcacagtttgagataaataaatttttgaaatatggacactgaaattattcttgagtctttcatttatttggataacactgtgattatacataacttttcggggaattataatactgtgctcagccaagaaagcaaaataccaaaaaccttggtattactagtccagcatcatgtgctaatgttaattgcaaaaaagaaacggctggatgattaataagtactggaaaaattgaaatttctgtcatttctaaaatagaaactagagacatatattgtaaatccgccccctccttttctaagcagcatgaataagcatgatggggacctatacttaaaactgatttatgccacttgttgccagaaaggattcaattctgaaatttttcatgtagtttagcagatggggtattgagccaaatcagaaccaggttggctggttttgttttcattttcttcacagcacaatggccctttgaaacctggctatagagaaaaatgatgcttcttgtatcagaataattgcaaactagacatgcaaagtgttcatctgctgggtgggtgtttggattactctggccctgctattgtctgagaggaaacaagtggtttgctttctttgttccttgacttcataaactttctcctctacattttcctgttcggggagagggaaagaaaagaacatcttgcaaaactccccggcttatcataaacgtagtttttttttattatttattttcttttttcccctctctctccctctctccctgaattccatttcttaaattggcagcgcgggtccaagcctgtagccccaaatcggataatctctgcagctgataacaagcaaaagagaagccaggcaacagccatattaaagaagaaaacagtcaactctgaggtagatattttactttgtccggtctaatcacatttggagatgattatgcttttgatctgttaacaatgttttactactgtagtagagaagtgggggaggggaaaggggtggggaaacaagattggatttgttgtgtggtgttttttgttttttttttttttgccctaggaaaggtaaagaaaggctatagttgtcctcagtgggagtggaaaagttgagacatcgccatggtctttgaattagcgatgcttctgcatcaccacccacccttgctttggggcagcctgataatctgttacctagtcagggacttttctactttatttactacttgattcgctcgtcttcccccacccacggggaccaggaaccaacagtcgggcacttttaagagcacgggtttgcttcccacaatttcaagagcttgtgtcaacttgctacaactttggagaagttggaatccggcagcgtcttccacccttgagtaaagtacccgctgcagccactaagttagctcatcccgttggtttgcatcttctcatttccaagaaagtatttctttctcatggtgttgctaatgttagttctgggctgaactgaggatatctcatattttctgtactttctatttttttctagattgctttgttttaggtatgtactggtttttatttattactttttaaatcctcatttttaggataacattgtactgggaagggacaattattattccagttcccaattctaagcaaggcattttcccccctaattaatgcagagactctaaaagaatttcccctagcctggccagccattgtaatgcatatacggattattcacgtggtaatgagcacattcgccagttcttgctcacacatacgaataaaagaaactttgaataaagatccaaatgatcatcctgggggagtggggaggatattcccggaatttgaggcagtcaactatatagattatatatattttgaaaatagaaatatattagaaatatgtatagaggtttacagtaattgcactgcactcacctctcattttttaaaaaaagcccacagggtcagcaactttctggcaaaatggtcaggttcaaatatttagcaaaaggaaagggagcacaatattttgggaagtagaactagctttgaataattgtcactatctgcataaaacaagagaactcccgttcccccttctatcccttcatatcaccaagccaaatagttgaaaattgaaagtcaaaatattttgtttgcaaatataaatgcttttgataactacatctgagggaaatgatatatatcttgtacgatcattcatttgattaaattaaagggttacctgagatatgtaatttcatggctagattaatatcgaacatataatattttaataataatgtgattttcaaggagagtaaacccataaacttgcccagagatggttatctcatggtgctgaagatagttgttgtttagttcttttcctcaggatattattctgctcaatgaaaccactcaatttccagtcaaatagggtgaatttaaatgttttgttaactatatacacagaatagaaatgtgcaaaaggatgagagtacagtctgttctttctgcaatttttttctctccccaaaccacccgcccccctaccacatactttaaataaagagcgttaaaatattttgctgagctgtagtagattagcaaggtttcttgccaatgctgggaagctggtattacagaccatcccaggggaaaatggctcacattaaccactaaatgaatatttgacaagggctcattcggaggtattattgctataaacgtgtccctactggacttttcaagggtcaaagagcaatgcttcaattaattatttagactgctagtagatttggtggtaatagctgtacttatttctagaaatcgacacattcttacagtaggaaaatctcaggagaatcttctccatcagcaataccttggattgaaatacacatggagccctggcattctaaagctgactttttcataaaacctttccctgggctggtggggggtggggggcacagaattatagtctctttttctgtttcactggctgttttttttggtttaaaagaaaaaaaaacagaatacagtaatttatcttaatatccacatcatgtgtggcaaggtcttttagggatttgcaatatggggcaaaaggggagggtgctcatttacaacctttgccttttctaagtagagatgtcacaggatttcggagactcagagaggccctgaatttagacaggatacacattcctgtttgccaataaaatgcaagtttgaaagtggaaggttccataagctgagtacccttagttctagtagtctcgagtaaattggggtacaaggtagttcctccttctctccccacctattggtctgaacactgcaaggtgcagtagcggggccagtgttccattgctgccgtgtcataggttcctccgtggccctaggtaaaatggtaagggaatgattttgagggtaagattcctcgacaataatataagttgaatgaataagagataagctgcaagggtggggggggggggcggtgggaacagtaattacaaacccaattcattcagcttttcagaacttttgttgtgggagctccattgacgggttttgagctgccagttttctcacattaaaaagaactgatcagcgcctcagggggacaagaaataccgcttaactgcatagtgatggggtcttcatttagaaccattacaagatgaaaattaaacagtgcctttgtgtgcatgaggtttacttttcaactgctaacagtttatagctaactgctctgagattgaagtttgactatggtttgatcgcctgctgattgacactgcttattatttatttatttatttatttatctgttataattaagagaacttttcatcaccccaccccagtttcatttattgatcttggagaattttgaaaaacagatcctcatatttttctttgtggaaggagtttcctttgccatgagctttagcagagacttcagttcacattccccaacggacaacccccaccccacacacccacgttatttccttaaaataatttgcatctcattctctgtttttttctgctgcattttcttgctctccaagctagagttgcttttcgggcagcaagtagggttggagataggggttaatttatttttttgctttgctttctttttttgacctaaattggaagagggctggatggatttcctaaggacttcacctatgaggtgaatccctcaaagaaggaagaagggggagaaactctgacctttactgtgaaaatatggatacagtccaaaaggacatagtttccggagttctagagtaagaaaagctgtggaaggagcttcccaaagacaggaaagttgcccaaaccagataattagtttagtgtctttcatagttattttctattaaaacttttctggaaacccgacatctgttaccaccaagagacacttgtaacctcctctctccctgctaacagtgctgtccagttttatgattcttgttttcagtttgtctattttgcttctgtggcctttagaaaataatggacttgactttcttattttgactaaggggatttctctttggaagggtggagtattaagataaatctaagattcttgtctgtggcagaaagctctctttctctatttggagttcagatggattttattttatactttggtataatggtgatatttctgattccttgagcactttgctcagtttctctcctaaagcaaatagaatgtcttctcatttcgggatgcaaagatatttgcttcacctaggcgtttgaacttgagatgcttgttctactttgcaaagaagtgtcaggtgatttgaaagctggaggtgtccttcgttttattaccctagtctgcccgcgtgtacagaatgaagggtgcactgttttatatagagttcggcgctttgaactatcatttgcctagctctcccagcttccgcgcgggccacggctccgggctgtgagcgcgccggcctcccgccggctgccctggggagcgcgcagtgcccagtgctgagagccgacgcgcgggcaaattgaggccgagctgacgagctccggcgggtggacctgacgtcaccgcggcccgggtcacctcacccatggggctccccaagaaggtgctgtgtggggctcgagttctctctgcccgggctctgctcaaacggtcgcattccctctccctcaggcaccgacccgcgtcagacaagtctagaaagtctcccgaggcgttggggccctcaccactccagagtcctctgcctcctgcgccccagcccaagccctctccatgttgacttcgtgacacgggagacggtgtctaggccccagattcccacccacatcagagattgtctacccaagaggatgtttgtccctgtttgtggccaaatctcagtattagtgatctcgctcggttcttcccgattagaggccgaggattggcagggctgggggaagcccccggagcaatctgggatccctggaatattggccccctctggattagagcaggtagggatgggaagatacagacccttcactttcccatttgtgagatagggataatatatagttaacctcgaagaagatgaatacagagtgcctgaaaaaaaggcttaattgataagcatgactttacttactgcccagcagaattagggaagggaagcagttctcacgttagactacagagaacaatacagaagccccggtcctttctggccttcctggctctggacagtgaaattagtcttgttcataccacccttcttacttttccagtgctctctctgacttaagatttgcctaggaagttatcttgcaaacttgccatccctgggcatcgtcctgaagggagggatcccggcattccgggcaggacccgcccccacccgcagaaggcagaaaaataattactgtattaaataaggagcggtgaattcttcccgagggttcttatcgctggcggccaggccagaagcgggactgcgcccccacccccacctcgtgacgtcagggcctgcagggctccggggatgaaatgattcgtttgagtgttccagaaagggcaatccgaacgcttacagggcgaggccagtgcagcccagctccatcaccactaccaagccccagtttgggaggctcccgaggcccctggccgccccccagaccccgtctccagaacataaccacatatacaagtaaccataatcctaagtacgtatatagtcacgcgcacaactctcgtcacaggaccgcccttcttccaaatatatatatgttatttagtttgttagccacaatttgttgtgggatctgaatgagttgtttctgttgtgtttgtatgtttttgtttttagacggtcgacaaattacgacaaatgcctttataaagcacaccatagctttatttaacccggtgcaagtttcagcggcgatttaagaaatggacttagaagagttttctggctctcatatccagccatggttaggacaattgctccaggcttaccattgctgcaccagttctattttctctttcccctctattcctaagaatttgtatagcttttaaaaatctttttagagtcatgtattgctgagagaatttcttagaactgtgatttaaattgtagataagaggaaagattatctggtcagtggaatgtgtgtaagtggcatagaagtatttgttagggaaaggcacctgggcatttctggatttctgggagatgcacttctcaagttttctttccaactctcaaatcaatttgatttattgaatgcccttccaatggaaaggatcctggaaaacaggccttatgttctgatattggtccaggatctcacagagtaacgattagccaatattttgcatgcagtcagtttagtatcagctcacatccaggtcgattttatcacacttaacagctcaaatctgggttattgcataatattagagtttaatcagtctggaatactaaatggcaaacctgtcttctccttctcaaggccctcctccctttctctatttctccttcctcccacctccaaggaaactatcttaaaatcaagtttccctttgagagtttgtttaccccaacttctgttaaactagactaacacgctctcatcagctttctaaacactgtctcatcagctttgtgaaatggtgcaaaaacatcttggaatccaagatggcaaaataaacttgagcatatggggggaagactgccttgttaagaaattgatttaaatgtttagcttacacttcagcctcaatgcttcccttactacccactcttacttccctcactgcccactcctggttcttgggtaccccacctctattagcaagcttgttcccccagcataaattatgaatgcatatcaacaggctcatctgctgtgataaatcagaggcttttctcttttgcacatttctgcttttattctcatcgaaatgtctttctgccccatgctagcagtgtctttctacaaacttactatccccgtataaactatggagatatattctcaattggaaaaatcaggtaatttcaaccgttccccccacccccaggaagccttacaagttaaggatacaaaatatttcatggttagttgtatgagcttccaaattagctgcatataaagtatttaagatttttttttttttggctgtcactggctggcaatactcattttgtgtgtgtgtgtgtgttggtttgaaaagcaggaagaaatgtaatgaattgagtgctgtcagagatgtcttctgtttgaacaatctgtgatgggctgaatggcagggactccctcatccagtgcaggtgcagtagagctggggaaggggggaggggggctccctctgttcagtcaaaaagcaccattctccacaatagaccacacactgacagccagcgtgacatcaactcacactttcatacttttccccccatccatagttctgagttcacaaagtggccatacagtagccttggttaggttcctttaatgaacattttgtggctcctatgaccaacattgaaatccgtggagccctgggaggaacaaatagatttttaatcgtgagttccaagccagaatgtatagctatagatattaaaagtaagctggtctctacatcctctcccaatgccaatgcccacagcaatcccagatgatctgaaaactctgagttaaaagttcttctaagacttcttaggttccaagacactgttttccatgtcctgagagagatcaaacaggaaaggagagaagacacaaattttatgtatttatttaaatgtaagagcacctctagtattttattatgcttcatgagagggttaatcctacaaattaacaaacattaatcttgtggagtggagttctgcccccttttgaattggttttactgggaagaggggtgtggagaaaaacaagagggttagaaaaggcagcaactgttttaaaactctgaacaaagatgcgaccaccttttggctgtcctgctgctgcaaggactggaccttccaagagttcgtttcacatttgttgaagcccaggccttggtgcctcaagttttaaatggaattactcaaggcgggcacactactagacaaactattctagtcaattccttcatccccgacccagtccctactcctctctgcccccgcccacttcgccacttcttagtcccggatctgaacattttagctgaaagagggagggttgaggaaagggccaggacagttccctcagtgccaccactgcgggcgaggacagttccctcagtgccaccagtgcgcctggagagatccccgcggccctgccgctggctgattctcccctgtgccttgacttgctgaaacatctctctggggaaaattactccctacttgcttacatgtgtgtactaaaaaacacatgtagccatacatgtttcatcacggcaacaaaaaatatcaacattctagccccaggagcaaaacgtatcaatcattcgcctaaatattgttcagtagatgggggcgggaataggtagacctcctaggacagcggtcacaagtcccctctcctccgcatggacaccaggaatgcggggtctggcggtgcagggcgcagggtgagaagatttgatgtgcagggtaagtaaaggacaagttatttaaaacctcaacacaggaaaagatggtaagagtgctgtgtagccctttgcttgcttgtgactacaagtcgctaggtggcccgcgtttagagtatgcctacggcgcctactaacgtctagacctaggagaggcgtctcccgcccctcgacccacagccagccgccacttgatagctaacgcgtcttccggccggtacacacccacaattaatctttcttattaaagcctccattctgtacccatggggcgactcaaacctatttagatttccgtggttggctgcacaaatttaagtgggcaacgagttataaacctaataacagaggacgagagagggtgatttgagtagagaagacgcaagattcactagggtcgtgaagatgctgcgggccttgcccaccacggcatctacctcggggtgcacgccaggctctgagaaaggtagtgaacctcacaatcacactcaccacacacaacatgcgtacacacacttgcactcctaccccctttgctcacaggtacacttgtgtggaaattgcctcttccgtagttcttataaactcctcccagacaggcagaattctcagagcatcggaaccagggaacttgcagggaaccagggaaggtttgcactgtttgggattaattgagaataattaacactggagccgttaatcaccactttgctgctctctccctccttccgggtctgcggcgtctgcctttttcgctcccgctgccggcgcgggtgtactggtgaaagtgaagacgtcgcggtagctgtcacccagttcggctgtacttttttaaacgctcgcatattgtttgattactaattcgagttaatatgatctttatggcaacataacagtggataattggcctttttttctgaacaacaatgtaaatcacaatcgctttattatttaataacgtcaaacgcttcgttggattggccccgaccgagaagaccttttctttctagacagtgttgtggaggaagaacaatgaagatctaattgtggagatttcataagttggctcccgtaaatgaacagcttagatatggaagttccagcagatgtgggtactattcgcctctacaagctctaccccccacccccatatacgcagtccaaacactctattggagggttttttgtttttttttttttttttttgtggtggtagtggtggtggtcctcagatcctagcaaccacctaaagtttccagtagtaattagagcttttatcgggcttgctcttcagccctttatattgccgatttagcgttaaggcattaagtccacacaccaaattagcgcgacttccaaatagccacaaccacttattctccccttccctcattttggtggttggacaccaagagcatgggcctgggacttttttttttttttttttttttggttttactttgttttgatttgatttttaaaacctattcgctaccgcactgtcttggaatatacttgtttcaggcagagttttgcaagggacctgagccattattttgcaaacgcctggaagagcacatgaaactcagagaactacaatgcagacgacaacgcctagaaggaatgggtccccgctgctcgaatgaaagattaattacatttgccccaaaagccccaattctaacggtctctatcgcggcttttgccatcactgaaggaccgctgtctctggggtcttcagacatcggagtcctttgcaaatgaagagcccccaccatttggaattcgggtcaaggagaaagactctgagcctgcagcagtttttgtttttgcgtgtgcccgcctctccattttattcaacttcttctgcctgtcgggaagcagaacaatcgctccccacccacccccctccgccccgtttctaagataaacaggaggtgcaaaatgctttgcctgcacacgcgccctcgtggcccagtcttcctgcaacccccagcgcaccggccatgcagctgtctcccaaccagacgtgggagaagacatccccccttcactcttcccacctgcaattaaaaaccatcacattgactgctctagagtcaggttcacatttttggccctccatgccaccttccagtttcttcccggtccactctctctctttctcaggacctaaaaagtgacggggagagggtgaagaattggagaaagcagcggattttcaaaacgtatcccccccgcccccccatcttttaaagtagtatgttaccacaaggagtgcatttgggaaactttccctaacaggagctgggcgcagtgttattcttctccatggggtctgctggcctccccgcccccgctggacaatgcgtgctttgagactcggtggcctgcaggcagcgggagaacaggggactgggcagccttcctcccaggggccccgcagttgggggagcgccaggcagggaacagggacagggagcgagccacgcaggaaggaaaaccataaaagtgccattttttccctcagccctgcacagaggcaggctttgaggacctagggccaggcagctggggcgggctggggttggggtgttaaaggtttgcgtgtcttttaacccctttcccccactgaaacattttattccggcacatacttaggccctgcagatcccacctcctcgccctcaatcttggtacctgctctggctgataatatgccactcggacttcaagtccgatctccctcaagtccaagtctc

SEQ ID NO: 3 - DNA, 2457 bp, Mus musculus
ctattaacttgttcaaaaaagtatcaggagttgtcaaggcagagaagagagtgtttgcaaaaagggaaaagtactttgctgcctctttaagactagggctgggagaaagaagaggagagagaaagaaaggagagaagtttggagcccgaggcttaagcctttccaaaaactaatcacaacaatcgcggcggcccgaggaggagagcgcctgttttttcatcccaattgcacttcgcccgtctcgagctccgcttccccccaactattctccgccagatctccgcgcagggccgtgcacgccgaggcccccgcccgcggcccctgcatcccggcccccgagcgcggcccccacagtcccggccgggccgagggttggcggccgccggcgggccgcgcccgcccagcgcccgcatgtataacatgatggagacggagctgaagccgccgggcccgcagcaagcttcggggggcggcggcggaggaggcaacgccacggcggcggcgaccggcggcaaccagaagaacagcccggaccgcgtcaagaggcccatgaacgccttcatggtatggtcccgggggcagcggcgtaagatggcccaggagaaccccaagatgcacaactcggagatcagcaagcgcctgggcgcggagtggaaacttttgtccgagaccgagaagcggccgttcatcgacgaggccaagcggctgcgcgctctgcacatgaaggagcacccggattataaataccggccgcggcggaaaaccaagacgctcatgaagaaggataagtacacgcttcccggaggcttgctggcccccggcgggaacagcatggcgagcggggttggggtgggcgccggcctgggtgcgggcgtgaaccagcgcatggacagctacgcgcacatgaacggctggagcaacggcagctacagcatgatgcaggagcagctgggctacccgcagcacccgggcctcaacgctcacggcgcggcacagatgcaaccgatgcaccgctacgacgtcagcgccctgcagtacaactccatgaccagctcgcagacctacatgaacggctcgcccacctacagcatgtcctactcgcagcagggcacccccggtatggcgctgggctccatgggctctgtggtcaagtccgaggccagctccagcccccccgtggttacctcttcctcccactccagggcgccctgccaggccggggacctccgggacatgatcagcatgtacctccccggcgccgaggtgccggagcccgctgcgcccagtagactgcacatggcccagcactaccagagcggcccggtgcccggcacggccattaacggcacactgcccctgtcgcacatgtgagggctggactgcgaactggagaaggggagagattttcaaagagatacaagggaattgggaggggtgcaaaaagaggagagtaggaaaaatctgataatgctcaaaaggaaaaaaaatctccgcagcgaaacgacagctgcggaaaaaaaccaccaatcccatccaaattaacgcaaaaaccgtgatgccgactagaaaacttttatgagagatcttgggacttctttttgggggactatttttgtacagagaaaacctgagggcggcggggagggcgggggaatcggaccatgtatagatctggaggaaaaaaactacgcaaaacttttttttaaagttctagtggtacgttaggcgcttcgcagggagttcgcaaaagtctttaccagtaatatttagagctagactccgggcgatgaaaaaaaagttttaatatttgcaagcaacttttgtacagtatttatcgagataaacatggcaatcaaatgtccattgtttataagctgagaatttgccaatatttttcgaggaaagggttcttgctgggttttgattctgcagcttaaatttaggaccgttacaaacaaggaaggagtttattcggatttgaacattttagttttaaaattgtacaaaaggaaaacatgagagcaagtactggcaagaccgttttcgtggtcttgtttaaggcaaacgttctagattgtactaaatttttaacttactgttaaaggcaaaaaaaaaatgtccatgcaggttgatatcgttggtaatttataatagcttttgttcaatcctaccctttcattttgttcacataaaaaatatggaattactgtgtttgaaatattttcttatggtttgtaatatttctgtaaattgtgatattttaaggtttttccccccttttattttccgtagttgtattttaaaagattcggctctgttattggaatcaggctgccgagaatccatgtatatatttgaactaataccatccttataacagctacattttcaacttaagtttttactccattatgcacagtttgagataaataaatttttgaaatatggacactgaaa

SEQ ID NO: 4 - DNA, 11 bp, Homo sapiens
  misc_feature (10)..(10): n is a, c, g, or t
srscsattans

SEQ ID NO: 5 - DNA, 7636 bp, Homo sapiens
cacacccacacgagatgggcacggagtagtcttgaaagacatgacaaatcaccagacctgggaagaagctaaagagccagagggaaaaagccagaagtcgactacctgggaggagggatagacaagaaaccaaactaaaggaaactaaggtaggtgctgaaaacaagtaccattttcaacattaactgatgccttggcttcatgctataatgccatgttgtgtttcactataacctcagagtgaatgaaagaggaaaatggagctagttgaaatttctgcctaaactagccagattttgagacactaagttatctcaaatcaagaaatcaccctaatgagaatttcaataacctcaggaatttaaggtgcatgcatcccccaccccccccttttttttttgagacgtagtcccgctctgttgcccaggctggagtacagtggcgcgatatcggctcaccacaacctctgcctcccaggttcaagggattctcccgcctcagcttccagagtagctgggactacagacacccaccaccatgcgtggctaatttttgtatttttagtagagagggggtttcgccatgttggccaggctggtttcaaactcctgacttcaggtgatccgcctgccacggcctcccaatttactgggattacaggggtgggccaccgcgcccggcctttttcttaatttttaaaaatattaaagttttatcccattcctgttgaaccatattcctgatttaaaagttggaaacgtggtgaacctagaagtatttgttgctgggtttgtcttcaggttctgttgctcggttttctagttccccacctagtctgggttactctgcagctacttttgcattacaatggccttggtgagactggtagacgggattaactgagaattcacaagggtgggtcagtagggggtgtgcccgccaggaggggtgggtctaaggtgatagagccttcattataaatctagagactccaggattttaacgttctgctggactgagctggttgcctcatgttattatgcaggcaactcactttatcccaatttcttgatacttttccttctggaggtcctatttctctaacatcttccagaaaagtcttaaagctgccttaaccttttttccagtccacctcttaaattttttcctcctcttcctctatactaacatgagtgtggatccagcttgtccccaaagcttgccttgctttgaagcatccgactgtaaagaatcttcacctatgcctgtgatttgtgggcctgaagaaaactatccatccttgcaaatgtcttctgctgagatgcctcacacggagactggtaagaaagaaatttatccttgaaaggccaagttccttaagggaaaagagagaaggagagagggttaagggatcatttccctcttgagcaatgatggaccattactataaagaagtgttattatcaactaatcctctggaaacccctttttccattataacttggtggcacctgccctttgaactatgtcccaggtctcaggagtgtgcattgagttgaaggacacagaattcggcagttgaacagtgtgcagtaagtttgagaacctatgggcttaggcatggtggaaacaaaaatgtatcgttatagttaaatgaaggtgatgtgtacatcttcacatagtgctggacacatgtgaataaatagcagatttattgctaattagccagaagacctaacgtcatagctcagggatgagcatgattttgttttgccaaaaatggcatggcaaatcacgatgagatttctgtaatacataatttgggtaattctttctatgtcagtaacggctgtctcttctccattctctgggtttgtggatgttactgggcagctctgagtttgggagcacctcccatgtctaattctcctaagtcctgggaagcgttgacccaactttatggtaaagataattccagaaagtttaatctactgacagtcaaacagaatgtagctagaagtccagtttggcttcaaaacctgtgctagtactcatgcttctgactggtagctgcaaggggtgggggatactcgggatactcataaagccgctaccacttttttgaaaatcaatttttcagtagttttcaaaaacttgagaatgaaccaactttaccaagaatgccattggtaacactgaacgctgtaaaatagcttaaaaagcgcatttacattatgactacagttgtaaagagtaggttgtggaaaaggaataagtaaacatgattgctatatttgagcctcagatttgaatgtcaccctgcttttcctcttttttagaatcagggactcactttgtcacataggctggagtgcaatggtgtgatcatggatcaccgcagcctcaaccctgagatcaagtgatcctcttgcctcagcctcccaactactaggacaagaggcgtgtgtcactatgcccagctaattaaaaaattatttttgtagagacagggtctcactttgcagctcgggctggtcttgaactcctgacctcaagtgatcctccaccctcagcttcccaagtcgctgggattacaggcgctgacccactctgcatggctattcacccagtttttctaaactatgcattaatgttcttgcctttataatttctttctttctttctttctttttttttttttgagacagggtctcattctgttgcccacgcgggagtgcagtggcgtgatcttggctcactgcaacctccgcctcctaggttcaggtgatttctcctgtctcagtctctcgagtagcaggtattacagatgtatgccaccacgcctagctaatttttgtagttcttagtagagaaggggtttcggtgtgttggccaggctggtctcaaactcctgacctcaagtgattcacctgccttggctgggcaccgcgcctggccacctttataatttcaaatgttaaaaatacattgctgggtttgggaatgagcaagtggggatgtgttttctttagcacacatcaagtgacagtttatataggtagctaatatttaggattttccccaattctaatcattagttgaaaggcttcctctgcttttcagatctacttgcaagagagaagagattgttaatttttgctgttttagagcctgtccctttgttatgtgactgcaggggtagaattgagagttgaacactgggaaaaccgcagagcaattaggtatataagtgatgactaaatctagatattcatttctagttacaaaatcagtaaatgccaggccctatgctagagaatttcaattggttacctcattttaattaataaaaaaataattttagagatgaggtcagagctagtaaagggaaggcctggattgaaacagaagcttatccggattcacatatcctgctggtcctagcattgagaactgggcagtcagttgctggttttgttttttatttttttgagacagtctcactctgtcacccaggctggagtgcagtggcactctcggcttactgcaatcacggcctcctgggttcaagtgattctcctgcctcagtctccccagtagctgggattacaggcatgcgccaccactcctggctaatttttgtaatttttagtagagatggggtttcaccatgttggcacgctggttttgaactcttgacctcaagtgatctgcccaccttggcctcccaaagtgttgggattacaggcatgagccatcccacctagctgaggtgctggttttatagaatccccagaatcatggcatttaagcaatcatgtaggtgttgatgaagatcataaacaaagtgatttagggtgagatgcaatacgtgaaaattggtgaatctccattctgacctattaacacccagtgtgggagcttttgagcatcagtttaaagcaaaaggtggtagcgccggcctgatgaggtggctcacacctgtaatctcagtacttcgggaggccgaggcaggcggatcacgaggtcaggagttcgagaccagcctcaccaacattgagaaaccctgtctctactaaaaatacaaaattagccaggcgtgatggtgcctgcctgtaatcccagctactcaggaggctgaggcaggagaatcgcttgaacccaggagatggaggttgcagtgagccgagattgcaccatcgcacttcagcctgggcaacaagagtgaacctccatcctaattttaaaaaaaaggggtagcgccgctcagcaatgcattggccaccattatagatctctcccaacgcagtctattatgtacaaaatggagatactgataagacttcttggagtaatactatataaagcttgccaaagtgccagggctgcttaagaaattgcttcttattacttagatctggggttctgggaattatcaaagtactttgaaaacaatttttttaaaggatattttaatatttgaaaaattttagacaaaagtgtccttttatttgttcccaacagtctctcctcttccttcctccatggatctgcttattcaggacagccctgattcttccaccagtcccaaaggcaaacaacccacttctgcagagaagagtgtcgcaaaaaaggaagacaaggtcccggtcaagaaacagaagaccagaactgtgttctcttccacccagctgtgtgtactcaatgatagatttcagagacagaaatacctcagcctccagcagatgcaagaactctccaacatcctgaacctcagctacaaacaggtaggcttgttttgtccttggaataaggtgaacaaaaattggactaatttgcatggctaagacctctgtggatgcatgtagatgtgtgtactatgtgtccgtacatcgcctcttgcaaataatttatgaagatgaaatgcttttgtaacttccttcacctctttctttccttaaatattctattatgtgaataattatgtcataatttaaccactttcttgcacagaccaatattgtgaaaatctttccaacgtttccttaataaaaaagaagtatctaactccacttaccagggtaggagaaaccctaactcacactggttctcattaaaataaaaactttttttttcctttttttctttctgccagcaactccagcttgttttgttttttatctgtgtgcattcaataaggccaatcattgtttattacttgttggccattttccttcattaattggcttatcctcttctaggctttatttccttcttttcttttgtttatttttgagacggagtctcactctgtctcccaggctggagtgcagtggcctcataatgagacatcataatgacattagcattacttggtttaagtacaaatggatgaaacctccacctcctgggttcaagggattctcctgcctcagcctcccaagtagctgggattacaggcgcccgccactacacctggctaattttactgtattttttagtagagatggggcttcaccatgttggccaggctggttttcaactcctgacctcaagtgatccacgtgcctctgcctcctaaagtgctaggattacaggtgtgaactaccacacccggcccttgcctttattttctatccaaaatgttcatttctctctttttttctgagacagtctggttctgttgtcacgcagctggagtgcagtgatgcaatcttggctcactgcagccttcacttcccaggtgcaagcgatcctcccgtctcagcctcctgagaagctgggaccacagacgtgcagcattacacccggctaattttttgtatttttgtagacacggtgtttcctcatgttggctagcctgtagcgaactcctgggctcaagcaatctgcccgccttggccttccaaagtgttgggattacaggcatgagatatggcacctggccaggaataaaagttagcaatatactttgattcaaagtacctctgtattatgaatattttacaatttctatcattttttcctgcaggtgaagacctggttccagaaccagagaatgaaatctaagaggtggcagaaaaacaactggccgaagaatagcaatggtgtgacgcaggtaacaggaaacttcattctgttctttcctttcagtgatctttcaatcttgtccatccctgaaacacacaactccagtcacagacagttctggttgtccttgtaccctttctgttaatccctccttctctttcagaaggcctcagcacctacctaccccagcctttactcttcctaccaccagggatgcctggtgaacccgactgggaaccttccaatgtggagcaaccagacctggaacaattcaacctggagcaaccagacccagaacatccagtcctggagcaaccactcctggaacactcagacctggtgcacccaatcctggaacaatcaggcctggaacagtcccttctataactgtggagaggaatctctgcagtcctgcatgcagttccagccaaattctcctgccagtgacttggaggctgccttggaagctgctggggaaggccttaatgtaatacagcagaccactaggtattttagtactccacaaaccatggatttattcctaaactactccatgaacatgcaacctgaagacgtgtgaagatgagtgaaactgatattactcaatttcagtctggacactggctgaatccttcctctcccctcctcccatccctcataggatttttcttgtttggaaaccacgtgttctggtttccatgatgcccatccagtcaatctcatggagggtggagtatggttggagcctaatcagcgaggtttctttttttttttttttcctattggatcttcctggagaaaatactttttttttttttttttttgaaacggagtcttgctctgtcgcccaggctggagtgcagtggcgcggtcttggctcactgcaagctccgtctcccgggttcacgccattctcctgcctcagcctcccgagcagctgggactacaggcgcccgccacctcgcccggctaatattttgtatttttagtagagacggggtttcactgtgttagccaggatggtctcgatctcctgaccttgtgatccacccgcctcggcctccctaacagctgggatttacaggcgtgagccaccgcgccctgcctagaaaagacattttaataaccttggctgccgtctctggctatagataagtagatctaatactagtttggatatctttagggtttagaatctaacctcaagaataagaaatacaagtacaaattggtgatgaagatgtattcgtattgtttgggattgggaggctttgcttattttttaaaaactattgaggtaaagggttaagctgtaacatacttaattgatttcttaccgtttttggctctgttttgctatatcccctaatttgttggttgtgctaatctttgtagaaagaggtctcgtatttgctgcatcgtaatgacatgagtactgctttagttggtttaagttcaaatgaatgaaacaactatttttcctttagttgattttaccctgatttcaccgagtgtttcaatgagtaaatatacagcttaaacataa

SEQ ID NO: 6 - DNA, 20342 bp, Pan troglodytes
tgagacagggtctcactctgtcacccaaactggagtgcagcagtgcaatcataacttaccgggctcaagcaatccttccacctcagcctccctagtggctgggactacaggtgtgcaccaccaggcccagctaatttttgtattttgttgtagagacaggttttcgccacgttgtccaggttggtctcaaactcgtgggctcaattgatccccttgccagggcttctcaaagtgctgggatcataggcatgagccaccatgcctaacccttatctgagtttttgtaacagtttgaccaacaagcttgttgtcgtaaagaagtaagagtcctgcaaatttgcgtcggcccgcccggccaattgtttttttattattgaaaggtaggaacactgagaaaagcagggaaagagtaggaccttcctggtaggagcagaaacccataaacttagacaaggtaaagcctcataaatcctacagtcaggccagtggcagtggctcacgcctgtaatcccagcattttgagaggccaaggtggacggatcacttgtgcccaggagttctagagcagcctggctcacatggaaaaacctcatctctactaaaaacacaaaaattagcagagtgcaatgtggcatgtgcctgtaatcccagctacttgggaggctgagacaggagaactgcttgaacctgggaggcggaggttgcagtgagccgagatcgcaccattgcactccagtctgggcaacagtgggagactccatctcaaaaaaaaaattagctgggcatggtggtgcacacctataatcccagctactcgggaggctgaggtgggaggactgcttgaacccaggagttggagactgcagtgaactatgatagcaccactgtactccagcctgggagaagtcaaaaaagagtacactaagtttggaccggcccatgtagctcatgcctataatcccagctctttggaaagccagggcagaacaatagcttgaggccaggagttcaaggacagcctggacaacgtaacaagaccccagtctctacaaaaataaattttaaaaaaattttatttcataaaaacaattagccaggtgtggtggtgcatgcctgtaattctagccactggagaggctgaggcaggaggatcacttgagcccaggagttcgaggctgaggtgagctatgatcgatccactgcactccagcctgggtgacacagccagacactgtctcaaaaaaaataaaaaataaaaaataaatgctcatgtaaatgtaaactgaaaaaaagtaaaaaataaaaataagtaatgttaaaaataaaatgattgagcaggcgcggtggctcacgcctgtaatcccagcactttgggaggccgaggcgggcagatcacaaggtcaggagatcaagaccatcctggctaacacggtgagacctcgtctctactaaaaatacaaaaaaaattagccgggcgtagtggcaggtgcctgtaagtcccagctacttgggaggctgaggcaggagaatggcaggaacccaggagacggagcttgcagtgagccaagattgcgccactgcactccagcctgggcgacagagcgagactctgtctcaaaaaaaaaaaaaaaaaaagatttaaaaaatgaatgtattcctcattcctccacagctcaggtgacagaaaactgaaatctatttttttgttgttgttgttgatggtgctggggaatgaacccagggccgtgtgcagaaagctgaaattttatggctggaagtgcccaaaaccaacagagcagtttgaaaaataggagtgaattggctgggcacggtggctcacacctgtaatcccagcactttgggaggccgaggcaggtggatggtgaggtcaagagatcaagaccatcctggctaacacggtgaaaccccatctctactaaaaaatacaaaaaaaatttagccgggcatggtggcggacgcctgtagtcccagctacttgggaggctgaggcaggagaatggcgtgaacccaggaggcggagcttgcagtgagccgagatcacgccactgcactccagcctaggcgacagagcgagactccgtctcaaaaaaaaaaaaaaaggagtgaatcctaccaaaaacaactaaaaagggggggaaaaaaccatagagaaagtcattcctaaaagtctgatcatattttctgcccaaattcctgactgaccagcgaattttgcaagcacaggtgtctccaggccaaaaagcagcagatgaagaccctagctcaggatagagagatcagctgttgctcgttgctgggaagataacgtttttgcctactagaacaaaaatacaaaatgcccagaagaacacaagagaatccagaatttctataacataatatttgcaacatcaaactttcaatccaaaatgactagctcacgtcaccccccacaagtgttgggctgtgaactactcctaaagactggcggtagatcccaggagcctacctccctggtgccatgttgctggatgtcccgcacctgtcccatactatagctgtgctagatgttctgattctaataaactctgaattttcctcagctaatacatgatcttgaccacgaatctccacaaggatctcttgtaaactgtgagggaagctgaagccaatcctatgactccgacactctgttcagcttgccttctgtcagtctttgttcaaccgtggccctgttcatacacacctgcgggcttgctacccaattttctaaagctaaataggtgacaaaagagaaagagaggccgggcgcagtggctcacgcctgtaatcccagcactctgggaggccgaggtgggcagatcacgaggtcaggagattgagaccatcctggccaacatggtgaaaccccgtctctactaaaaaatacaaaaattaaaaattagctgggcatggtggcggcacctataatcccaactacttcccagctactcaggaggctgaggcaggagaatcgcttgaacccgggaggtggaggttgcagtgagccaagatcacaccattgcactccagccttggcgactgagcaggactcaaaaaaaaaaaaaaagatgaaagagactgatacacttttagttaaactccacagcaacagatttcttttttccaatgtcctcagcaaatttgtatcatcattacaatatgtaaacacactcttccaagaacatttccatgtctgcctgctggcttagtttataaccactatgaatcacttctaaaagcagtgtcacttattctgctaaggttttcaatccattttttcccctagggcctccagtttattccatttagaggaccttctacttcatcaagtacatctgagtatatctgatccatcattctcaattgatttctatcctgaaccacatgtaattgaagaatatgtctgggcatccattcccttgtccctgaacatgtgatggttaaggaaagttccctatcattgtaaaacagttgggagattggtgagcccagtgccacggtagaccactagaggggggtgtgactctctcagtgagcttgacattgacttaatggctttgcccaaagagcgacagtctaatctgtgtttcaaaagcaagagttccagtattctagcatgtcctaaaggtatcagtacaagtacttgagttattttcatatttcaaaaatgttcacggaaatgttacttttactaccaattatttagttccatagaggctactcttatgctttccaaatagatttatctattatttttgtcagatatgttctaaaaatagaggaaaagcaaaaaatgcctcctaattttatttcctagagataactattacttttatttctatatctgtatctatctttccacacttaatttatctccatatatgacatgaatgggatcaccttaacctataaacgaatctgctcttttaccttaataatggaattttcccatacatttaaatctgcttcatcctttttgtttttgttttgttttgttttgagacagggtctcactctgttgcccagactggagtgcagtggctgaatctcagctcactgcaacctccgtctcccgggttcaagcaattttcctgcctcagcctgccaagtagctgagatacaggcactcgccagcatgccgagcttatttttgtatttttagtagagacggggttttgccatgttggtcaggctggtctcaaactcctgactttgtgatccaccagcctcagactcccaaagtgctgggatgacaggcatgaaccactgcacttggccatcttttttgttttttatggctacataagtactccaatatatcataacacatttaaggaaagtcctattgatatacatttagatttaaaaaaatatttttggccgggcgcagtggctcacacctataattccagcactttgggaggccgaggcgggcaaatcaccaggtcaagagatcgagaccatcctggccaacacagtgaaaccccgtctctactaaaaatacaaaaattagctggcgttggtggtgcgcaactgtagtcccagctactcacgaagctgaggcagaattgcttgagcccgggaggtggaggttgcagtgagccgagatcgcgccactgcactccagcctggtgacagattgagacttcgcctcaaaaataataaataaataaaaataaaaataaaaaattgtttagctattaccaacagtgctgtaatgagtatctttatgtggttgtttgattaatgccttggcatacattcctagggggtgtatcaaaggatgatcacattttacattgccatgcaggtaactgacattaattgtatatgttctatgagctagacaaaatacatattagatgacagaaatcacttcaagtattatttctatttacacaaaagggaaaacctaaaagcctgcaaaataatttgcccaaggtcttaatggtggagctgagattttaatgtgtgtattttcttttcttttttcttttttttgagacagagtttcacacctatctccctggctggaatgcggtggcatgatctcggctgattgcagcctctgcctcctgggttcaatcaagtgattctcctgactcagcttcccgaatagctgagaccacaggcatgcaccaccacgcccggctaatgtttgtatttttttgtagagattggattttgccatgttggccaggctggtcttgaacttctggcctcaagtgatccacccgcctaggcctcccaaaatgctgggactacaggtgtgagcaacctctcacggcctactgttttttgattgtttgttttttgagacagggtctttctctgtcgctcaggctggagtgcagtggcacaatcacagctcgctgcagcctcaaccatcaggctcaattgattctccctcctcagcttcccaatcagctgggactacaggcaagcgccactgtgtccagctaatttgttttattttttgtagagatgggaatttgctatgttgcccagccttgtctagaactcccgggctcaagtgatcttcccacttcagcctctcaaattgctgggactacaggtgtgagccatggcacccagctttcatgtaacctagagtgaagcaggactctatcaactttcccccaaactgagaattgttacttctatttcctaaataatttattatttatctattcatctgaaatgtaaattctgggtgtacgtttttatcctcccagaaaatgtttgtatctatgtggcttaaattttttaattcaaatagaataaatcattcatatggttttgtgccttgtttttctttctttcttttttttttttttttttttgagacagaaccttgctcttgtcacctaggctggagtgagtgtagtggcatggtttctgctcactacaacctccacctcctggattgaagcgattctcctgcctcagcctcccaagtagctgggattacaggtgcccaccaccacacccggctactttttgtatttttaatagagacagggtttcgccatgttggtcaggctggtctgaactcctgacctcgtgatctgcccagctcagcctcccaaagtgctgggattacaggcgtgagccactgctcccggcctgtttttctaactaataatatagtgatctaaactagaattcttaatcacatatgcagtttctatatatatttcgtagtcttcctggactctctaccttgtaaaattgatttagttgtagctgtactagagcagatatacactggttgctgtagcagaaactgttcgttttccattcacatacaattatcttaacttcttctgaaggccatgtcttttagttaggaggtaaatctttttattttattttattactatttttttagagacagggtctccctctgtcacccaggctggagtgcagtggtgcagtcatagctcattgtagcctcaaactcctgagctcaggcaatcctctagcttcagcctcctgactggctaggaccaaaggcacgcaccatcacacctggctaagtttttaaatttttctgtagacatggagttttactatgttgaccaggctggtgtcaaactcctggcctcaagtgttccttcagcctcggcccccaaaatactaggataacagatgtatgccactatacccagcggtgggaggcaaattgtaatgatctcattcgctttgccaaattgttagtttaatcatgggcttatgtcaattttggataatatgtgaggagaagtcgcagaaagacttctgagatttttctggcttttcaattgtctgcacataaagtcaatatctgcaactgcccttaattatagcaataccagcgatcagtttttatctctaaatattattccttgctaaaagtaactaatgcttcttggagaaatggccaattctagaagaatgtgtaaaatgggctgacaaccaattgcacaaaaacaacaacaaaaacaaaattagccgggcgtggtggcgggcacctgtaatcccagctacttgggaggctaaggcaggagaatcacttgaacccaggagacagaggttgcagtgagccgagattacactactgcactccagccttccagacaggagcgagattccatctaaaaagaaaaaaaagccgggccggtggctcacgcttgtaatcccagcactttggggggccgaggcgggcagatcacgaggtcaggagattgagaccatcctggctaacacggtgaaaccccgtctctgctaaaaatacaaaaaattagccaggtgtggtggtgcatgcctgtaattccagctactcaggaggcttaggcaggagaatcacttgaacctggaaggcagaggttgcagtgagcagagatcacgccactgcactccagcctgggcaacagagccagacaaacaaacaaacaaacaaaaacaaacaaaaaaaaatccatgatctctaacatagctgttgaagaagtaaaaaaaaaactccaaaaatcattttgattagggtggtatacttgagccaggaacagtggcttatgtctgtaatctcaaaactttgggaggccaaggcaggtggattgcttgaagccagctgggattacaggcacccgccaccatgcccagctaatttttttgtgtttttagtagagaaggggtttcaccacataggccaggttggtcctggactccctgacctcaagtgatccacccaccttgacctcccaaagttctaggattacagacatgagccaccgcatccggctatgaaatcattctttgatcatctccttacttctgtcatatgtaacacactgtttcccagtgaatcctaatctaggctcttataaataggcataatcattaaaatagactaatctctggtcttgctcccttccaataccttcccgtagtacagggagaacaatctaaaatgcaaatctaagtatgttactccttaaagcttttaaaggctcatattttgcctatcctattttagtgtttctctagtataccgtcttatactaccatcctttctcccttttttttttttttttgagaccccatctctactaaaaatacaaaaattagctgggtgtggtggcacatacctgtaatcccagctactcgggaggctgaggtaggagaattgcttgaacccaggaggcagaggttgcagtgagccactacactccagcctgagagacagaaaaagagtccatctcaaaaaaaaaaaaaaaaaaaaaaagctgggcatggtggctcattcctgcaatcccagcactttgggaggctgaggcaggcagatgatgaaatcaggagttggagaccagcctgaccaacacgctgaaaccctgcctctactgaaaatacaaaaattagccaggcatggtggcgtgtgcctgtagtcccagctacttgggagtctgaggcagaattgcttgaacctggggggcagaggttgcagtgagccgagattgcgccactgcactccagcctgggtgacacagcgagactctgtctcaaaaaataaaataataaaataaaataaaaataaagattagcttcaaggctaacagagtatcttcctattgtagcctgagctctcagaagctagaagagggcttgagtgcagactgcagcatattagagagcacactgattaaaaaaacaaaaacaaaagaacaaaaaacaaacaagagtcttcatctgtcacacaggctcactgcagtctcaaaatcatgggatcaagggatcaccctgcctcagcctccaaagtagctagaactacaggtgtgcatgaccataactggctactttttttttttgtattttttctagagttggggtctcactatgctgcccaggctggtctcaaactcctgggctcaagcaatccacctgtctcagcttcccaaagtgttgggattacaggtgcgagctgccacaccccgcctatagcatgcactcttgattttctgagaaacaatcaacaaagtttaaccctgctactgcctaagctctcaaagtgtctgtcaaactcttgagtttatatgtatttttgaagttcagtagttgaggtcaaaacacccacctttggggttgggtctgatcgaatttgatgttaacattcttgagggaagcttgagttcactcccaagttctcacatatggtgtctgataagacatcagactcaaaggaagaggggagtttattccacatcaaactatgtaactttctggggttattgcaaagctatataacataatgcaacagagagcaatatctggggctttggagtcaagcaattaagggcttgaatccagattttaccacatacaaccagtaccacctttggcatgttgcttaagctcttagcttttttcttctataaaaattattacccaggccagatgcagtggctcatgtttgtaatcttagcactttgagaggcccaggtgagagggtcacttgagcccaggaattcaagactagcctgggcaacatagcaagagccctgtctctacaaaaaagattttaaaaattggctgagtgtggcagtgtgcacctatagccccagctactgaggaggttgaggcggaaggatcatttgagcctaggagattgaggctgcagtgagccatgaatgcaccactgcactccagtctgggtaacagggtttttaatttttttaatttaaatttaaaatttaatttttaatttaaatttaaaatttaatttttaatttttaaatttaatttttaatttaatttaaattttagtttaaaagttaaaattcaaattttaaatttaaatcaaaatttaaacatataatgtggctgggtgcggtggctcatgcctgtaactccaacactttcagaggctgaggccggtggatcacctgtggtcaggaggagttccagaccagcctggccaacatggtgaaacaccgtctctactaaaaatataaaaattagccaggcatgctggtgggtgcctgtagttccagctattcaggaggctgagggaggagaatcgcttgaacccggaaggtggaggttgcagtgagccaagatcgcgccattgcactccaacctgggaagcaagaccaaaagtcggtcactaaataaaaacttccagcctcgtctgaaggtagtcagttacgtcaattgtttgttcacggtgaattacagatcgaactccttgttctactcttccccacttctcactactgcacttgtcttaaagaaaaacagagctttagcttcttaacccacaaatggtagttaacctcagagtatagcttaaggttcaagtgtaatacagtttataaatattttcctatgttgttgagtgctgtgtaaatcttttttttttttgagatggagtctcgctctgttgcccaggtgggagtgcagtggcactatctcggctcactgcaacctccacctaccgggttcaagtgattctcctgcctcagacttctgagtagttaagattacaggcatgtgccaccatgcccagctaatttttgtatttttagtggagacaaggttttatcatgttggtcaggctgatctcaaacccctgagcttgtgatccaccagcctcagcctcccaaagtgctgggattacaggcgtgagccaccgtgcccagcccagtgctatgtaaatctaaagtactcttaaaggtatgtacctccaaacggaactcattttaattttcagttttttgtttttttttttaatggagacagggtcttgctgtctcacaggctggagtgcaatggtgcgatctcggctcactgtaacctccgcctcccaggttcaagcaattctcctgcctcagcctcctgagtagccgggattataggcccctgccatcatgcccgggtactttttatttaggagacggggtttcgccacgttggccaggctagtcttgaactcctgtcctcaggtgatccacacacctcggcctcccaaagtgttaagattataagcttgagacaccatgcctggcctgcaaatagatttcatagctgctcaatgagccaagaactactttcgtggccaggaataactgcccctttgtctccctgataagagcacattcacacctatgtgtccaggtacatctgttctgaagatgcctggccctaattgaatctcaaattctcacccttggttcttgtccttagctcctgtgactacagcagtgtatcagaggacatataaacactgctaccctttctactccacatgcaccttatcctaaatggattaatgtatcccatctttttgcctgttttgttccatgtatttaattgatttaatacgattctagcatcttaatttgatctgtgagcttttgtttcttaatagtttgcttggtagtatcatcagaggtagtgctaccactgcattgaagtaatttcccagatgcttaacctcctaaaattctcaaggacactttattcaaggaccacagagtttacaccaactacccagaagccaggaatagcttaaggagagactcaccaccagcagcttcttttcaatcaagtttcacttcaacctcacacccaggaacccattcaaattcctacatttcggtatccttagtcgaactaacttcctgtgccggaagcttttgtctgtctcagtgacttctttctttaacaaattcccttcatctcccccttcagtcaaagcccatgggggccccaggaggcatgcaatatttaccaagggctctcccccactttcctgcctctgtctggcagttgtttgcctttacttttaggtttgtagtcacagcctgttttttcttccttggacacaccagcttttctgaatggtaggattatttacagtagaattaaccttgtccttcaccccgagaactgagcttgaaattcactaatcaaggcctgtatttctcccacttctgagttttaaatttatattatgaaattcagaaaacccaggcaaattcaatccatgcttctctccttcaggtacaaactgaaatgaaaatgaaagctgagaaatgaaaataattaattttaaaaactaaaatatggtaaagctactaaaatatagtattggaagtaacacacacctccttttgggaaaagaaaggaaaattttctagagaaaggaagaaatgttaaacagagccttgtactatcctttttgcctaatctcgtattatatttgtttatttttgagacagtgacgctctgtcgcccaggctggagtggggtggtattatctggggtcactgcaacctcccgggttcaagcgattatcctgcctccgccttccaagtagctgagattacaggcgcaagccaaaacctctggcaaatttctgtatttttagtagagacagggtttcgccatattggccatgctaaacttgaactcctgacctcaggtgatccacctgccttggtctcccgaagtgctgggattacaggtgtgagccacggcacctggcccactaatcttactgcttttgactgtagttattattgttactttaaagagtattccaaatacatctctaaattcttacatgccaagaggttgaagattaatactgggtgattaaaaaaaaaagttcggaaaacataatacagggctaggctggtggctcatgcctgtaatctcagcacttcgggaggccaaggctggtagactgcttgagctcaggagtttgagactagccaggccaacatggggaagccccgtctctcctaaaaacgcaaaagttagctggcatggtggtgtgcacctacagtctgggctatttgagagactcaggcaggagaattgcttgaatccggaaagtcgaggctacagtgaggtgaaatggtgccattaagccccagtctgagcagcagaataagcccgtcttaaaaaaataaaaaagaaggctgtggctcatgcctgtaatcctagcactttgggagaccgaggagggtggatcacctgaggtcaggagttcgagaccagcctggtcaatatggtgaaaccccatctctactaaatacaaagaattagctgggcatagtggcaaatccctgtaataccagccactcgaaaggctgaggcaagagaatcgcttgaacctgggaggtgcaggttgcagtgagtagagattgcatcattgtgctccagcctgggtaacaaaagcaaagttccatctcaaaaaaaaaaaaaaattgcccagacacagtggctcacacctataatcccaccactttgggaggccgaggcaggcggatcacctgaggtcaggagttcgagaccaggctggccaacatggtgaaaccccatctctactaaaaataccaaaaattagccgggtgtaatgttgggtgcctgtaatcccagctacttaggaggctgaggcaggagaattgctcgaacccaggaaacagaggttgcagtgagccgagatcgcaccacaaaaaaacaaaaattacctgggcttggtggcaggtgcctgtagtcccagctactcggcagaggctgaggcaggagaattgattgaacccaggaggcggaggttgcagtgagccaagattgtgccactgcactccagcctgggcaatagagcgagactgtctaaaaaaacaaacgataggccaggcgcagtggctcacgcctgtaatcccaacattttgggaggccaaagctggtggatcacaaggtcaggagttcaagaccagcctggccaacatagtgaaaccctgtctctactaaaaatacaattagctgggcatggtggctcgcccctgtagtcccagctacttgggaggctgaggcaggagaatcacttgaacccgggaggcggaggttgcggtgagcagagatcgctccactacactccagcctgggcaacagagtgagactccagtcttaaaaaaaaacaaaataaaacaaaaaaaaaaaacacaaacacttggaactataccttacttcttctcttggccaattatctagataattagactggatagtcttagagagtaacattggacaattagggaaatgagagaaaagactggaaaaaccactctgataacctgcatcatgctgcttcagagtgaagggaagtgctcgcagatcagatacatttagggcaggcacaagatgggaaaagacagtaaaggattattagtgtaattcacagatgcctgcgtagctgctcttaaggtgagaacataaatcggtttccactagccttagaatttacttacatataggcctctgatgaaactttaaatgttagcatcaattacagattcatacactgaaataacccattacatttgtagattacctacaatgcacgtaagtgcccttttttctaaaactggcgtatttattttttatttatttatttatttattcatttatttatttttgagatgggagttttgctcttgtcgcccaagctggagtgcagtggtgtgatattggctcactacaacctccacctaccaggttcaagcgattctcctgcctcagcctcccaagtagctgggactacaggcataggccaccacgctcagctatttctacgcatttctaagatagcagtgtcctcagctaatttccttctccaccccaaccaaaaatttaacaaagatttatgtttaagctgtatatttactcattgaaacactcggtgaaatcagggtaaaatcaactaaaggaaaaatagttgtttcattcatttgaacttaaaccaactaaagtagtactaatgtcattacgatgcagcaaatacgagacctctttctacaaagattagcataaccaacaaattaggggatatagcaaaacagagccaaaaacggtaagaaatcaattaagtatgttacagcttaaccctttacctcaatagtttttaaaaaataagcaaagcctcccaatcccaaacaatacgaatacatcttcatcaccaatttgtacttgtattccttattcttgaggttagattctaaaccctaaagatatccaaactagtattagatctacttatctacagccagagacggcttctatcaatgttgtccttagcagccaaggttattaaaatgtcttttctaggcagggcgcggtggctcacgcctgtaatcccagctcttagggaggccgaggtgggcggatcacaaggtcaggagatcgagaccatcctggctaacacagtgaaacctcgtctctactaaaaatacaaaatattagccgggcaaggtggtgggcgcctgtagtcccagctgcttgggaggctgaggcaggagaatggcgtgaacccgggagacggagcttgcagtgagccaagaccgcgccactgcactccagcctgggcgacagagcaagactccgtctcaaaaacaaacaaaaaaaaaagtattttctccaggaagatccaataggaaaaaaaaaaaaagaaacctcgctgattaggctccaaccatactccacccctccatgagattgactggataggcatcatggaaaccagaacacgtggtttccaaacaagaaaaatcctatgagggatgggaggaggggagaggaaggattcagccagtgtccagactgaaattgagtaatatcaatttcactcatcttcacatgtcttcaggttgcatgttcgtggagtagtttaggaataaatccatggtttgtggagtactaaaatacctagcggtctgctgtattacattaaggccttccccagcagcttccaaggcagcctccaagtcactggcaggagaatttggctggaactgcatgcaggactgcagagattcctctccacagttatagaagggactgttccaggcctgattgttccaggattgggtgcaccaggtctgagtgttccaggagtggttgctccaggactggatgttctgggtctggttgctccaggttgaattgttccaggtctggttgctccacattggaaggttcccagtcgggttcaccaggcatccctggtggtaggaagagtagaggctggggtaggtaggtgctgaggccttctgaaagagaaggaggcattaacagaaagggtacaaaggacaacaagaactgtctgtgactggagttgtgtgtttcagggatggacaagattgaaagatcactgaaaggaaagaaacacaatgaagtttcctgttacctgcgtcacaccattgctattcttcggccagttgtttttctgccacctcttagatttcattctctggttctggaaccaggtcttcacctgcaggaaaaaatgacagaaactgtaaaatattcgtaatacagaggtactttgaatcaaagtatattgctaacttttattcctggccaggtgccatgtctcatgcctgtaatcccaacactttggaaagccaaggcaggcagattgcttgagcccaggagttcgctacaggctagccaacatgaggaaacaccgtgtctacaaaaatacaaaaaattagccgggtgtaatgctgcacgtctgtggacccagcttctcaggaggctgagatgggaggatcgcttgcacctgggaagtgaaggctgcagtgagccaagattgcatcactgcactccagctgggtgacaacagaaccagactgtctcagaaaaaaagagagaaatgaacattttggatagaaaataagggcaagggccgggtgtggtggttcacacctgtaatcctagcactttaggaggcagaggcaggtggatcacttgaggtcaggagttgaaaaccagcctggccaacatggtgaagccccatctctactaaaaaatacaataaaattagccaggtgtagtggcgggcgcctgtaatcccagctacttgggaggctgaggcaggagaatcccttgaacccaggaggtggaggtttcatccatttgtacttaaaccaagtaatgctaatgtcattatgatgtctcattatgaggccactgcactccagcctgggagacagagtgagactccgtctcaaaaataaacaaaagaaaagaaggaaataaagcctagaagaggataagccaattaatgaaggaaaatggccaacaagtaataaacaatgattggccttattgaatgcacacagataaaaaacaaaacaagctggagttgctggcagaaagaaaaaaaggaaaaaaaaagtttttattttaatgagaaccagtgtgagttagggtttctcctaccctggaaagtggagttagatacttcttttttattaaggaaacgttgcaaagattttcacaatattggtctgtgcaagaaagtggttaaattatgacataattattcacataatagaatatttaaggaaagaaagaggtgaagttacaaaagcatttcatcttcataaattatttgcaagaggtgatgtacggacacatagtacacacatctacatgcatccacagagatcttagccatgcaaattagtccaatttttgttcaccttattgcaaggacaaaacaagcctacctgtttgtagctgaggttcaggatgttggagagttcttgcatctgctggaggctgaggtatttctgtctctgaaatctatcattgagtacacacagctgggtggaagagaacacagttctggtcttctgtttcttgaccgggaccttgtcttccttttttgtgacactattctctgcggaagtgggttgtttgcctttgggactggtggaagaatcagggctgtcctgaataagcagatccatggaggaaggaagaggagagactgttgggaacaaataaaaggacacttttgtctaaaatttttcaaatattaaaatatcctttaaaaaaattgttttcaaagtactttgataattcccagaaccccagatctaagtaataagaagcaatttcttaaccagccctggcactttggcaagctttgtatagtattactccaagaagtcttatcagtatctcaattttgtatataatagactgcgttgggagagatctataatggtggccaatgcattgctgagcggcgctaccccttttttttaaaattaggatggaggttcactcttgttgcccaggctgaagtgcgatggcgcaatctcggctcactgcaacctccatctcctgggttcaagcgattctcctgcctcagcctcctgagtagctgggattacaggcaggcaccatcacgcctggctaattttgtatttttagtagagacagggtttctcaatgttggtcaggctggtctcgaactcctgacctcgtgatccgcctgcctcggcctcccgaagtactgagattacaggtgtgagccacctcatcaggccggcgctaccaccttttgctttaaactcatgctcaaaagctcccacactgggtgttaatagttcagaatggagattcaccaattttcacgtattgcatctcaccctaaatcactttgtttatgatcttcatcaacacctacatgattgcttaaatgacatgattctggggattctataaaaccagcacctcagctaggtgggatggctcacgcctgtaatcccaacactttgggaggccaaggtgggcagatcacttgaggtcaagagttcaaaaccagcgtgccaacatggtgaaaccccatctctactaaaaattacaaaaattagccaggagtggtggcgcatgcctgtaatcccgctactggggagactgaggcaggagaatcgcttgaacccaggaggccgtgattgcagtaagccgagagtgccactgcactccagcctgggtgacagagtgagactgtctcaaaaaaataaaaaacaaaaccagcaactgactgcccagttctcaatgctaggaccagcaggatatgtgaatccagataagcttctgtttcaatccaggccttccctttactagctctgacctcatctctaaaattatttttttaattaaaatgaggtaaccaattgaaattctctagcatagggcctggcatttactgattttgtaactagaaatgaatatctagatttagtcatcacttatatacctaattgctctgcggttttcccagtgttcaactctcaattctacccctgcagtcacataacaaagggacaggctctaaaacagcaaaaattcacaatctcttctctcttgcaagtagatctgaaaagcagaggaagcctttcaactaatgattagaattggggaaaatcctaaatattagctacctatataaactgtcacttgatgtgtgctaaagaaaacatccccacttgctcattcccaaacccagcaatgtatttttaacatttgaaattataaaggtggccaggcgtggccagccgaggcaggtgaatcacttgaggtcaggagtttgagaccagcctgaccaacacagcgaaaccccttctctactaagaactacaaaaattagccaggcgtggtggcatacatctgtaatacctgctactcgagagactgagacaggagaaatcacctgaacctaggaggcggaggttgcagtgagccaagatcacaccactgcactccagcgtgggcaacagaatgagaccctgtctcaaaaaaagaaagaaagaaagaaagaaattataaaggcaagaacattaatgcatagtttagaaaaactgggtgaatagccatgcagagtgggtcagcgcctgtaatcccagcgacttgggaagctgagggtggaggatcacttgaggtcaggagttcaagaccagcccgagctgcaaagtgagaccctgtctctacaaaaagaattttttaattagctgggcatagtgacacacgcctcttgccctagtagttgggaggctgaggcaagaggatcacttgatctcagggttgaggctgcggtgatccatgatcacaccattgcactccagcctatgtgacagagtgagtccctgattctaaaaaagaggaaaagcagggtgacattcaaatctgaggctcaaatatagcaatcatgtttacttattccttttccacaacctactctttacaactgtagttataatgtaaatgcgctttttaagctattttacagcgttcagtgttaccaatggcattcttggtatagttggttcattctcaagtttttgaaaactactgaaaaattgattttcaaaaaagtggtagcggctttatgagtatcccgagtatcccccaccccttgcagctaccagtcagaagcatgagtactagcacaggttttgaagccaagctgg

SEQ ID NO: 7 - DNA, 8151 bp, Mus musculus
cccaggaagaaccactcctaccaatactcactgtggtagagtcttcacatgggagatgttacgagaggacggcccttccctctctgcttatacacagaagccgacttaagctgggttagagtgctttcactcacttatctgtgagcacaaggactgatcggcaaactttgaacttgggatgtggaaataggaagatcaggagtttgggaccagctagagcaatagactgtgaggccagtctcgggtacgtgaaactctatctcaaagaaatgaccaaaaccaaatttgaaatacgataaatttcttcttccattgcttagacggctgaggcacttgggattgcagtaagtctgaagccagcctaggttttacagtgagaacttgtctcaaaacaaaacagaaggcctctacattaatttaaacactccttaaattgggcatggtggtagacaagcctggtctacatactgagtataagctactcaaggcaacagagaaaaacctgtctcaaaaccaaagcatggaccaacttactaaggtagcccgagtcttaagcaggacacaggctctttcttcagacttgcgttaaaaagccgcacttttggagggaagatttccccaggtttcccaatgtgaagagcaagcaagaaacgctgagtgctgaaaggaaagccgtgtataaacagagactttggcagcaaggtctgactctttcatgtctgtagaaagaatggaagaggaaactcagatcccccacttgacctgaaacttcccactagagatcgccagggtctggaggtgcagccgtggttaaaagatgaataaagtgaaatgaggtaaagcctctttttgggggggggggatgtctttagatcagaggatgccccctaagctttccctccctcccagtctgggtcaccttacagcttcttttgcattacaatgtccatggtggaccctgcaggtgggattaactgtgaattcacagggctggtggggcgtgggtgccgcctgggtgcctgggagaatagggggtgggtagggtaggaggcttgaggggggaggagcaggacctaccctttaaatctatcgccttgagccgttggccttcagataggctgatttggttggtgtcttgctctttctgtgggaaggctgcggctcacttccttctgacttcttgataattttgcattagacatttaactcttctttctatgatctttccttctagacactgagttttttggttgttgcctaaaaccttttcagaaatcccttccctcgccatcacactgacatgagtgtgggtcttcctggtccccacagtttgcctagttctgaggaagcatcgaattctgggaacgcctcatcaatgcctgcagtttttcatcccgagaactattcttgcttacaagggtctgctactgagatgctctgcacagaggctggtaaggaattcagtccccgaagaacccagtaaattagggtaagagtagaaaaaacgggctgaagggttattgcttctttatgaaccgtagtagtcattaacataagcgggtgtccttatcactcttctggaaacccctctgagtttgaccggtgatacgttggccttctagtctgaaatagagatccgggacacaggacggagcaatataaggctcttgtgtgtatttgagaacctaaatatttgggctctttggaatatgttcgggggcagtgagtggtgtcttcagtagcagggagacctaacatcctagcttggaatgagcaccccatttttttggtgaggttatacagttagtttgcaatttgcccaaatggccgttttctccagcagaagcagttagcatttctctcaacctttgggaatatggatgtcacttagcagttctgggtttgtgagctcagtgctccttccaaaccccaaacaagtgtacacagtttaagtcattcattcttatagctagcatctggagccaaggtctgaagctcattgtctgtacagagtcagcccagtactcaggcttgtaaatggtagaaccaagaggctgctaggctgtgtgtgccacggtgctcaggtgcgtgttgtgatgctcgggtgtgtgcagcgatgctcgggtgtgtgcagtgatgctcgggtgtgtgcagcggtgcttgggtgtgtggagcgctaggaagtgtgtgtccccttttttctgagcttttaagttaatgtctgtcatcttgatttttctgatttatgggttcaatttttgattttttttttgtttgtttttttttgttttttcgagacagggtttctctgtgtagccctggctgtcctggaactcactttgtagaccaggctggcctcaaactcagaaatccgcctgcctctgcctctgcctccctcaatttttgattttggaggtgggaaaagtgctgggttaggaatgaacgggtggggatagcctttgtaagtgatgtgtgtttttagagcatgtgtgtagagcatgtgtgtttgtagtgcgtgcccctagtgccagcagatggcataattttccatttagaagctgctttcagggctgtctacttatttgctagactgcaggctaacctcagcattgccatcagcgtggagcacagatgtcttcagtgtaggaggtgtcttctacctgctgctggatctaggaaatgttggggcaaagcttggtggaggagcacttgtctcttgctgaaggccctggaaaaaaacaaaaaagctaaccgaagagctagagggtcaaggataagagaaacgaatttggttaaccgaaattttactctagtaattaataattaactggaccctctgactggctgctcttgtactagcagaaaagatggtgggatatttttatttatttatttttttaaagatttatttattatatgtaagtacactgtagttgtcttcagacactccagaagagggcgtcagatcttgttacagatggttgtgagccaccatatggttgctgggatttgaactccagaccttcggaagagcagttgggtgctcttacccactgagccgttggatgctcttacccactgagccatctcaccagccccagtgggatcattttaaaatatacctttaaaaaaaaattgggggtggggggtgtctaaactcaggactgtgcattcctaacaacaagtgatttaaccctggaaatttccttagataacattcagtataatggatttcgtcatgacattttttgttcataaatattagttcatccctaaatgttaatgtgtgtgtgtgtgtgtgtgtgtgtatgtatgtatgtatgtatgtatgtatatatgtatgtatgtatagatatagctgactcagtggtagtagagtatgaaaggtcccaacaggattctattcacccagcaccatgcaaaaatctaggcgagataaaagtccccccaaacctgagtctttggataaacctccactcagaaggtagagaggtaggacccagagagcaggccagccttggctacctgagaccctatcccttagaaagaaaagaaaaccacaaacatagactagatcctctgctgcctaagctcttgtgctgtcttgtctgtctgtctctatttgttgagacgggctgatctcaaattctcccatctcagctactggagcaggggggctttagatttgtgctacccactgtcaggatcagaggtttacagtgtagatgcggtcacggttctaatgaagagggagcagggagaagggattggaaagagcagactacaaactcaaacctgtcttcatcctgccattgaactgagtattgtttggttagttgtctttttttttttttaaataggattcccagggtctaattgtataatttaaataactaatgaaacttaaaaacactgtatgtagggctggtgagatggctcaacaggtaaaagcactgactgcccttcccaaagtcctgagttcaaatcccagcaaccacatggtggctcacaaccatccgtaatgagatctgatgccctcttctggtgtgtctgaagacagctacagtgtacttacatataataataaataaatatttagcagagacattcttttttttttttaattaattaatcccatgtggttgctgggaattgaactcaggaccttcggaagagcagtctgcactcttaaccttaaccgctgagccatctctccagccccctaagtagaaacattcttaaaaaaaaaaaaaaaaaaaaaaaaaacactataaaagggagatctatgcaaaatggtgttacccaggggtgacaaagtattccaagaatactttccaaaaattaggtttttcttgttacttagatctatgaagataattgctttgaaagtaaatatagccgggcgtttaatcccagcacttgggaggcagaggcaggcgcatttctgagttcgaggccagcctggtctacaaagtgagctccaggacagccagggctatacagagaaaccctgtctcgaaaaaaccaaaaaaaaagaaaaaaaaaaaaaaaaaagaaagaaagaaagaaagaaagaaagaaagaaagaaagaaagaaagtaagtaaatatattaaatgtaacatttaattatctgggaaaatgatttatttgtttggttggttttgtttttgtttttttggtcagggtttctctgtgtagccctggccatcctggaatttactttgtaaaactgactggcctttttaaaatttatttattatatgtaagtacactgtagctgtcttcagacacaccagaagagggcatcagatctcattacggatggttgtgagccaccatgtggttgctgggatttgaactcaggaccttcggaagagcagtcagtgctcttaaccgctgagccataacccccaccccaccccgtgaactgactggacttaaacccataatctgcctgcttgagtgtcccaagtgctgggactaaaggtatgtaccaccatgccaggctgagaatgtcttatttattaacaagttatctatttatttctaacagcctctcctcgcccttcctctgaagacctgcctcttcaaggcagccctgattcttctaccagtcccaaacaaaagctctcaagtcctgaggctgacaagggccctgaggaggaggagaacaaggtccttgccaggaagcagaagatgcggactgtgttctctcaggcccagctgtgtgcactcaaggacaggtttcagaagcagaagtacctcagcctccagcagatgcaagaactctcctccattctgaacctgagctataagcaggtggggtccttagaagttgctgtaatgtaacacaatgagactgacttgctaatgaatcgaactaacgtctggacgtctctctaactatcctatcctcctatcctatgcgcctgttaaaatcataattatgtgattgattgattgattgattatgtataagtacactatagctgtcttcagatacaccagaagagggcatcagatctcattacggatggttgtgagccaccatgtggttgctgggatttgaactcaggaccttcggaagagcagtcagtgctcttaaccgctgagccatctctccagccccaattatgtgatttatatatttcccagtttgtttcattggttactttatcttctacttcacctcccacacccatccccaaatcagggtctcactgtagccctgactggtctctgtagaccaggctgggagaggttcacctgcctctgtctcctgggtgctggaaataaaggtgtgcctggcttttttcctttcttttcttttttaagattgtttatttttaaattcctttagttcattggtgttttgcctgcatgtgtttgtctttgtgagagtatcagatctcctggactagagttacagacagtcgtgagctgccatgtggccgctgagaattgaacccaggtcctctggaagagcagccagtgctcttaacagaagagccatttcccccagcacctgtctttttcaagaaagagtttcactttacaggcctggctgtcatgtttaaggtcgggctgtagacctgtctgcattctgtatgtcttagcttgttcgaatgtcctgtcactctgcaggttaagacctggtttcaaaaccaaaggatgaagtgcaagcggtggcagaaaaaccagtggttgaagactagcaatggtctgattcaggtaacaagatgttttctctgctttcctttttccccctccatcttaccatcttattttatgtgtctgtgccgtgtgtgtgtgtgtgtgtgtgtgtgtggctgacctatggctgttgggtatggatcccagatttcctgtaagagcagtcagtggctctgcctttgcttcccagtgtcatcctgatccatctatgtccattagtcctgtccctttcccatccctcttcctccacgcactctttcttgtgatctttggttctttgaggcaggctctctctatgtagccctggcagtcagagatctgcctgcctagtctcaggagtgctggggttaacggcctgtgcggccatgctaatcttttcagtatttctgcagtttacatctttagagtccccttttcactcattgcattaatcacctctttcagaagggctcagcaccagtggagtatcccagcatccattgcagctatccccagggctatctggtgaacgcatctggaagcctttccatgtggggcagccagacttggaccaacccaacttggagcagccagacctggaccaacccaacttggaacaaccagacctggaccaacccaacttggagcagccaggcctggaccgctcagtcctggaacggccagccttggaatgctgctccgctccataacttcggggaggactttctgcagccttacgtacagttgcagcaaaacttctctgccagtgatttggaggtgaatttggaagccactagggaaagccatgcgcattttagcaccccacaagccttggaattattcctgaactactctgtgactccaccaggtgaaatatgagacttacgcaacatctgggcttaaagtcagggcaaagccaggttccttccttcttccaaatattttcatattttttttaaagatttatttattcattatatgtaagtacactgtagctgtcttcagacactccagaagagggcgtcagatcttgttacgtatggttgtgagccaccatgtggttgctgggatttgaactcctgaccttcggaagagcagtcgggtgctcttatccactgagccatctcaccagcccctggtttatttttttaattattatttgctttttgtttatcaagacagggtttctctgcatagctctaattgtctttgaactagctctgcagaccagcctggccttgaactcagagatctgcccacttatctttgcctcctgaatgctgggaccaaaggtggcataccaccacacctggcatatatattgtttatttctatttctatttttattggtgccagagcaaacctaggacttagaacatgctgggcaccaactcaacttctgagctctatttacaacttggtgtgttagtgtatttgtcttagttctgaatttgtcctttttttagtgttaactctaggctttggagacagtgaggtgcatatactctctccttcccaagaataagtgcttgaacacccttacccacgcccacccacccatgctagtcttttttcttagaagcgtgggtcttggtatacactgtgtcattttgaggggtgaggtttaaaagtatatacaaagtataacgatatggtggctactctcgaggatgagacagaaggaccaggagtttgagggtagctcagatatgcaataagttcaaggccaacctgtactatgtttaaatagtaagacagcatctcgataaaataataaaactaaagtctcaacaaaataaaagctttcacctattaaggtgcttgcttgtccttggagtcccccaagagtaactgctatgttaatatctgtagaaagatgtttatatttgactgtaccatgatgaaccgatgccagctggactagtttaaacaaaataaaacactaattttaccttta

SEQ ID NO: 8 - DNA, 6357 bp, Homo sapiens
agagaggggttgagtagtcccttcgcaagccctcatttcaccaggcccccggcttggggcgccttccttccccatggcgggacacctggcttcggatttcgccttctcgccccctccaggtggtggaggtgatgggccaggggggccggagccgggctgggttgatcctcggacctggctaagcttccaaggccctcctggagggccaggaatcgggccgggggttgggccaggctctgaggtgtgggggattcccccatgccccccgccgtatgagttctgtggggggatggcgtactgtgggccccaggttggagtggggctagtgccccaaggcggcttggagacctctcagcctgagggcgaagcaggagtcggggtggagagcaactccgatggggcctccccggagccctgcaccgtcacccctggtgccgtgaagctggagaaggagaagctggagcaaaacccggaggaggcaagtgagcttcgacggggttggggtgtggggaggtggtcatgacagggcagcctgatggggaagtggtcacctgcagctgcccagacctggcacccaggagaggagcaggcagggtcagctgccctggccagggaggggtgtgtatcaactgctggcagccctggcaggcaggggccaggtgggaagtggaagctggatttcgaagagacaactgccggtgagggcagagcagcctgggagagtcggaagctggcccaggctggcctttgctctggcccagcccttgtcagggtctctcacatctcctaggcctgcccagggtctggtcactcattactggcccagcaccagacccagcttggggttggtttgagccccttttcccacccttagtcctgcttgaaaatttgacccttatcagacccaagattttggccttagggttaagcatagcctgagggtaaaaacagtgctcattccaggattattgttcctgaaagtctagggtgtgactcgtttctgataggatctcctgtttgggctgtgtgtgtgcgcgttgtgagctgggtttacctccagtcaagtatagggcttgtcttccccggatctctgcctcaggccaatgactggccactgtgttaaggtgcacaccctggcaccccttgtagaaagctggattttgattgacttcagcctcagttccaaagttgtaaacaagaaaaatggtgagagatttctccaggccatttgcaaatatagagctgctgcgggattgaaggcatccagccctgctgaggactattaaagatgtatcttccagtccttcaaggcgacaagtgtaagcaattagagattaaatactaagccttgagacctcacagaaaggtgtgactggtttctggagtgaccgagaagccccaacctcttcgcaggaggtcactgctgagccttgaatgataatggctggcaattgtggtccacttcctaagtgcctggctgtgtgctccgtttatacatcattatctcattaaccagcacaaaatctcctagggggaggtattattatcctatttaacgggttttaactgctaaatgatgaagcgaggatttggaccagtgtttattccaaaaccccaaaacagaatttggaaaatccaagatagcagagggcatttatcagtttgagttattggctgagcagaagttggggatgaaaacagcctatttgaaattgatatgatcaagcaccattgaaacacttccttgaggcttcagaactacaaaaaggccttgtttttttctcactagctgtgcacctctgtctgccggcagcctcatatggcatgccccagggctcagtccttcaacctctgctctatctacccttccttcctctcacccaccctcaaggcttaaatgccatttagacaccagatgactaccgcgttttctgtctcttgtgatggctccctgaactgctccaccctgatcacccagttgctcaaggccaaacccagtcatcctcagtttctttcatgtcctacatcctatccttaagaaacatcctgaatcaatcacaacctaaccctggcctcagccaccatcatctctgctgggattaccgcagtagcttctcaaattatactgcttcctccctactgtctgtggccaacacgtcaactagagtcagtgttttaaaaggtgtggccaggcactttgggaggccgaggcaggcgaatcacctgaggtcgggagttcgagtccagcctgaccaacatggcgaaaccccatctctactaaaaatacaaaattagctgggcgtggtgacgcatgcctgtaatctcagctactcaggaagctgaggcaggagaatcgcttgaacctgggagatggaggttgcggtgagccgagatcgcgccagtgcactccagcctaggcaacaaaagcgaaactctcaaaaaaaaaaaaaaaaaaggtgaggctaggtgcggtggttcacacctgtaatcccagcactttgggaggccaaggtggacagatcacttgaggtctcctgaccagcctggccaacatggtgaaaccccatatctactaaaaatacaaaaattagccgggcatggtggtgggtgcctgtagtcccagctactcaggcggctgaggcagaatagcttgaacccagaaggcggagattgcagtgagccaagatcacgccacagcactccagcctgggcgatagaacgagattccgtcttggtggggagaaaaagggtgagagatcatttcgcttggactaaaacaaagtcactatgtctgcaacaggatctacctagccaccagaccagctttgggctctggaaggcccacttcagggccttgccacattagactcttgtcctttgctcaaacaatcaccttctctgtctttaaaagtgtcaccctcctccataatctccttccctcctttaccctactcctatagactgctttattttttttttaatttttgagatggagtctcactctgtccctcaggctggagtgcagtggtgcgatcttggctcactgcaaactccacctcctaggttcaagcaattctcctgcctcagcctcctgagtagctgggattataggggagcgccatgatgcccagctaatttttgtatttttagtagagacagagtctcactatgttgaccaggctagtcttgaactcctgacctcaagtgatctacccaccttggcctcccaaagtgaagggattacaggcatgaccactgcgcccagactgctttacttttttccataatatatatatatattttaaatagaggcagcaggggtgggagaaggggcggcacgggtctcactatgttacccaggctgctttctaactcttgggctcaagcagtctgcccaccttggcctcccaaagtgctaggatttacagacatgagccactgtgcctggccattttttattttatttacttttttatttttcagagcaggagtggaagtttattattaaaaagttatagggcagggaaaaaaggaaagtgcacttggaagagatccaagtgggcaacttgaagaacaagtgccaaatagcacttctgtcatgctggatgtcagggctctttgtccactttgtatagccgctggcttatagaaggtgctcgataaatctcttgaatttaaaaatcaattaggatgcctctatagtgaaaaagatacagtaaagatgagggataatcaatttaaaaaatgagtaagtacacacaaagcactttatccattcttatgacacctgttacttttttgctgtgtttgtgtgtatgcatgccatgttatagtttgtgggaccctcaaagcaagctggggagagtatatactgaatttagcttctgagacatgatgctcttcctttttaattaacccagaacttagcagcttatctatttctctaatctcaaaacatccttaaactgggggtgatacttgagtgagagaattttgcaggtattaaatgaactatcttcttttttttttttctttgagacagagtcttgctctgtcacccaggctggagtgcagtggcgtgatctcagctcactgcaacctccgcctcccgggttcaagtgattctcctgcctcagcctcctgagtagctgggattacaggtgcgtgccaccgtgcccagctaatttttgtgtttttagtagagacggggtttcaccatgttggccatgctggtcttgaactcctgacctcgtgatctgcccacctcggcctcccaaagtgctggaattataggcgtgagccaccgcgcccagcaaagaacttctaaccttcataacctgacaggtgttctcgaggccagggtctctctttctgtcctttcacgatgctctgcatcccttggatgtgccagtttctgggggaagagtagtcctttgttacatgcatgagtcagtgaacagggaatgggtgaatgacatttgtgggtaggttatttctagaagttaggtgggcagcttggaaggcagaggcacttctacagactattccttggggccacacgtaggttcttgaatcccgaatggaaaggggagattgataactggtgtgtttatgttcttacaagtcttctgccttttaaaatccagtcccaggacatcaaagctctgcagaaagaactcgagcaatttgccaagctcctgaagcagaagaggatcaccctgggatatacacaggccgatgtggggctcaccctgggggttctatttggtgggttcccctctgcagattctgaccgcatctcccctctaaggagtatccctgaacctagtggggaggggcaggggcagactaccctcacccatgaagaggagtagggagagggagaagatgctttgagctccctctgggaagaggtggtaagcttggatctcagggtcacaagggccctgcgtgctccctcactttgcttctcttttgactggcctcccccagggaaggtattcagccaaacgaccatctgccgctttgaggctctgcagcttagcttcaagaacatgtgtaagctgcggcccttgctgcagaagtgggtggaggaagctgacaacaatgaaaatcttcaggaggtaagggtgggagggggatacccggggaccttccctttcttggcctaatttccattgcttccatcactggctcgtagctctccgtctttggtgcagtggttctcagtgggatggagtgaaattcctcagttctgctgggataaggtccagagccaacccttccaggatcctgccttttcacaccaccacctggctctgctgacacatctagtcacagacccctgtgatgctgttactcagcaagtccaaagcttgcccttgtcacccccttcccacctgcacagatatgcaaagcagaaaccctcgtgcaggcccgaaagagaaagcgaaccagtatcgagaaccgagtgagaggcaacctggagaatttgttcctgcagtgcccgaaacccacactgcagcagatcagccacatcgcccagcagcttgggctcgagaaggatgtgagtgccatgtctctctgcgggctccatctctttcccctgtcaccacctcgctttccctagctctggctcctccaactgctctagggctgttggctttggacagaatgtccaagcagtcaggcctgtctcagctcattctctaatgtcctcctctaactgctctagggctgttggctttggatagaatgtccaagcagagtcaggcccgtctcagctcattgtctaatgtcattctcctttctgtcattcacttgcaggtggtccgagtgtggttctgtaaccggcgccagaagggcaagcgatcaagcagcgactatgcacaacgagaggattttgaggctgctgggtctcctttctcagggggaccagtgtcctttcctctggccccagggccccattttggtaccccaggctatgggagccctcacttcactgcactgtactcctcggtccctttccctgagggggaagcctttccccctgtctccgtcaccactctgggctctcccatgcattcaaactgaggtgcctgcccttctaggaatgggggacagggggaggggaggagctagggaaagaaaacctggagtttgtgccagggtttttgggattaagttcttcattcactaaggaaggaattgggaacacaaagggtgggggcaggggagtttggggcaactggttggagggaaggtgaagttcaatgatgctcttgattttaatcccacatcatgtatcacttttttcttaaataaagaagcctgggacacagtagatagacacactta

SEQ ID NO: 9 - DNA, 6243 bp, Pan troglodytes
  misc_feature (3546)..(3892): n is a, c, g, or t
cctcatttcaccaggcccccggcttggggcgccttccttccccatggcgggacacctggcttcggatttcgccttctcgccccctccaggtggtggaggtgatgggccaggggggccggagccgggctgggttgatcctcggacctggctaagcttccaaggccctcctggagggccaggaatcgggccgggggttgggccaggctctgaggtgtgggggattcccccatgccccccgccgtatgagttctgtggggggatggcgtactgtgggccccaggttggagtggggctagtgccccaaggcggcttggagacctctcagcctgagggcgaagcaggagtcggggtggagagcaactccgatggggcctccccggagccctgcaccgtcacccctggtgccgtgaagctggagaaggagaagctggagcaaaacccggaggaggcaagtgagcttcgacggggttggggtgtggggaggtggtcatgacagggcagcctgatggggaagtggtcacctgcagctgcccagacctggcacccaggagaggagcaggcagggtcagctgccctggccagggaggggtgtgtatcaactgcaggcagccctggcaggcaggggccaggtgggaactggaagctggatttcgaagagacaactgcaggtgagggcagagcagcctgggagagtcggaagctggcccaggctggcctttgctccggcccagcccttgtcagggtctctcacatctcctaggcctgcccagggtctggtcactcattactggcccagcaccagacccagcttggggttggtttgagcccctttttccacccttagtcctgcttgaaaatttgatccttatcagacccaagattttggccttagggttaagcatagcctgagggcaaaaacagtgctcattccaggattattgttcctgaaagtctagggtgtgactcgtttctgataggatctcctgtttgggctgtgtgtgtgcgcgttgtgagctgggtttacctccagtcaagtatagggcttgtcttccccggatctctgcctcaggccaatgactggccactgtgttaaggtgcacaccctggcaccccttgtagaaagctggattttgattgacttcagcctcagttccaaagttgtaaacaagaaaaacggtgagagatttctccaggccatttgcaaatatagagctgctgcgggattgaaggcatccagccctgctgaggactattaaagatgtatcttccagtcctccaaggcgacaagtgtaagcaattagagattaaatactaagccttgagacctcacagaaaggtgtgactggtttctggagtgaccgagaagccccaacctcttcgcaggaggtcactgctgagccttgaatgataatggcggcaattgtggtccacttcctaagtgcctggctgtgtgctccgtttatacatcattatctcattaaccagcacaaaatctcctagggggaagtattattatcctatttaacgggttttaactgctaaatgatgatgaggatttggaccagtgtttattccaaaaccccaaaacagaatttggaaaatccaagatagcagagggcatttatcagtttgagttattggctgagcagaagttggggatgaaaacagcctatttgaaattggtatgatcaagcaccattgaaacacttccttgaggcttcaggactacaaaaaggccttgtttttttctcactagctgtgcacccggcagcctcatatggcgtgccccagggctcagtccttcaacctctgctctatctacccttccttcctctcacccaccctcaaggcttaaatgccatttagacaccagatgactaccgcgttttctgtctcttgtgatggctccctgaactgctccaccctgatcacccagttgctcaaggccaaacccagtcatcctcagtttctttcacgtcctacatcctatccttaagaaacatcctgaatcaatcacaacctaaccctggcctcagccaccatcatctccgctgggattaccgcagtagcttctcaaattatactgcttccttcctactgtctgtggccaacacgtcaactagagtcagtgttttaaaaggtgtggccaggcactttgggaggccgaggcaggcgaatcacctgaggtcgggagttcgagtccagcctgaccaacatggagaaaccccatctctactaaaaatacaaaattagctgggcgtggtgacgcatgcctgtaatctcagctactcaggaagctgaggcaggagaatcgcttgaacctgggaggtggaggttgcggtgagccgagatcgcgccagtgcactccagcctgggcaacaaaagcgaaactctcaaaaaaaaaaaaaaggtgaggctaggtgcggtggttcacacctgtaatcccagcactttgggaggccaaggtggacagatcacttgaggtctcctgaccagcctggccaacatggtgaaaccccatatctactaaaaatacaaaaattagccgggcatggtggtgggtgcctgtagtcccagctactcaggcggctgaggcagaatagcttgaacccagaaggcggagattgcagtgagccaagtgtcaccctcctccataatctccttccctcctttaccctactcctatagactgctttatttttttttttaatttttgagatggagtctcactctgtccctcaggctggagtgcagtggtgcgatctcggctcactgcaacctccacctcctaggttcaagcaattctcctgcctcagcctcctgagtagctgggattataggggagcgccatgatgcccagctaatttttgtatttttagtagagacagagtctcaccatgttgaccaggctagtcttgaactcctgacctcaagtgatctacccacctcggcctcccaaagtgaagggattataggcgtgaccactgcgcccggactgctttacttttttccataacatttttttttttttaatagaggcagcaggggtgggagaaggggcggcacgggtctcactatgttacccaggctgctttccaactcttgggctcaagcagtctgcccaccttggcctcccaaagtgctaggatttacagacataagccactgtgcctggccattttttattttatttacttttttatttttcagagtaggagtggaagtttattattaaaaagttatagggcagggaaaaaaggaaagtgcacttggaagagatccaagtgggcaacttgaagaacaagtgccaaatagcacttctgtcatgctggatgtcagggctctttgtccactttttatagccgctggcttatagaaggtgctcgataaatctcttgaatttaaaaatcaattaggatgcctctatagtgaaaaagatacagtaaagatgagggataatcaatttaaaaaatgaggagtaagtacacacaaggcactttatccattcttatgacacctgttacttttttgctgtataagtgtgtnnnnnnnnnnnnnnnnnnnnnnnnnnnnnnnnnnnnnnnnnnnnnnnnnnnnnnnnnnnnnnnnnnnnnnnnnnnnnnnnnnnnnnnnnnnnnnnnnnnnnnnnnnnnnnnnnnnnnnnnnnnnnnnnnnnnnnnnnnnnnnnnnnnnnnnnnnnnnnnnnnnnnnnnnnnnnnnnnnnnnnnnnnnnnnnnnnnnnnnnnnnnnnnnnnnnnnnnnnnnnnnnnnnnnnnnnnnnnnnnnnnnnnnnnnnnnnnnnnnnnnnnnnnnnnnnnnnnnnnnnnnnnnnnnnnnnnnnnnnnnnnnnnnnnnnnnnnnnnnnnnnnnnnnnnnnnnnnnnnnnnnnnnnttctctaatctcaaaacatccttaaactgggagcatacttgagtgagagaatttgcagatattaaatgagctatcttcttttttttttttttctttgagacagtcttgctctgtcacccaggctggagtgcagtggcgtgatctcagctcactgcaacctccgcctcccgggttcaagtgattctcctgcctcagcctcctgagtagctgggattacaggtgcgtgccaccgtgcccagctaatttttgtgtttttagtagagacggggtttcaccatgttggccatgctggtcttgaactcctgacctcgtgatctgcccacctcggcctcccaaagtgctggaattataggcgtgagccaccgcgcccagcaaagagcttctaaccttcataacctgacaggtgttctcctcgaggccagggtctctctttctgtcctttcacgatgctctacgtcccttggatgtgccagtttctgggggaagagcagtcctttgttacatgcatgagtcagtgaacagggaatgggtgaatgacatttgtgggtaggttatttctagaagttaggtgggcagcttggaaggcagaggcacttctacagactattccttggggccacacgtaggttcttgaatcccgaatgaaaaggggagattgataactggtgtgtttatgttcttacaagtcttctgccttttaaaatccagtcccaggacatcaaagctctgcagaaagaactcgagcaatttgccaagctcctgaagcagaagaggatcaccctgggatatacacaggccgatgtggggctcaccctgggggttctatttggtgggttcccctctgcagatgctgaccacatctcccctctaaggagtatccctgaacctagtggggaggggcaggggcagactctaccctcacccatgaagaggagtagggagagggagaagatgcttgggctttgagctccctctgggaagaggtgggaagcttggatctcagggtcacaagggccgtgcgtgctccctcactttgcttctcttttgactggcctcccccagggaaggtattcagccaaacgaccatctgccgctttgaggctctgcagcttagcttcaagaacatgtgtaagctgcggcccttgctgcagaagtgggtggaggaagctgacaacaatgaaaatcttcaggaggtgagggtgggagggggatacccggggaccttccctttcttggcctaatttccattgcttccatccctggctcgtagctctccgtctttggtgcagtggttctcagtgggatggagtgaaattcctcagttctgctgggataaggtccagagccaacccttccaggatcctgccttttcacaccaccgcctggctctgctgacacatctagtcacagacccctgtgatgctgttactcagcaagtccaaagcttgcccttgtcactcccttcccacctgcacagatatgcaaagcagaaaccctcgtgcaggcccgaaagagaaagcgaaccagtatcgagaaccgagtgagaggcaacctggagaatttgttcctgcagtgcccgaaacccacactgcagcagatcagccacatcgcccagcagcttgggctcgagaaggatgtgagtgccatgtctctttgcgggctccatctctttcccctgtcaccacctcgctttccctagctctggctcctcctccaactgctctagggctgttggctttggacagaatgtccaagcagagtcaggcccgtctctcagctcattgtctaatgtcattctcctttctgtcattcacttgcaggtggtccgagtgtggttctgtaaccggcgccagaagggcaagcgatcaagcagtgactatgcacaacgagaggattttgaggctgctgggtctcctttctcagggggaccagtgtcctttcctctggccccagggccccattttggtaccccaggctatgggagccctcacttcactgcactgtactcctcggtccctttccctgagggggaagcctttccccctgtctccgtcaccactctgggctctcccatgcattcaaactgaggtgcctgcccttctaggaatgggggacagggggaggggaggagctagggaaagaaaacctggagtttgtgccagggtttttgggattaagttcttcattcactaaggaaggaattgggaacacaaagggtgggggcaggggagtttggggcaactggttggagggaaggtgaagttcaatgatgctcttgattttaatcccacatcatgtatcacttttttcttaaataaagaagcctgggacacagtagatagacacactta

SEQ ID NO: 10 - DNA, 4746 bp, Mus musculus
gaggtgaaaccgtccctaggtgagccgtctttccaccaggcccccggctcggggtgcccaccttccccatggctggacacctggcttcagacttcgccttctcacccccaccaggtgggggtgatgggtcagcagggctggagccgggctgggtggatcctcgaacctggctaagcttccaagggcctccaggtgggcctggaatcggaccaggctcagaggtattggggatctccccatgtccgcccgcatacgagttctgcggagggatggcatactgtggacctcaggttggactgggcctagtcccccaagttggcgtggagactttgcagcctgagggccaggcaggagcacgagtggaaagcaactcagagggaacctcctctgagccctgtgccgaccgccccaatgccgtgaagttggagaaggtggaaccaactcccgaggaggtaagtgaagggacttggctgggctggcagaggcagcagtgaagggaattgggaacatgtagggtagccaccctgcctgccaaaggtggtgatggctgccgggcctcctgagaagcacgacgcagtgtggactagaacccagaattgcaagaatcagaaaccggcctggattgtttcggcctggcccttgtcatgtaggtcacctaggcctggcctgtgtcccgacacttgcttcatgccatcactgtctgtacaccagtgatgcgtgaaaatcagcccccccccaaaaaaaaaaacatatcagcccctctggggacttggatcacagtcggacccaggaacttggccttaaggttaggcatggctgggggggtaaaaaatggtgcttatcctggagttattgttactgaagaggttgggtgtgactggctgctgataggagctcttgtttgggccatgtgtggagtagggctcaccttcagtcaagtttacggcctgtctactttagcctcagactccatgagtcacctttacacgagcagacccttgtagtgcctgaggtgcagatctgatcgatttcagcctttctacctttccttgtaaacaagaaagggacacccttgggtaggggagttttatctccaggccatcttaagatcattctgtgagtgcacgggccttgcttagtgtctgatggcctacagccagcactctggagcaagtgtaagcaattagccttaagaacaaggtgcgagtggataccgatgcccgccgggagttccgacagcttagcgattgttgtagcaggagtcccctccctaagtgccagtttctgtgttatctcaggtcctgtatgccgccgggagtcccctaggaaggcattaatagtttatctcacatcttaaatggcccttaatgaagcaagagatttgaaccttagttaagctaatcccaaatcctcaaaataggatttagaaaagccaaagacactgctgagggcgattacaagttttggtcttttgaggagcagttggagatgaaagtctgtctgaagccgagagaatccttttccattgaaatggcattgaggtgtgcctcactggctgctgcttctgtctgtgccctgggttggccagcctttgtggagcacctcagccctccatcctggacctttgctccaacaacctgctcctcttccgccctcaaggctgacttgcatctccccagatgactgcctccatttctgtcttctgttagagacagaaaagcctgagaaaccgacagccattttggggggggggggtccggttcacacgctgcaacttagaaagcacactcaactggccatctgttataccctccccacctggtcccaaccatcactgtgtactactgagaagaaggcagccttagccacaccctcgagtgcccctgccgttctattgctcatacatcgattgatatccctgtttcaactttgaaaaaaaaaaatttttttttttttgtggtgtgtgcatgcctgctactgtacacctgtgggcgtcagaggtggtcctctgcaccctccggccagtaccgcatccagggtgagtcagatgatttcctgtggtttgggcctcaaggcttctcacctccagaggcttctagcctgctgccttgctttctctgtcgcactctagtacagcaggagttttcttcgcactccggagtgttgtcagctcctggggcatggacatttggctacttagagtgtgctgtgtaggttttcatttagagctgaacagagggatggatcttattaccccagcccttgagacactgaggcaggagagcttcctagtgagtccctgtttcaatatcttcactaatactgtgtcatactttgggactttctttcttcctttctttcttttgattttttttttttttatatgagtacagtgtacctgtcttcagacacacaccagaagagggcatcagatcctactacagaaggttgtgagccaccttgtggttgctgggaattgaactccggatctccggaagagaagtccgtataccaacttctgtattagtcagggttctctagagtcacagaacttatggacagtctctagatagtaaaggaatttattgatgacttacagtcggcagcccaattcccaacaatggttcagtcgcagctgtgaatggaagtccaaggatctagcagttacttagtctcacgcagcaagcaggcgaaggagcaagagctagagcttaactgctgagccatgtgtttcttgagtaaagggattacatgctcgttcgtctggtcaattctgcagccttaaaacttcttcagaatagggtgacattttgtcctcagtggggcggttttgagtaatctgtgagcagataggaacttgctggggtactgcacagaactctgggtagtgtggtactgtagatggctaggttctggggggggaaagagccatctatgtcacctaggaatagagtgaataacatttatataatcagaccagcccttgaggaggctgagatcttttcatggggcaccctagggtcacagtcccagctggtgtgactctgacaagtctgcctttctcactacagtcccaggacatgaaagccctgcagaaggagctagaacagtttgccaagctgctgaagcagaagaggatcaccttggggtacacccaggccgacgtggggctcaccctgggcgttctctttggtgggtctcccccagcatgttctgatctcacggctcttaatgtaggcgcaagggggtggggcatcttaggagctgcttctccacaggtaagggaggattagacgcttgtagcttgaactgtcagaggtgggggcttgggctcccttcttgctgcctcactcactctgtttgatcggcctttcaggaaaggtgttcagccagaccaccatctgtcgcttcgaggccttgcagctcagccttaagaacatgtgtaagctgcggcccctgctggagaagtgggtggaggaagccgacaacaatgagaaccttcaggaggtgaggagtggcaggatgtgtgcaatgtctgccaggcacagtcccttctgctgcttccattcctggcttgaaactcctccctctccaaccggagctcgcaggagaagttctgtgtccttattctgctgctatgaattggaatccagagccttaacatttgctaatcaatcaggctctctccttctgagtcaccctctgcccccaccagcctgacaatggtccctccccagaaccccgtctagtgctggtgaaggctcagacctaggtctaccagccccttccagagcccctttcagtaacccctggctctggggccacatccagtcaatgctcccttagcacaatcccttagcggtttgttcttcagtcccatctcaaggtggggctgttgccaagtcaaatactaaagttgctcttgtcgcccccatcttcccctgcccagatatgcaaatcggagaccctggtgcaggcccggaagagaaagcgaactagcattgagaaccgtgtgaggtggagtctggagaccatgtttctgaagtgcccgaagccctccctacagcagatcactcacatcgccaatcagcttgggctagagaaggatgtgagtgccaagatcctgccctgtggtacctggatgtttccctgttcccattccccaccccccccacccccccacccccaccgccgccaccgctgactgcagcatcccagagcttatgatctgatgtccatctctgtgcccatcctaggtggttcgagtatggttctgtaaccggcgccagaagggcaaaagatcaagtattgagtattcccaacgagaagagtatgaggctacagggacacctttcccagggggggctgtatcctttcctctgcccccaggtccccactttggcaccccaggctatggaagcccccacttcaccacactctactcagtcccttttcctgagggcgaggcctttccctctgttcccgtcactgctctgggctctcccatgcattcaaactgaggcaccagccctccctggggatgctgtgagccaaggcaagggaggtagacaagagaacctggagctttggggttaaattcttttactgaggagggattaaaagcacaacaggggtggggggtgggatggggaaagaagctcagtgatgctgttgatcaggagcctggcctgtctgtcactcatcattttgttcttaaataaagactgggacacacagtagatagct

SEQ ID NO: 11 - DNA, 10997 bp, Homo sapiens
gagggaagttgagggaagtccttctgactggtaaatcggctttctgaccctcgtctgcaaataatacattctaaggtaaggaactaaggaagctttattgaaatcggatttcaaatggagaggtcctgctatgcctactggaggagatcagggaataataaatatttccttcattgaaaattatatcctattggccaggcgcagtggctcacgcctgtaatcccaacactttgggaggccgagacaggcggatcacctgaggtcggaccagcctgccaacatggagaaaccctgtctctactaaaaatactaaattagccgtgcgtggtggtgcatgcctgtaatcccagctactggggaggctgaggcaggagaatcacttgaaccaaataggcggaggttgcagtgaggtgagacggtgccactgcactccagcctgggggacagagaaagactccgtctcaaaaaagaaaaaaaaagagaaagaaaagaaaggaaggaaggaaggaaggaaggaaggaaggaaggaaggaaggaaggaaggaaggaaaattatattttattggccaacctcaaaattgaagcttattcagaaacagatttaaaaaaagaaaaaagtggagaactgctcccagatatatatgcagaaaagcttcaagtcaacatttaggaggtttttaaatatcgatctgggtttcgttctaatggtctgggtgtacttatacgacctattacatttcactagactgtagccaatagtgagcgttgactgaccattgctttcaaagtgagttgtgttgcctttagcaatacagtcacattaatggccagaaaaagaaaaaagaaaacaaacactgggggtgtttgaaacaactgggggtagggtggggtgggaaaggtgtgggggtttgcgttcgagtcaacctctatttcggggggtaaaaactgcctcctccgcttgatttttttcctcgatctgcaaaagcgtaaatgttttgttttgttctattgagatggagcctcgctctatcacccaggctggagcttagtggcgcgatctcggctcactgcaacctccgcatcccgggttcaagcgattctcctgcctcagcctcctgagtagctgggattacaggcgagcaccaccatgcctggctaatttttgtatttttcggtagagacggggtttcgccatgttggccaggctggtctcgaacgcttgacctcatgtgatccccccgtctcggcctcccaaagtgctgggacgacaggcgtgagccaccgcgtccggcctaaaagggtaaatgtgattacacccacgcgtatttgttcaacagacatttattgagcgctcaccacgtgccaacgccgggcgtctgggctctggaggcgctgccacgtggcggatgcgcagtgcccggcggccgggctgaggggtgaacgcgggggtcagggggccccgggctgagggtttgcgtgcgggccgggtgcctgggggccccgggctgagggtgagcgcgccgcccaggtgccaggcggctccgggcagagagtgaacgcgcgggccaggtggctccagggcggcgccccagggcggggccggccacgccctccctaaccctggcggagctgatgggtggctgtagcctgattagaccgcgtcagtccggagggtgggtcttgggagggggcgcagggcagtccacgtttccactgcagtttctcctttgttttacgtttgggaggaggtggcattggaaatagcagagtgcttcgcggtaacaggggtgagtcttgtttcatggaacttttttcaaatggggagaagggggttgtgttgctcactacttggaatgtgtcggtcaaaggggttagatagtcagggaggggaagcgtgttctcatcctgggaccaggccggagccggcctcgccgggagacttgtagccctcgccctgcggtgacccgtggctggccactggcctcaaatgttgaaaacgggcagatgggcaagtaatacactctcaagaaagcaagtgtctggcggtgatttcctaaattgcattttttattttatttcaaaacttcatgtaaatatgtttccttacaatatctggctaagtcttttctatattaacatgcttacattgtgatcaagacaccagtctcttccctttcttttcctctcctcttatctctggagatggcaatacccccaactcaaattactctagcaaaaaacctaggagactctttcttttcttttttctttttttttggagacagtctcgctctgttgccaggctggagtgcaatggcgcgatctcggctcactgcaacctccgtctcccgggttcaagggattctcctgcctcagcctcccaagtagctgagattacaggcgcccttcactgcgcccggctaatttttgtattttagtagagacggggtttcaccatgttggtcaggctggtctcgaactcgtgacctcagatgatccgcccgcctcagcctcccaaagtgctgagattacaggcgtgagccaccgcgccgggcgagactcattcttgattcctgtttcccttccgctcttcatccaatccaccggcgagctgcagggcgagggggtggttctttctcctgttttcccgctctccctgcatttcatctcctctgccgccatctgctccaaacccctggcagcccttcgcgggattcccaaatctaatagatttttctgttctccccaaatccattctccatgcagctgtccggcccatcttctaacctaaaaaaacttgctgtttgcttgttggaagccctgtaatggtttccttgggacctgggatgaaatgcaaatggtcccggggctcaccgtcagccccgcgcctgggcctcgccccagcccccaccttcctgcccgccatagctgtagggagcatggagcatggagcgtggagcgtggagcatggagcatggagcgtggagcatggagcatggcctgcagcccccggggagcgccggcagcctggaaccagcaggcttcgctcgtctcttcccacccccgtgcacttttcctcctgcccacatctggctccgatggccccctccttgggggccttttccagacattcatgatgaaggtggcgtcctcggttacttcccctctcatattcttttttttttttttttttttttgagacagagttttgctcttgtcgcttgggctggagtgcagtggcacgatctcggctcactgcaacctccgcctcctaggttcaagcgattctcctgcctcggcctcccgagtagctgggactacaggcgcccgccaccacgcccgactaattttttttatttttaatagggtttcaccatgttggccaggatggtctcgatctcctgacctcgtgatccgcccgcctcggcctcccaaagtggtgggattacaagcgtgagccaccgctcccggtcccaccccgccccgaccttttttttaatagcatttttctcaatctgacattttttgtttatttgccctttactgtctgtcccacaccaaactttgtgttaacgaggaactttgcatctttttccctaagttcagcacctagaacgaatactaaatgtatatgaagatttcgtccacatccgcttttaccagtatgttttccatgtacagtcaagttccatataaggccgtttcagtcagtgagcaaccccacgtactatggtggtcccataagattataaaagagctgaaaaatccccatggcctagtgacatcttcatgatcctgaatttgtgtaggcctaggctcatgtgtgtgtttgtctcttcgtttttaacgtaaaagtttttaaacagacaaaattttacagaataagaatataaagaaaaaatatttttgtacaggtgaaaaaatgtttgtgttttaagctaagtgttattacaaaagagtcaggaagtttgcacatttttaagtttataaagttaaaaagagtctgggcgcggtggctcacgcctgtaatcccagcattttgagagcctgaggcaggcggatcgcctgaggtcgggagttggagaccagcctgaccaacgtggagaaacctcatttctactaaaaatacgaaattagctgggcgtggtgacacatgcctgtaatcccagctactcaggaggctgacgcgggagaatcggctgaacctgggaggcggaggttgctgtgagcggagatcacgctgttgcactccagcctgggcaacaagagggaaactctgtctcaaaaaaaaaagtaaataaataaatgaatttaaaaagttacagtaagctaaggttaatttattattcaggaaagacaaatttttaaataagttctaaaatttgcctaagtgtacagtgcttataaagcctacagttgtgtacagtggcgtcccaggccttcattcactcaacactcactcactcactcatccagagccactaccagtactgtgagctccattatgggaatgtgcctacacaggtgtaccattttttatcttttgtacagtatttcttctgtttggatatgtttatatgcaaatacttactgttgtgttacagttgcctacagtactcagaactgtaacatgctgtggagatttatagcctaggagccatgggccctactgtgtaacctgggtgagttgcaggctgtgccattcgggtctgcgtagctacactctgtgatgttcacaggatgacacagcaacctaaagatacatttctcagaacatattcctgtcttcgagtgatgcatgactagttatttctgctaacagaaattggcttgccatataaatagttttcttttagtaaattaataaattaccatttcaatgttatatgtcatcctcacaagcttgtatactgctatgagaaatagcataatgctcggagatctgacaaataagaatttagcttagaaaggtaaggaccatacttgaaccttagtaaattcataaagaaaacacctctcttaggagatgcctttcttttttttctgtcacccaggttggagtgcaatggtgtgatctcagctcactgcaacccctgcctcccaggctccagcgatcctcccacctcagcctcctgaatagctgaccaccagcacactaggcaaacccaccccactcacggcctcccttgggaattcagacctaaccatcgctgagctgaagtgtaggtgtggtctgattagactcattttttcttttttgtagagatggggtttcaccgttttgccgaggctggtcaccaactcctgggctcaagggatccacccacctcagcctcccaaagtgctgggattgcaggcatgagccaccatgcctggccttaggaaattcctttctatgtaacaccctgcatcattaatagccagcttttttgaaacttctacattaaattgtctaaactctcaaataaattcctagtaaagtaattatatagggttgttaaatcagagatcaacagcacaatgactaatgcatactcatgatttcatctcactagacaaatgtactgaggctggagcctgtgtgaacagaacagaagaggccttcactctagtagtgctcacagtccagcaggtaagacagacttgaagcaagggacaccagagctctgatcagtgtgaaatagggagctaggagaacgtttagctttgggactcaactgagctgaagaatccagggaagcctgcctgaagaggtgatgtttgcgcatttgaagtatggatgggaagcaagcctctgtgtgtgtgttggaggataggtggtattttagtgagaaaaaagaacatttgtaatggactgatctgatgctttactggagaaagtttattatggctgaatagtgaaatacaagagctatagatggcaggaggtgagcttggagggaaaagcagcagtcaattaaattgcagttacaggttgagtattttttatccaaagtgcttgggaccagaagtattatggacatcagatttttttgaatgtttgagtatttgcaaaatacccaatatgagcatcccgagtccgaaaattcaaaatccaaaatggtccaatgagaatttcctttaagtgtcatgatggcactcaaaaaggtttcatactttaagcatttcaggtcctagattttcagatttgggatgcacaagctgttttttaaatggactaattggggagagcagctctgtgtttaatcctagtaattaccctccaaaggtgctaatattgtgcttcataaatattttgagatctccctggttaatttcacctctatatttttgttttctttttttttcttttttttccgagaaagtcgctctgttgtccaggctggagtgcagtggcacaatcttggctcactgcctccgcctcccaggctcaagtgatctcctgccagtagctgggattgcaggtgtacgccaccacatccagttaatttcttgtatttttagtagacagggttccgccatattggccaggctggtcttaaactcctgatctcaggtgatccgccagccttgtgctcacaaagggctggcattacaggcacgagccactgcacccagccctaatttcacctttttaaaggacacaggcctggcgcagtggctcacgcctgtaatcccagtactttgagaagccgaggagagcagatcacctgaggtcaggagttcgagaccagcctggccaacatgatgaaatcccgtatctactaaaaaataacacaaattagctgggtgtggtggcggggcgggggggcgcctgcctgtaatcccagctacttggggcctgaggcaggagaatcacttgaaccccagaggcggaggttgcagtgagctgagattgcgccattgtactccagcctgggcaacaagagcgaaactccatctcaaaataaaataaaaggacacaaaaaataacattagtagcatataacatatatgtattacatatttttaaatacattttaagaaatcttaaacttttcccctacagttggaacacattttgtttttattatatgtatttgttttttaccaaaagtaaatgacatgcttctgttgaggtgttttttttttaatgtggttattttaattttcatccaacaacttttacctttgcctcttttttaaaggcatataatttttcttcctacagaaagacatcaggacaataaatagggagatcttttctcaggcacacaattgtaacattaagtaagagacttttatagtcaaagcaataacatattcatgctataacttttataacgtcattgctgttaaatgtttaaggaaatgataggaaagtcttcagggccaagctaccccgtgcctttattttggcatggattcctaaaagtgggagcaccattaatttcatgtgtcttattctctggatccccattttttagaacaatgagtgggcacacgatggcccatgggccagtctccctgttttactggaacacagccaccctcattcctttatgtgttatctgactgcttctgtgccgtgctacaacggcaaagttgaatagtttcaacagacaccacaggacccacaaagctaaaatctggccctttgcagaaatagtttaccaccccagtctagaaagaacctggcgtgtagcaggatgcaacatatacttgtagaatgaataaaaaggtaataaaataacacgagctcacatagcggccagcatttgctgtgcaccataatccgtgctaagcactttgcatgcgttatttaatttgaatttcataacagtattacataagaaaacaatagggccaggcatggtggctcacgcctgtaatcccagcactttgggaggccgaggcaggcggatcacgaagtcgggagctccagaccagcctgaccaacatggtgaaaccccatttctactaaaactagaaaaagtagccaggcgtggtggcgtgcgcctgtaatcccagctacttgggaggctgaggcaggagaattgcttgaacccgggaggtggaggttgcaatgagctaagattgcaccactgcactccagcctgggcgacagagtgagactccgtctccaaaaaaaaagaagaaaaagaaaagacagtattttgctccctcaccgccttcaggcttttaaccaactgccacttaccaccctagtgaaggtttgcccgagtgccctatttaatattgcaggcttctgtttcctaccagcccctttgcttactctttcacacttagtcaccttctaacgtggcatacattgcttattttctatgctcatgagtatgtctactccatggaggcatagatgtttgtatgcctgtttactgatggatcacaaactgtgtagcctaaaatagagctagcacatagtcccacccaacacgtgtcaggtgagcaattagatatagagggttccaataacttgtggggacacccagataagatctgtttatgactcatgtcttacacagagctcattcttggtctcttggttagtttatcagagaagacaaatgtattattggaaaatgtgtcttaggtcattttttgacagtggctctaatactggaatctattttaactaaaggttattatcataaagcaggtgtttgctgaagacagcttactcagatcactactgcctggaggtggttgatatatcctggtgtaaaccttcaagaagggcacaggcaggaaaacatgagccagcaactgaagaaacgggcaaagacaagacaccagaaaggcctgggtggaagagcccccagtggggctaagcccaggcaaggcaagtcaagccaagacctgcaggcggaaatagaacctgtcagcgcggtgtgggccttatgtgatggctatgtgtgctatgagcctggccctcaggctctcggaggggatgatttctcagactgttacatagaatgcgtcataaggggtgagttttctcaacccatcctggaagaggactcactttttgagtccttggaatacctaaagaaaggatcagaacaacagctttctcaaaaggttttcgaagcaagctcccttgaatgttctttggaatacatgaaaaaaggggtaaagaaagagcttccacaaaagatagttggagagaattcgcttgagtattctgagtacatgacaggcaagaagcttccgcctggaggaatacctggcattgacctatcagatcctaaacagctcgcagaatttgctagaaagaagccccccataaataaagaatatgacagtctgagcgcaatcgcttgtcctcagagtggatgcactaggaagttgaggaatagagctgccctgagaaagcatctcctcattcatggtccccgagaccacgtctgtgcggaatgtgggaaagcgttcgttgagagctcaaaactaaagagacatttcctggttcatactggagagaagccgtttcggtgcacttttgaagggtgcggaaagcgcttctctctggactttaatttgcgtacgcacgtgcgcatccacacgggggagaaacgtttcgtgtgtccctttcaaggctgcaacaggaggtttattcagtcaaataacctgaaagcccacatcctaacgcatgcaaatacgaacaagaatgaacaagagggaaagtagtcctccaacaggatgaagcagattaacagaagagtgatcagtgacaaacatgcctcattgattattgtttctaggaaggaatttctaaatcaatattgcaaccccaaaagcggttataatttggtgttactaagatgctcctacactttgtgataccgttttaaggacatggtgcatttttttttcttttatttgttttatttagaactttttttatttgttttatttagaactttgtgtgttcttaaagtgtgcttccaacaggaaggtcagtgataaattttcaaaagcataaccttcaatatattatctgttggattattggatataagacttattttcatgtactataaatatgaaaataactttgatttttaattgtgtagtttccatttcttagcttttgccttttaaatttatacttcagccaggcatagtgactgatgcctgtaatcccaacactttgttgggaggccaaagcaggaggatagcttgaggccaggagttccagaccagcctgggcaacatagtgagatcctgtctctacaaaaaaatttgtttttatttgtatttatatatttttatttttgtttttgttggtaggcgtctcgctctgtcacccaggctggagtctagtgtcgtgatcttggctcactgcaacctccacctcccgggttcaagtgattctctggcctcagcctcccaagtagctgggactacaggtgtgtgtcaccacgcccggctaatttttgtatttttagtagagatggggtttcaccatgttggccaggctagtctcaaactcctgacctccagtgatctgcccacctcggcctcccaaagtgctgggattacaggtgtgagccactgtgcctggccccccacaacatgtttaaacttagctaggcctggttgcatacgcctgtgttcccagctactcaggaggctgaagcaggaggatagcttgagcccaggagtttgaggctacagtgagctgtgattgcaccactgtactccagactggataacagcaagagcccatcttttaaaaaaagtaaaaattaaaaatatacttcatggttcatgtcatagccctagagaatgaaaaatttgcagtagatagtcaataaatgaatcagtagttaaatattccttaaagtcaactgtatttcattgtgatttttgttttctttttatcattgtatcaaactatatggaaatcatatggttagatgtgattatttgataatgttagtccatttgaatccattttagatatttcacaattaaagaatatgaaacttcagaaa

SEQ ID NO: 12 - DNA, 9283 bp, Pan troglodytes
  misc_feature (2906)..(2915): n is a, c, g, or t
  misc_feature (5514)..(5747): n is a, c, g, or t
cagggcagtccacgtttccactgcagtttcttctttgttttacgtttgggaggaggtggcattggaaatagcagagtgcttcgcggtagcaggggtgagtcttgtttcatggaacttttttcaaatggggagaagggggttgtgttgctcactacttggaatgtgtcggtcaaaggggttagatagtcagggaggggaagcgtgttctcatcctgggaccaggccggagccggcctcgccgggagacttgtagccttcgccctgcggtgacccgtggctggccactggcctcaaatgttgaaaacgggcagatgggcaagtaatacactctcaagaaagcaagtgtctggcggtgatttcctaaattgtattttttattttatttcaaaacttcatgtaaatatgtttcctggctaagtcttttttatgttaacatgcttacattgtgatcaagacaccagtctcttccctttcttttcctctcctcttatctctggagatggcaataccctccactcaaattactctagcaaaaaacctaggagacttttcttttttcttttctttcttttttttttttggagacagtctcgctctgttgccaggctggagtgcaatggcgcgatctcggctcactgcaacctccgtctcccaggttcaagggattctcctgcctcagcctcccaagtagctgagattacaggcgcccttcactgcgcccggctaatttttgtattttagtagagacggggtttcactatgttggtcaggctggtctcgaactcgtgacctcagatgatccgcccgcctcagcctcccaaagtgctgagattacaggcgtgagccaccgcgccgggcgagactcattcttgattcctgtttcccttccgctcttcatccaatccaccagcgagctgcagggcgagggggtggttctttctcctgttttcccgctctccctgcatttcatctcctctgccgccatctgctccaaacccctagcagcccttcgcgggattcccaaatctaatagatttttctgttctccccaaatccattctccatgcagctgtccggcccatcttctaacctaaaaaagcttgctgtttgcttgttggaagccctgtagtggtttccttgggacctggaatgaaatgcaaatggtcccggggctcaccgtcagccccgcgcctgggcctcgccccagcccccaccttcctgcccgccatagctgtagggagcatggagcatggcctgcagcccccgggagccgccggcagcctggaaccagcaggcttcgctcgtctcttcccaccaccgggcacttttcctcctgcccacatctggctccgatggccccctctttgggggccttttccagacattcatgatgaaggtggcgtcctcggttacttcccctctcatattctttttttttttttttttttgagacagttttgctcttgtcgcttgggctggagtgcagtggcgcgatctcggctcactgcaacctccgcctcctaggttcaagcgattctcctgcctcggcctcccgagtagctgggactacaggcgcccgccaccaagcccgactaattttttttaatagcgtttcaccatgttggccaggatggtctcgatctcctgacctcgtgatccgcccgcctcggcctcccttagtggtgggattacaagcgtgagccaccgctcccggtcccaccccgccccgacctttttttaatagcatgtttctcaatctgacattttttgtttatttgccctttactgtctgtcccacaccaaactttgtgttaacgaggaactttgcatctttttccctaagttcagcacctagaacgaatactaaatgtatatgaagatttcatccacatccgcttttaccagtcagtatgttttccatgtacagtcaagttccatataaggccgtttcagtcagtgagcaaccccacgtactatggtggtcccataagattataaaagagctgaaaaatccccatggcctagtgacatcttcatgatcctgaatttgtgtaggcctaggctcgtgtgtgtgtttgtctcttggtttttaacgtaaaagtttttaaacagacaaaattttacagaataagaatataaagaaaaaatatttttgtacagctgaaaaaatgtttgtgttttaagctaagtgttactacaagagagtcaggaagtttgcacattttaaagtttataaagttaaaaagagtatgggcgcggtgggagtcattcatcaagatagttaattcagaggaagagaagatttagaagagctaaattctggtttgaaaatattgagtttaagatgagtttgaaatggagaaatccactaatcattttgagctcagcaggtagatctgcattaaagacacagatgtggtagttactggctcataaactttaataaaatgtatggatatggatgagtttccacaaggagagtgtagaatggaaaaaagaataaaagcttaggatgctgctgtgtgaaacatgaatagtcacagggtaagcaaaaaggaagactacaatgaacacaggagagcgtcgtggagggaaatccaggaaagaatgatatcacagacttcaaaagaatgaaatctttattttgacaactatgaggagcagctgaatgattttaaaaagttggtcatatgtctattttagaaagctctttctagtagtaatgtggagaaaaggttgtaaaggacaacgaagataagcaggatttgggtgtttcaaagattagaatgtttaaccatgtcaaaggtcacaaagaaaaaaagtgaatgacagtgatggtctagctggatttggctgttctaagattgttcgtgatgccaaaagttgcagtgtatagaagctgaagnnnnnnnnnnacatgcctgtaatcccagctactcaggaggctgaggcaggagaatcggctgaacctgggaggcggaggttgctgtgagcggagatcacgctgttgcactccagcctgggcaacaagagggaaactctgtctcaaaaaaaaaaaagtaaataaataaatgaatttaaaaagttacagtaagctaaggttaatttattattcaggaaagacaaatttttaaatcagttttaaaatttgcctaagtgtacagtgcttataaagcctacagttgtgtacagtggtgtcccaggccttcattcactcaacactcactcactcacccatccagagccactaccagtactgtgagctccattatgggaatgtgcctacacaggtgtaccattttttatcttttgtacagtatttcttctgtttggatatgtttatatgcaaatacttactgttgtgttacagttgcctacagtactcagaactgtaacatgctgtggagatttatagcctaggagcaatgggccctaccgtgtaacctgggtgagttgcaggctgtgtcattcaggtctgcgtagctacactctgtgatgttcacaggatgacacagcaacctaaaggtacatttctcagaacatattcctgtctttgagtgatgcatgactacttatttctgctaacagaaattggcttgccatataaatagttttcttttagtaaattaataaattaccatttcaatgttatatgtcatcctcacaagcttgtatactgctatgagaaatagcataatgctcggagatctgacaaataagaatttagcttagaaaggtaaggaacatacttgaaccttggtaaattcataaagaaaatacctctcttaggagatgcctttcttttttttctgtcacccaggttggagcgcaatggtgtgatctcagctcactgcaacccctgcctcccaggctccagcgatcctcccacctcagcctcctgaatagctgaccaccagcacacttggcaaacccaccccactcaccgcctcccttgggaattcagacctaaccatcgctgagctgaagtgtaggtgtagtctgattagactcattttttcttttttgtagagatggggtttcaccgttttgctgaggctggtcaccaactcctgggctcaagggatccacccacctcagcctcccaaagtgctgggattgcaggcatgagccaccatgcctggccttaggaaattcctttctatgtaacaccctgcatcattaatagccagcttttttgaaacttctacattaagttgtctaaactctcaaataaattcctagtaaagtaattatatagggttgttaaatcagagatcaacagcacaatgactaatgcatactcatgatttcatctcactagacaaatgtactgaggctggagcctgtgtgaacagaacagaagaggccttcactctagtagtgctcacagtccagcaggtaagacagacttgaagcaagggacaccagagctctgatcagtgtgaaatagggagctaggagaacgtttagctttgggactcaactgagccgaagaatccagggaagcctgcctgaggaggtgatgtttgcgcatttgaagtatggatgggaagcaagcctctgtgtgtgtgttggaggataggcggtattttagtgagaaaaaagaacatttgtaatggactgatctgacgctttactggagaaagtttattatggctgaatagtgaaatacaagagctatagatggcaggaggtgagcttggagggaaaagcagcagtcaattaaattgcagttacaggttgagtattttttatccaaagtgtttgggaccagaagtattatggacatcagatttttttgaatgtttgagtatttgcaaaatacccaatatgagcatcccaagtccgaaaattcaaaatccaaaatggtccaatgagaatttcctttaagtgtcatgatggcactcaaaaaggtttcatactttaagcatttcaggtcttggattttcagatttgggatgcacaagctgttttttaaatggactaattggggagagcagctctgtgtttattcctagtaattaccctccaaaggtgctaatattgtgcttcataaatattttgagatctccctggttaatttcacctctatatttttgttttctttttttttctttttttcccgagaaagttgctctgttgtccaggctggagtgcagtggtgcaatcttggctcactgcctccgcctcccaggctcaagtgatctcctgccagtagctgggattgcaggtgtaggccaccacatccagttaatttcttgtatttttagtagacagggttctgccatattggccaggctggtcttaaactcctgatctcaggtgatccgccagccttgtgctcacaaagggctggcattacaggcacgagccactgcacccagccctaatttcacctttttaaaggacacaggcctggcgcagtggctcacgcctgtaatcccagtactttgagaagccgaggagagcagatcacctgaggtcaggagttcgagaccagcctggccaacatgnnnnnnnnnnnnnnnnnnnnnnnnnnnnnnnnnnnnnnnnnnnnnnnnnnnnnnnnnnnnnnnnnnnnnnnnnnnnnnnnnnnnnnnnnnnnnnnnnnnnnnnnnnnnnnnnnnnnnnnnnnnnnnnnnnnnnnnnnnnnnnnnnnnnnnnnnnnnnnnnnnnnnnnnnnnnnnnnnnnnnnnnnnnnnnnnnnnnnnnnnnnnnnnnnnnnnnnnnnnnnnnnnnnnnnnnnnccatagtatgtatataccacattttctttatccagtctaccattgatgggcatttagggttgattccttgtctttgctattgtgaatagtgctgcaatgaaacatacatatgcatgtgtctttataatagaacaatttatattcctttgggtatataaccaataatgggattgctggatagaataatagttctgtttttagttctttgaggaatcaccactgcttttcacaatggttgaattaatttacattcctagctacttggggcctgaggcaggagaatcttcttgacccccggaggcggaggttgcagtgagctgagattgtgccattgtactccagcctgggcaacaagagcgaaactccatctcaaaataaaataaaataaaatgacacaaaaaataataacattagtagcatataacatatatgtattacatatttttaaatacattttaagaaatcttaaacttgtcccctacagttgggacacattttgtttttattatatgtatttgttttttaccaaaagtaaatgacatgcttctgttgaggtgttttttttttttaatgtgattattttaaagtattttcaagctattaattttcatccaacaacttttacttttgcctcttttttaaaagcatataatttttcttcctacagaaagacatcaggacaataaatagggagatcttttctcaggcacacaattgtaatattaagtaagagacttttatagtaaaagcaataatatattcatgctataacttttataacgtcattgctgttagatgtttaaggaaatgataggaaagtcttcagggccaagctaccctgtgcctttattttggcatggattcctaaaaggtgggagcaccattaatttcatgtgtcttattctctggatccccatattttagaacaatgagtgggcacacgatggcccatgggccagtctccctgttttattggaacacagccaccctcattcctttatgtgttatctgactgcttctgtgctgtgctacaacggcaaagttgaatagtttcaacagacaccacaggacccacaaagctaaaatctggccctttgcagaaatagtttaccaccctggtctagaaagaacctggcgtgtagcaggatgcaacgtatacttgtagaatgaataaaaaggtaataaaataacacgagctcacatagcggccagcatttgctgtgtaccacaatccgtgctaagcactttgcatgcattatttaatttgaatttcataacagtattacataagaaaacaatagggccaggcacggtggctcacgcctgtaatcccagcactttaggaggccgaggcaggcggatcacgaagtcgggagttcgagaccagcctgaccaacatggtgaaaccccgtttctactaaaactagaaaaagtagccaggcgtggtggcatgtgcctgtaatcctgtaatcccagctacttgggagggtgaggcaggagaattgcttgaacccgggaggtggaggttgcaatgagctgagatcgcatcactgcactccagcctgggcgacagagtgagactccgtctctaaaaaaaagaagaaaaagaaaagacagtattttgctccctcaccgccttcaggcttttaaccaactgccacttaccaccctagtgaaggtttgcccgagtgccctatttaatattgcaggcttctgtttcctaccagcccctttgcttactctttcacagttagtcaccttctaacacgtggcatacagtgcttattttctatgctcatgagtatgtctactccatggaggcatagatgtttgtatgcctgtttactgatggatcacaaactgtgtagcctaaaatagagctagcacatagtcccacccaacacgtgtcaggtgagcagttagatatagacggttccgacaacttgtggggacacccagataagatctgtttatgactcgtgtcttacacagagctcattcttggtctcttggttagtttatcagagaagacagaaatgtattattggaaaatgtgtcctaggtcattttttgacagtggctctaatactggaatctattttaactaaaggttattatcataaagcaggtgtttgctgaagacagcttactcagatcactactgcctggaggtggttgatatatcctggtgtaaaccttcaagaagggcacaggcaggaaaacatgaaccagcaactgaagaaacgggcaaagacgagacaccagaaaggcctgggtggaagaacccccagtggggctaagcccaggcaaggcaagacaagccaagacctgcaggcggaaatagaacctgtcagcgcggtgtgggccttatgtgatggctatgtgtgctatgagcctggccctcaggctctcggaggggatgatttctcagactgttacatagaatgcgtcataaggggtgagttttctcaacccatcctggaagaggactcactttttgagtctttggaatacctaaagaaaggatcagaacaacagctttctcaaaaggttctcgaaggaagctcccttgaatgttctttggaatacatgaaaaaaggggtaaagaaagagcttccacaaaagatagttggagagaattcgcttgagtattctgagtacatgacaggcaagaagcttccgcctggaggaatacctggcattgacctatcagatcctaaacagctcgcagaatttgctagaaagaagccccccataaataaagaatatgacagtctgagcgcaatcgcttgtcctcagagtggatgcactaggaagttgaggaatagagctgccctgagaaagcatctcctcattcatggtccccgagaccacgtctgtgcggaatgtgggaaagcgttcgttgagagctcaaaactgaaaagacatttcctggttcatactggagagaagccgtttcagtgcacttttgaagggtgcggaaagcgcttctctctggactttaatttgcgtacgcacgtgcgcatccacacgggggagaaacgtttcgtgtgtccctttcaaggctgcaacaggaggtttattcagtcaaataacctgaaagcccacatcctaacgcatgcaaatacgaacaagaatgaacaagagggaaagtagtcctccaacaggatgaagcagattaacagaagagtgatcagtgacaaacatgcctcattgattattgtttctaggaaggaatttttaaatcagtattgcaaccccaaaagcggttatactttggtgttactaagatgctcctacactttgtgataccgttttaaggacatggtgcatttttttttcttttatttgttttatttagaacttttttatttgttttatttagaactttgtgtattcttaaagtgtgcttccaacaggaaggtcagtgataaattgacttcaaaagcataaccttcaatatattatctgttggattattggatataagacttattttcatgtactataaatatgaaaataactttgatttttaa

SEQ ID NO: 13 - DNA, 11943 bp, Mus musculus
ccggaacagagttcgtccatctaaaaagggaggggtccaaggagctgaactcctagccgcctagatttccactgtggctctgggtacgagtggcagtttcttcttgggatttcagaaaggaaaccaaggaggaaataggtagagcgcatcgcatcgctgtgggcattaggtaagtcctgtttcatgaaatggctgggatttgtcttttttctcgttatgaggaaagggaggagggaagggtttgaaaaccagcaatttagagttttgactcttccaaattggtgaagatcttggcaaataaatgctggctttcagactgcatcgatcaccagctaccttggtccattggccatcacgttttcaaacatattaaggagcacagtagatgcacattgaggaaagtgggaattcaggttggaatctccttgaaattctgtttcaaattttgttccaagtgttcgtgtgcttttatcttatctcaattccctagatctattttatatgaaaatgtttaaattagcgaggtaacagggcacctaccttttctctccacttacctctataaaattcaatagattattctagaaaaagaaaatcgaagagcatttttttggctttgttttgtttttgtttttgtttgtttgtttgtttgtttgtttttcgagaaagggtatctttgtatacccctggctgtcctggaactcactctgtagaccaggctggctttgaactcagaaatccgcctgcctctgcttcccaagtgctgggattaaaggtgtgcgccaccaccgcccggctagaacagcttttttttaaattactgattttctttacttaattttccagtttcctcactccattttccaatcaagcatccagccggaaagaacttcctcttgcttcctacagtctgcattccaaccttcagattgcttggttctcaaattgcctgaggagttccctgttcactgttgtcctttagtagtagatccagaatagtggtttaacttaacaccctataatggtttcctttggtgttgaactgcaacgcaaatggctttccgtagaattcccaggctcctttgcacttggaccctggccgccatactaccgaccaacttttctaagaattacgacttaacaccgagtggtggcgccggcggcctcacttggcctgtaatctcagcactccgggaggcagaggcaggaggatccctttgagttggaggacagccaagtccagaaagcaacttccaggacggccaggctgcctagagaaaggatccctgtctcgaaaaaccaaagcggggaaagatcgactgcttctgtggtgactatggcttcctcctgtagtaaatatgacggccttctgtagtaacttcggcttctttccctacttaaaacttttatcctaggttccctacagccatgattcagtttcttttttacagtgtctgcatactgcttgctaaagccggggatttgggggatctaatctcacctctccggggacggtatttttggggcgagcacttttgtctgcggagacaggtcctggatggttcttagagtgatggtgtccctctgtacgtcatcgcatactcggaagtttttcgtgagcccttttctctgtctgaaaccattttgttaattcacagtttactagctatgtgccccacatgataaaagcttgactctgtgtgtgataactgggttttttttgggtttttggtttttttcactattgagtgaacaattgtcatgtgattgaagtatttctattcctgtttgagaaatgaaacattagttttatcccaagccattagattttatctttatctgggttgaccagtaagcattttggattattttgactaattagaagttattggctgggaggtggtggcgctcgccagcacttgggaggcagaggcaggcggatttctgagttccagagcagcctggtctacagagtgagttccaggacagctagggctacacagagaaaccctgtctcgaaaaacaaaacaaaaaacaacaaagaaaagttattgggccatgcttgggtagcgcacgtctgtagttccagaatttggaggagttcaagccagttttgaccacatagagtaacaggctaacaagtcacttgaccttttatttgctattctcatgaggttgtatattgggtagaagacagcatattgctcaaacatctgataacctaatgaagaaaagtaaatgctatttctatggctttgattggttaggaaataccattctacctacatagcatttgcaagcaactcttttttttttttttttttttttttttttaaccaagtgtctaaagttctgtataaatgcctggtaagttattgttatttgagatttctgaatcaggtctcaaccaaaactataactaatgcatattcatgacctcatttcactagagaaatggactaagagctgggacacgtggcaaaagaagatagtcttcttctctcaatagagtgagtgtgcagtgcagccagcaggtaagagtaaacggtttcataggcaataaataccaagaattgtgctcttctgtgtaacgcaggctggggaatatttagcatgggatcctaagtatggagggaaactctgaggaagtgatgtccaagcacagatctgaagtatatatgtttgtgcgtactaacagtgacagaaaactgtcggtggtgtattagtgatagagaagaacatgcaaggactagtagggtgccttactctatctaggaggggttgcaaatgctgggagcgtgcctgctgtctatgctcgggttataagtggggaataaccactccaggacccccacaagctagctacaaagtaacattttcttttcttttctttttttttttaatatatgtcccaagacatatgatttatttattatcgtatctaagcacactgtagctgtcttcagacacacaagaagagggtatcagatctcattacccgatggttgtgagccaccatgtggttgctaggatttgaactcatgtcctctggaagagcagtcagtgctcttaaccgctgagccatctctccaggccccaaaggaacattttcagtgtctcttttggaagtttctttgttttgatttttatattttactatttattgtgtgtgtggattcaagtggaatctgagtctacgctttctaccacgtgtcactgggagtgtccttaggtgtggcagcagcaggcgactttctcctgagccatcttgcggtgctgaccaaccacctcagttattgaggttggtgtccttcatgtttgtttgtggtttggttgtttcttaaacacctcaaatgcagagctgaggactgtgtgcatgaggctttattgccagaattctaagaatgactgatcctgagagctcagaggacagcctcagctggatcagcacggctgttttagtcccagctcctacttggaaatttagaaatgccactattcctcgggagtccctgcttgggctgttacccttttccctgagtcacttcctgttctcaagcatccttgggtgtaattgaccttaccacgtgattgctgaacagagttctggcgagtcccattgtgcaagaagttttcaccttttttgtttgtttgtttttttgtttattgcttttcgagacagggtttccctgtgtagccctggctgtcctggaactcactttgtagactaggctagcctcgaactcaagaaatccacctgcctctgcctctcaagtgctgggattaaaggcgtgcgccaccaccgaccggcttaatctatttttttgaagatgcatttatttaatttatatgagtatactgtacagtcagacacaacagaagagggcatcggatcgcattacagatagttttgagccaccgtgtggttgctgcgaattgaactaaggacctctggaagagcagtcagagtgatcttaaccactgagccatctctccagcccttgcttctttttgtttgcttttaagacaggttttctctgtatcctgagctgtcctggaactaactttgcagaccaagctggcctagaactcacagatcttacctgcctctgcctcctgagtgctggaatcaaaggtgtgcatgcgccataactgtcctggtaaacttttttgaatcataggagaactaggagaaaaagaaatgtaaagaaataagctgcagttatattgtagatgaatgtattgagagaggctgcttttgtatagcagcctagacttgatcatggcctaagattttgctggttaaatactcttagatatggccttgataaatcaggtcagtttaaagaataggtaggtgtgtgtgtgtgtgtgtgtgtgtgtgtgtgtgtaatttcttttctccccaggggattcagcctaagccctgggcatcctagataggcatgtcactgtcccacgctaagctatatcccaagcctgtgtgtgtatgttgaaaatttaaactcttgccctagcaactgaaatgtgctttgttttctctttgatatatttatctttttgccagatttccatgttatgtctctgagatgcttttttaaaaatgtggccatttcaaagtactttcaagctgttaattctcaccccacagctttcccatgtgcctttatttaaagagcatttaatttctgttcccacagttaagacatgagaacaatgaagagatcttttatccagcgtggaatttgaacattaagcaaaggcagctagaaacacaatgataacatgtttatgttgcaggtttaaatagtttctagttttggttttgttgttgggttttttttttttttgtgggttttgttctgttttgttttttaaatgaagggaaaatagagagcaagtttaccctgtgtctatattttgcctggaattcataagccattgggattccgtaggtttcatttttttattttttggaccccagagaaactttagaataatgggcaaggaaactacagtccaggatcgcattttgcctctcccttccccgtctggttgtctcagcatcctcggccctcttcctcactggagttgcattgcacttcagaaagagatgggtttagacagagatgggagcctgtcaatcatatcttgctctgtacaaaaaaattaataatgatgataaaagagctactgttcctgcctcagtaaaagaagcaggatccagtttagagtgagttaagaaatgaagtagctgactgtgagcctccacttctgtgtttgctaggccccagcatagcctcacaagagacagctatatctgggtcctttcagcaaaatcttgctagtgtatgcaatggtgtcagcatttggaggctgattatgggatggatccccgggtatgtcagtctctagatggtccatcctttcatctcagctccaaactttgtgtctgtaactccttccatgggtgttttgttcccaattttaagaaggggcaaagtgtccacactttggtcttcgttcttcttgagtttcatgtgttttgcaaattgtgtcttgtaccttgggtattctaagtttctgggttaatatccacttatcagtgagtacatatcatgtgagttcttttgtgggtgggttacctcattcaggatgatgccctccaggtccatccatttgcctaggaatttcataaattcattctttttaatagctgagtagtactccattgtgtaaatgtaccacattttttgtagccattcctctgttgaggtacatctgggttctttccagcttctggctattataaataaggctgctatggacatagtggagcatgtgttcttcttaccagttggaacatcttctggatatatgggatcacagggcccccaatggaggagctagaaaaagtacccaaggacctgaagggatctgcaaccctatataggtggaacaataatatgaactaaccagtacccccagagctcgtgtctctagctgcatatgaatcagaagatggcctagcaggctatcagtggaaagagaggcccattggacttgcaaactttatatgcctcagtacaggggaacgccaggcccaagaagtgggagtgggtgggtaggggaggtggggagggtatgggggacttttgggatagcattggaaatgcaaatgaagaaaatacctaattaaaaaaaaagaaatgaagtagcaccaactcctgcgcatgcccagtgcttgctgtgagccatggaccgtgctgtacacctcaaacaactttttatttcccattcacagctcctgcacacagaagaaagcaggatcgcctcactgtgctgcctccaagtgttgtccccaaataccactgaccaaaaagtaggtttgacctaatactccatttaaaatagcaaattcatactttctgccagtccctttattcctctgtcacactattctttcacaacataatatttggcacgcactgcttattatttatttgaggcagggttccgtatagcccaggctgggctcagactaactgtgttgctgcggatgacctgtaacctctggtgccctgcctcctcatttccagttacaagcctctactgccagtgagttgtaaaccctttatttcctttttattcttttctcatacaatgtatcccatctgctgtttcccctccctccactcctcccagtctccccgctttcccctccctcctcctcccagatccagtgatactctggttcccttcagaaaagagcaggcttcccaggaatatcaaccaaagaactcacaacgaggtgcaaaccctcacacatcaaggctgtaagaggcaagccagtaggaagatctccagagcagacaagtcaaacacagcccacctcccacagttaggagtctcactgaaaccccaggctgaacaagcatggcatgtatgcagaggggcccagcgcagacccatgcaggattcatagttgctgcttccgtctccgtgagccctggttagctgattctgtggctgtgcgctcctggtgttcttgacccctctggctgctgcattagctcctccctgtgctgttccctgagctctgcctaaggttgggcttcgtgtgactctgcatctgttcccatagctgctaggggaagcctttctgatcatgttgggcacagatctatgagcttagcagagtaccatgaggaatcatttcattaagcttttaaattttatttatttatttttgcacctgtcctgtttcgttctaccctagatctatctctaggctagccaatgtctggttcctggcaatgccaggcatggtctccctcaggtgtgggcctcaagttagtccataagtcattagttggctactctcaccagttctgagccacttttgccccagcatgtctttcaggcaggacccgctgtaagtctgaagttaggtagctaggttgatgtcttagtccctccactggaagactagtctggttacagaagatggccagtttcaggctccatagcctcggttactaggtgtccgcactagggttacctggtaggttccagggagttcccagtgtactgtttgtttccacattgttcccaaaaagattccccagctccactcatctcttccaatattctccctcccctctctcctttaccccttcccttccctaccggacccctcctgttctattcctttccaccccagtctgcccacaaataatctctttccctttactagagaggtccacgcaccctccaccccctttttacttagcctccctggatgtgtgaattgtagcatgatcattcttttcttaacaaccactaatcagtgagtacagacctaccgtgcttcctttcttgtgctgggttggctcggggtaattttaatttttttctagtgtcatcaatttgcctgaaattttcatgttatatttttttaacagctgagttttttttttttttagatttatttatttattatatgtaagtacattgtagctgtcttcagacactccagaagagggagtcagatctcgttacggatggttgtgagccaccatgtggttgctgggatttgaactctggaccttcggaagagcagtcgggtgctcttacccactgagccatctcaccagcccctgagtttttttttaatagtaatgctctattgtgtaaaatataccacatatagtttatccattctcctgagggacatctaggttgtgtccaggttttggctattttgaatacagcgactctatgaatgaacataattgaacaagtgcacttgtggtaggatagaaggtcttttgggtatatgcccaagagtggtatagctggatcttgagatagattgatttccaatttcctgagaaactgccatattgatttgcacagcggctgtacaagtttgcacttgcaccagcaggggcggggtgtgctgcttgctcagcatccttgccagcgtgaactgtcacttcccttactgctcttaggcaccctgacaagtgtaaagttgaatcccaaagtagttttaagtgtttctcaccatttaggattcctctgtttaaaagtctctgtttagagctgtacctgtttttaaattggattgtttgggtttttttgtgagatgttgtttcttgagttcagtatatattttggatattagccctctgtcagatgtggagttggtggaaaagttttcccattctataggctgctgctttgtcctattaacgctgttctttgccttacagagaagcctttcagttttatgaagtgccatttactaattgttgaccttactacctgtgttactggtgttcggtttagtaagttaggaagctgtcttctgtgccaatacgttgaaggcgattcccctactttctcttttatcaggttcagtatatctggttttgtgtagaggtctttgagccacttggacttccgttttgtgcagaaatataaatatggatttatttgcattcttctacatttccagttagaccatttgttgacaatgctgtcttttcttgcccattatgtatttctttttgttgttgttgtttttgtttttcctttgagacagggtttctctgtatagccctggctgtcctggaactcactttgtagaccaggctagccttgaacccagaaatccctgcctccctgggattaaagtcatgctccaccaccgcccggctcattatctatttctgtccttatcaaaattcaagtatccatgtgtgtgcagacttacatctgggtctttgattcagctccattgatctgtttgtatttatgccaataccatgcagtttttattactactattgcttagtatgtttttacagcttgagatcagggatggtgatacctccagaagttcttttattgttcaggattgtttgagctatcatcttttttttcccccatatggaattacgtattgtcttttgaaaggctgtaaatttgtgttggaattttaataggaattgtgttgaatctgtatattgcttttggtaagatggccatttcactgttaatcctacggatccatgagcatgagagtgctttccatcttctgatatcttcttcagttcttcaatttctttcttaaaagacttgtagtttttttgtcatacaagtctttcacttgctttgttagggttaacccaaaatattttatgttatttgtggctattgtgaaggacgttgtttccctggtcaccttctcaatctgtcatttatgcataagtaaggctctgactttttcttttgttattaagttaatcctgtatccagacaggtgtttatcagctctagggttgcctagtagaatttttggagtcttttatgtatactgtttattctgtcagctgtaaataagatgctttgacgtcttccttttctaatgtgtatctctgatctcccttagttgtcttaaagctatgtctagaacttcaagtactgtattgaatagataagggagtgagtgagcagccttgccttgttcctgattttagtggagttgctttgagtttctcaccatttaatttgatgttggcttgccgtaaattggctttattataattaggtatgttccagtatccttaatccctccaagacttatgaaggggtgttgggttttgtcaaaggtgttctctctttgtttttggcatctaaatagatggctgtggtaatccattgatttacaggtctacataacgttaatatagtgtgtgcgtgtgtgtgcttgtgtggaggtcaggacaatctgagaatccagtcagtctttcctgccacacgtatcccaggatcaaactgagctgagtggcaggcaagttcctagtgagccatccccctgcctagagacagaccatttactgaagtcactttctcaccatgggctctcgtattggagtatattttaattttgggttattatctaaggcaggtgtttgcggatcagtgccccctggaagtgagtcataggcattgttcaagaaggaagcagctaagacaacatgaatgaacaaaaaatgaatgaacaaatgaagaaaacggcaaagacaagtggccagaaagggccgggcggaagagccctcgacagactgaccctaaagcaagacgaggcaaggccagtccagaataccagagtggaagctccccgtgtaacatacaccatccgggatgaaagtgagattagccccgagactgaggaagatggcttccctgacggatacctagagtgcatcatacgaggtgagttttccgaacccattctggaagaggatttcctttttaaatccttcgaaagcttggaggaagtggagcaaaacctttctcgccaggttctggaagcgagttcccttctcgagtcttctttggagtacatgacaaaggggacgaagcaagagaagagagaggtcacgcaagagacgcctccgctgagggttggggcgagctcattacttgcaggcggccctgcagagaagccagagggcggtgtgtactgtggtgtcttatcgatgctggagtgtcctcaagccgggtgcaagaagaagctgagggataaaaccgccctgaggaagcacatgcttgtccacgggccccggcggcacgtgtgtgcagagtgtggcaaagccttcacggagagctcgaaactaaagcgacattttctggtgcacaccggagagaagccgtatcagtgcacgttcgaaggctgtgggaagcgcttctccctggatttcaacttgcgcacccatatccgcatccacaccggggagaggcgctttgtgtgtccttttgatggctgcgagaagagctttattcagtcaaataaccagaagattcacatcctaacccacgcaaaggccgggaagaaatgctgaaggtggagacagattgtcctcaggctgggtagtcttaatgacagaggcactggggatacacgcattatgtacagattgttatttgtagggatagattctatggctaaaataattttgcaactcttcattatacagttttaaggcctcttttggtattccatggtatagttccaacaggaaagtcaatggtgaaagcagtttcaaaagcataacccttactatatgtgctattgaaggggatggggacttttgcatacgtcggaaaatcagttatttttaactatgcagttcctaattgcctagcttttacctttagaaatatgcttcatggtaaatttgataatcctaaagaatggccaactttggcagtagtcaacaaatgaatacatatttctaaattttatgttttgatttttgtttttctcattgtaccaaactatattaatcatagttaaatgtgaatagttacaaaaaagttgatccatctgaagattttagatgtttcaaaataaaaggaaataaaacacta

SEQ ID NO: 14 - DNA, 69149 bp, Homo sapiens
aagagcaaaaagcgaaggcgcaatctggacactgggagattcggagcgcagggagtttgagagaaacttttattttgaagagaccaaggttgagggggggcttatttcctgacagctatttacttagagcaaatgattagttttagaaggatggactataacattgaatcaattacaaaacgcggtttttgagcccattactgttggagctacagggagagaaacagaggaggagactgcaagagatcattggaggccgtgggcacgctctttactccatgtgtgggacattcattgcggaataacatcggaggagaaggtaagggaaaagaaaaaatgattttttgtttataagggaagtccctgatcagactctgggactggagaaagcgaagtaacttcaaactttgggcgacaagaaaaaaaaaaaggagctggattccagttgtgtgtccagagagtaatttttttttttcggaataaacttcacttggggacgggtgggagataaccatagagttagaaagtctaggtattttttttaaacacacattttccagacctatttttaaaaacaatgtttttctaacaaccctatggcctcccaaagaaattgtttaggcttacatttttgaggtttcttttgggagtgggggtggtgttcgtgaatactgggccgaacaccaaggaactgggggtggaggcagaggtgtttgccctcttcttggcagtgggtcctggaaggcgacaggttttaaatgagtgttttcattcctcgcctgcggtttggcgggacagcgctgcagcccatggtgtggagcgcggctgggggaccagggggaggtggggagaggggagcgtggaggggagcgtggaggggggcgcgcgaaggggttgcggggcgcaggaggcgggctgggctcggctggagaccggacctcggtgttggcctacagcacagggagccggccgaatgcgcgtgattactggacggcgctgctctgggagagagtcggggccagatttggcgcggcggtgaggcggctgcgggacaagcagaggcgcgcgggcgtgggcaagggtttggggcgctctggagcggtttgttgggtcagtgaggtgccagggagagcgggtgcctgccgggcagtgtgctcgggttgcacgccctagcgcgggggcgacagcggcggcgcgggcgggcggtctggaataatgacaaacacatttggccctgagtgaagaagtcgtcgtcgcctcgcattccagcaactgggatttgaggaatttcgaaccgcacaccaaggggccctcattgtgctccgtggcccccgcccccgcctgtcttcccgcgccccctcctcggtggaatcatttctgcattgcccgggggctctgctttcgctcagttctggccgcaggcaggaagagaggaaaggtctccaggaaggtgccgaacttcttgtgaggaagttagggacgacttggaactggggaaacttgtttgcaggtaagacagaaaggtgggaggtaaaccatattctccctccgggcacccgagccctggacaccccctacccggcacccttctccgcgcgggggtgcgtggcacttgccgtctgagctcgcccagcgctgctcggtcctctctagttggccttttttccattcctctccctgccggcttcagagccgtctgtgcgtacttctccttcctctgctgtctacccccatggaaaccagatttacacacgaaattaactccgcccggctgcgcccagggagcgggcggcgtccatttggcattgaatatgtgggatcagctgttctattccgggagggtgtcggccaggtcggagcgacgagtgtggcccaacccgagtacgttgccagagggagccaggagcctgggccgggccaggtgtgcgagagctgccgatggcctggcctcgcgtcttggtcgggaaggacttgctggcctggcaggctgtgcgttgtgcatccctcccgcagccagagcgccggtcccgcacttcgctccccgaattgtgctaagacctcaggatgtgcgcaaggagtgcctggaagaacttgccactcactccatcttcctgggtgggaggcaagcatggatggggcccatatcaggtccctaccgccccgcgtccgaaaagccgcgggctgggcggtgtgggaaatggctttttggctccgaggccaaattgctcaatgttttggaccgactcgcctcgccgcggtcgctcctgacaagaactagacagatttttggagcagggagcatccagggcaaacgcacgacagtcctccgcagtgcatctcaccggacaaacatccccggagccacaggaggggaggaaggggctctccgggcgtgcgcacctccccagccgccgcgctgtcccatccccgacccctaatctggtcaacctggaccccggcactgctgaattgcatcccctcttctccctttctcctcggcctcctcctttccacaaccctcaagatgaggaggccctgcctcgactccccgacaggcgcaaggccgaccaggctcgctttgacgccctggtcaggccctgcttcggagcttgcagttttgggttgacccaagtgcagctggacctcgttcacaagagtgaggggaagccaagaatgaacccgtcgttagcccccggtgccctggctcttgtttaaatccttagatcgagaaggacttgaaggagatcccaggctcccagctctgcgcccctgggccagtttcctctcgggacgcggactgaggagggatgcagggggaggggcattgggccgggctttccagctgcaaacacgtctggcgccgaggcgggcccattttgtgcctcctggggacggaccgtgggcggcgcgcagcggcgggacgcgttttggggacgtggtggccagcgccttcctgcagaccccacagggaagtactccctttgacctccggggagctgcgaccaggttatacgttgctggtggaaaagtgacaattctaggaaaagagctaaaagccggatcggtgaccgaaaggtgtgggtctcagggttccccgggtctaactcgccgggtccaaccgcagcatcagccttggggcggcagataatctttcggtctcgcctggggcgcaagatgcaggatcgggggcaaatggcttctcccaacttccccctaattcgggttctgccagatggttgtcgtttgctgaagtggctcggcggcatttccttttgttttaaactgatcaatgagcgaacctgggatgggctgaaaaagtagattgtaggagggaataatgggaaacccgacttggggcgcctccttccctgcctcctactgcagtttctcggcccccgcgaaaggggagcgacaagcgcgggtgggcgcggactcttgagggggcagaggcggctatggcgcgtgtcgggcaaggtggcaccagaaggcacttttgtgtgtgtgtgtgacaagagtctcgctctgtcgcccaggctgaagtgcagtggtgcgatctcggctcactgcaacctctgcctcccaggttcaagcgattctcctgcctcagcctcccgagtaactgggattacaggtgcccgccaccacgccaggctaatttttgtatttttagtagagacggggtttcaccatattggccatgctggtctcgaactcctgacctcaggtgatccgcccacctcggcctcccaaagtgctgggatttacaggcgtaagccaccgcgcccggccaggaacggttcttaaatgccgagagggcgcatgctagctctcctcagcattcccggtgagccgctacccacggccgtgcggctctcgtgcccataggaggcgctggcgagctcctgtaaccctaaacccctcggcccctttccccccacccgcccggattctcttcccgctctcccccctctctccacacccgcccggccccctctcgggtctcagttgaaaacaatgcaaacgcagagcgtcgtgcctggggcgcagcggcctctgcagctctgaggttcagagcgcggcgcgcaggggcgcaggggcgcaggtccccggagcggctgggcatcgccgccaaccccgggacaaccaagccgccgaggacttggtggaggtgggagggagagcggaccgcgcagtgttcctctgggtcccggggtcagaagccggacagtggcgggggctggacagtccgagcgcagagcctcccgggcgaagtctgcgcgcagcactcccggctgcgctgtcggggaccaggagcctgggctgcgggcgagctagctggcgagccgggtaagattcgcggggctgtcgcgccctctagtgggctccggggacgcatcccgctttccccagccccgggcggtcggcgccgctatctcagtggagcgcagcgctggaaccccgggggcccggagcggaggctaatctgggtcacctttcccctcctccgggcagccagtggactcctcgcaggctctgtgtgggcccgggaggcgccgggtggacgagagggggccgaggtctctgggtttggattgagaatgggacgtccttgtaattcaatgtgggagaagcaggggagtgtggaggaggacgggtcccgtgcgttcttggggggcaggcgccgtcttctgcgttccagcccctcgccagctcccttgccccgcgggcggcctgttgctgtttgtttgttttacgaccctgcgttattgtgcaacggtaacagtcgtttccaatcagctgcgcggccgtcgcggccctcgccaggctggtttatgggggcggcggtggcgcgcggacagataggacagcgcggcccgggaacggcgtcgaggtccaggcggtccccctgccccgagggggcggaaatgctgaggtggcgagagcgtgggttgcacagaaccctagtagcgagtccggctgagcctctgcggcctagcccagcagcgtcgtcttcccggctccgaagacgtcttcccgaagccccgctgccccggcgcaccagctcccggtgatggggatgatgatggggatgatggggagatgtccccgaattctcctggggtcccgaggagatttagccattttcaacagcagttttcctatttctgcttaaaccccgcgggctttcaactgaggtcaccacgaaagctaaaagtacaacctaaggaaggaagagactggaaattaacatttggggtagtggagctcagaattcctcgcagcggcgtctgtgtcgcaacccgtggacgcacgtccttggaccaacactgccatctgctggccactcgtaagaactactgcgacccgctgtgagaatgggcttcgcggagaccattaggaaggtgctttattttttattttttatttattttttgctcagtaggaccgtaataggtgactgattttcttttgctgtgaggctacaagaattgctggaagacaacatttttatttcgtggaaatttgtgttgtgtttctccttggttgttaatgctttgcatttacatagtgaacatcttattatcagagctggcctgtgaggagggtagtgggggggcattgatgttcccgtttctgagtgaggagacctatgtcggggccttggtgacctcaagccgaatgctcaaactgctactgctactcctaaggttgtgccattaggagtcacacccgtttggtgatattcaaaaggatatgtcattttattctcccgtggttaaatatatggtgagaggagagcaggcatgtttatgagcccagattgtcccataaaaggctcctgtttaaaaacactccagccccctcccattactggaatgtctgatggagctccgggagatcaaaacaacaaaacaggctctggtagggtgcagaggtcctggtaaacacaccctctgctggaaaacagggagaagtttccaccagtgtagacctgcacttggtttgcctgggctgaagttaggagactgcgtagaaaaaggaaaatgtgtaattttcacagttagaattaacttaggagagctgaaattaactgagcctcggaaatctgaatcttgaagtcaccagtggcttttggggctgtgagagagtctcctgtggtctttaatcatgtgagggtggggtgaaattcaatattcagtggttctgcaatgggatgcactgtgcaattggtgattgagaagccaactctctggctttaggagaagaatgtcttgctgttagtccttctggaaatagagccttgcattgcctactgtctgtttacactacctttgcacattgcctttggttatagagtcatgtccaatggctctttacttctgtttgcagggcaggagatggcaccctgttaaagagaaaggatagtagctgcaaagtcatttgtttctctgtttctgtgactgtatatattggctcatctttgaatggtctttatagccacaccaggctggaggtaacagggtcatgggagtggactgctggtgtgggctgaatcagagttcagatccatgtctccaggaggtaggaggtgcagggcaagtcatgtggcttctggggcatccctcactttcttagttaaggagaagttgaaggagccgatctaaaatatcttgggagtctgcagaaaaagtcgtgaaaatcaaagcactttcaattaaactatataatttagtccttacaagaatgccacagggcaagcaaccagtcaggccttggtagtcgtgcttcctagaagaaaagactgaggttcagagagttggatagagtatcagatttgggatcagtggctagtccaatgtgatttccatcctttcttctgagagaaagcataagaaggccaagaggatggtggaaaagcacaagtcacctgcctgagagtcaacagggcggggggtctctttctcagtttgttcctctaagttatggcaaatgttttttgagctgtgattattgagaatgggggctgaagttcaacatgtagttggcatgagggaagtaattatgattgaagaaaagatttgggtgaaatctagtgttcttccctgcaaagggggttgttctcacggattcttatggtgccatgtttctcagaatttgtagtttcagttacttatatttgcacacctgactttagatgagctccagaatagcagttactaattaaggatgagcatttagagtagataaaagtggcaggaacagcaagactcactcccagagagcctcactacaggtctaataggtgaggaaattccccatgtttcccatttttcttcattacctccctgtggggcaagcactgccattattcatgagtaaactgtctgagttatagataagtaatgacatgaaacttcacaaacacgctgagcacagtggctcacgcctgtaatcccagcactttgggaagccgacgtgggtgaatcacgaggtcaggagttcgagatcagcctgaccaacatggtgaaaccctgtctgtactaaaaatacaagaaattagctggccatgatggtgggcacctgtaataccagctactcgggaggctgagacaggagaatcgcttgaacttgggaggcagaggttgcaatgagctgagatcatgccactgcactccagcccaggcggcagtgcaagactccatctaaaaaaagaaaaagaaagaaagaaaaaagaaaaaaagaaagttcacaaacaggcctgatttctacccagggaaccactgttatcagagattggggtttggaatcttaagcaacaaacacatgtttattctcttccttcctgatggcttgctcagaggacctgtttccattgcccactttttttttgagacagaatcttgctctgtcacccaggctggagtgcagtggcgagatcctggctcactgcaacctctgcctactgggttgaagccattctcctgcctcagcctcccgagtagctgggattataggtacctgccgccatgcctggctaattttttgtatttttagtagagatggggtttcatcatgtcggccaggatggtcttgaactcctgacctcaagtgatctgcccacctcagccttccaaagtgttgggattacagatgtgagccaccacgcccggcctcattggccactttatatgtcagtaaataatctttcctggcagagggtccactgtatctggaggcactgaaggaaatctgggagtgtctggccagggcaaagcactgcttagagcttgcacaggaaaagcagtgagcccttcttttaagctggagaaagctttaaagatgcatctttggcaagtcttgccaaagaaatatgggttctaaatgtgataaaaccaaagacatcaagctggctctggaggccttgtttgaagtttgctgagtggattgtcagtgggaggctgatatttatatgtacaaacacacaagcattactgctaattgtggtaaatcaggctggccagcctggctctggggcccactgtgcctgccaccgcagcagtgtggaagccttgcatcccaggcacatgtcaggatcctcggaggccatcagccagccagcattgtgtgaattgcatttgggttcacagcactgtaattgtgtttctcctgctgtggtgagcaaaggaggaaaatggaaggaggaggtataatttgccctaggaaatagtcaggcaagtaggtggcacacaggggtgggatatggctaaaacactgaccttcccttgagagagaccatatggtgaagtggagagggcatggcgtttgtatcacacgaccttgtgttcaaatcctggctctgtcactggctgtgtgactttgggtcatttgcaaaacctctctgagcctcaactgccacttcttaaaatcagctctaagtaatcacagggttattcttcacaaacacagcatgcacatgcaaactttggcttagtaaataatggtttctccttctcttactttgttttctacataccccactccccttcctgtgaggagccttccacctttttctctgtgttctcttcctctcccattttcctggtagcattcaataaaacagaaatctgatttctgcaaagtaggccaccttacggtagaaatacatgattaggccccaccaaaaactttgattaggctattatcttctggatcctggatcccctccaaccaaaccaaacccaactagggctaaacacagcaatatatgaatacattgaatttctctctcactctttcttttttttaaaccagtttactcaggaatcacatgcacacatattttagcttccaaagccaatgatggaacaaattgtgtcccattaggctcactccattgtatgagttagcatcagaggagttcataccagagtgacttcatcttgaatagggcctaggtaagaagaggatgagacctgctgggctgcattcccaggaggttacacatttgtagtcacaggagagaaaggagttggtataggagttgatagatacaggtcataaagaccccagtgataaaacaggttgcaggccaggtttggtggctcattcctgtaatcatagtactttgggaggccaaggcaggaagattgcttgagcccaggatttcaagatgagcctggacaacatagtgagaccttgtctctacaaacaataattttaaaaacatgagctgggcatgatggtgcaggcctatagtcccagctactggtctgaggggcagttgggtggcaggctgagatgggaggatggaggctgcggtgagctgagatcaggccactgcactccagcctgggtgatggaataagaccctgtctcaaaaatagataaataaataaataaataagccagcaaaaccagaatgcagtgaagaagctggccaaaacccaccaaaacgaagatggtgatgaaagtgacctctggtcatccctactgcttattacacactaattataatgcattagcatgttaaaagacactcccaccagtgccatggcagtttacaaatgccatagcaatgaccagagatactctatatggtctaaaaaggggaggaaccctcagtcctgggaattacctgtccctttcagggaaaactcatgaatcttctaccgcttgttgagcgtataatcaagaaataactataggtatactcactcaagcagccatgcagttgctgtgcccatggagtagccactcttttattcttttactttcttaatatatttgctgtcattttactcttttggcttgctcttgaattccttcctgcatgaagccaagaacctttgtgacctcccaggctgaaccccaattttgagttccaccctatgacatcttttctggtgaccaatgaagggacaatggtaacctcccgttgactttaaattaaaactgattggcactgtttgggcttcaccggtgggtgagtctctccttgcccagattcaacttgctaacatttttttctcttcaattttggctcctttgtccttcctaatgttcttcattttggacagatgggaaagtggctgtgaggcctctggcttagcagcctgatagcagcctcctgttgtctgggtgccccagatgggagcacgcctggctggccacatcttttgcaacccaccttgtcatcccttctctgggaccttttctctttagtttcttttttaaaaaaaattttaaattatttatttatttatttatttttagagatagcatctcgctgtgttgcccaggctggagtgcagtggcataatcatggctcactgaagcctggacctcactggctcaagtgatccttccacctcagcctcctgagtagctgggactataggcatgcaccaccacgcctggctaaattttgtattttttttgtagagacggggttttgccatgctgcctagactggtcttgaactcctgggctcaaatgatctgcctgcctcagcttcccaaggtactgggattataggtgtgagccactgcacctggcctctctttagtttttaatgactggctgtttgacttctctgctcttcaggctgaaattcttatttcatgtttgtagtctttgccttggctatttggcaactgtttaaggcaagacacttggttttgagagttctcccgttgtgttgaccctgggacaccagggtcattgttctgtagctccaattatgttaggtctcatgcttttgggtttcactattggccaccccccagatgctctggggtttttggcatttggtgtggggacccttgttagctgatactctgggcttttcggcatttggatgctccagggtgtttggcactgacattcccctctagcattgtgggttagagtcccacccaggggaaatcttggttttgccttttcttgttttctactctaaagttatcattttctataaaaacattttcttttcttattgtcactttgtttaatgctttgctccaggaggtgggaatttgcaggggaaaataattgggctctccctatacttagaaaaacttctgtgtctagtagagatccttgttagacaaagggacagtggtgagtcccagagaactcgtcactagggtgccttttaggcaattggagcaaattcaaattagcaaactaagtttggccatttggataagtcccagttttgtcagggaaataatttgggtccagctatcttttataaaatagtgcgtttgcgttcctacattatggctagagctcaaagataaaagctattggatctttgtttatgtgtgtgtataaatgtctagatgtgtttatgtgtatgtacatttattatgttatatattgtatctacagggtaccaaattggcttataaataaaagagtgctcataaaaagagtaaataagtccaagcatttctcaagctcatgtaacttaagtttactaaaatttagagttactaaaaattcatatataactctgtataaatgtgccaaagaagatatgctcttagtgaaaataaattctttttggccaattcagatgtcatttatatgtggggtttaaaatatgaatttcgaaagaaaataaaaacaagtagaaagaaataaaaaacaataagcagtggagagagatgtgaggaaagttatgaatatgaagacgtatttttggtaaggaatgttataaagaaattttatgagaaaggatcttatatgataaattcttgtcctaaggtagaatgactgattgtttagaaaagaaggaaatataggacaagtcagaaagtccaagcatgttgtagatgacctatgtaagtcacgataaagtttatacaagagaatttattaaaatttagatgtaattagccataactgaaaggaaatttatttatttatttatttatttatttatttatttatttatgatttattttgagaaggagttttgctcttgttgcccaggctggagtgcaatgtcatgatcttggttcactgcagcctccgcatcctgggttcaggcatttctcctgtctcagcctcctgagtagctaggattacaggcatgcaccaccacacctggctaattttgtatttttagtagagatggggtttcatcatgtttgtcaggctggtctcaaactcctgacctcagttgatccacccaccttggcctcccaaggtgctgggattacaggcatgagccacctcatgcacccagccaggaaatttatatataatactctatctaaattttggtgccctatgttaaaacaagtttttcttcaagtattggtttgctttcagtaagattgcaagaaatattgacttttaattctagaatctgtttcctttgaaggcctctcagatttatatcttttccttttcccttgaaaaggtatagcctttgcaagttcaaaactgacttccctagactccttttaggaaaagcaatacagtggttgtttcaggctgtggctcaatagctaagcctttgttctttcatggtggtggcctgggttcagttcctggcttagagaatgagaggtttccagtttgctacttctgggacttttgtcatttatttattctttttgtctccatcgacagcttctgattttctcacttgaatttttttttctgtgagctaccttaagggtaatgttggatcttgtaaaaattgcttgccatctctttggagatacctcttgtgtccatggttaagttataaccttggttaaggcctgttggtttcactagggaaaatacctttaaaaaaaggcttaaaagccagagatgttggctatttgtcctggctagagtctggtattaagggatttaaaaggattttttaaaggacctctatagttataagtcagcttaattaaaaatggatattccatagtcatatttatatatatatacacacacatatatatgtatgtatgtgtgtatatatatatatttaaaagacctgtatgatttttttcttcttggaacttatttttttgagagaaagtgttttgtgtgtttgttgtttgtttttcttctcagtggactgaattatttctccattctgtctttttaccccctttaatgaccatattagaggacctaagataatttctgacagcctgggactccttgggaggaaacagaaggtgccacagacctcgttttgggagaaacctctgttttcctcatggaaccccaagagctgtaagcagagagttctccctcagaatccaaggctctgctctgtttacgtcacattacctgacctttgtgacttttgggggcatcagaaattactttgcattatgagggaacctttagcattggtgtgtattacctaggtaggatgtgtacttttagggattgcagttgcttacatgagtggttattactacagaccaatacttctttcttctcacatttaaatgaaaaaaaagcatgctcttgggcatccacctatgaatggaggatgggctgatttgctttaggttggccaccagcctttggggaacatcgttgcagtgaaatgcttggtgaaagcattgcactgtctgatcgcatagtgcacttctatgcacttctgcctgatgtcctaggctcaacacctgctacataattaagatcacttacttatcaggtttttaatcaaaatgaaatgttgctaagagttaacattatagcatatgtaattgagattactggagaaagttttacctacaagatatgtaaggaaagcaaaatgtgtttttggtaaaagattataggaaggtgtgccagtatagttttttattttgcttactttaatgggttaaaggattgttttaagtttgataggagaaagctgaagcatgagcaagttgtggaaggtatatgaaagattaacattttaaaagaaattctgtgtgtaaacattggctaaagttaaaggaggaggttggagccaagatggctgaataggaacagctccggtctacagctcccagcatcagcgatgcagaagatgggtgatttctgcatttccatctgaggtatcaggttcctatcactagggagtgccagacagtgggcgcaggacagtgggtgcagcgcaccgtgcgcgaaccgaagcagggcaagccattgcctcactcggaaagtgcaaggagtcagggagttccctttcctagtcaaagaaaggggtgacagacggcacctggaaaatcgggtcactcccaccccaatactgcgcttttccgacgggcttaaaaaaaggcacaccaggagattatatcccgcacatggctcagagggtcctacgcccacagagtctcgctgattgctagcacagcagcctgagatcaaactgcaaggcagcagcgaggctgggggaggggtgcccaccattgcccaggcttgcttaggtaaacaaagcggctgggaagctcgaacagggtggagcccaccacagctcaaggaggcctgcctgcctctgtaggctccatctctgggggtagggcacagacaaacaaaaagacagcagtaacctctgcagacttaaatgtccctgtctgacagctttgaagagagcagtgattctcccagcacacagctggagatctgagaacgggcagactgcctcctcaagtgggtccctgacccctgacccctgagcagcctaactgggaggcaccccctagtaggggcagactgacacctcacacagccgggtactcctctgagacaaaacttccagaggaatgatcagacagcagcatttgcggttcacgaaaatctgctgttctgccgccactgctgctggtacccaggcaaacagggtctggagtggacctttagcaaactccaacagacctgcagctgaggatcctgtctgttagaaggaaaactaacaaacagaaaggacatccacaccaaaaacccatctgtacatcaccatcatcaaagaccgaaagtagataaaaccacaaagatggggaaaaaacagagcagaaaaactggaaactctgaaaagcagagcgcctctcctcctccagaggaacgcagctcctcaccagcaatggaacaaagctggacggagaatgactttgacgagttgagagaagaaggcttcagacgatcaaactactccgagctacaggaggaaattcaaaccaaaggcaaagaagttgaaaactttgaaaaaactttagacgaatctataactagaataaccaatacagagaagtgcttaaaggagcagatggagctgaaagccaaggctcaagaactacatgaagaatgcagaagccttaggagctgatgcgatcaactggaagaaagggtatcagtgatggaagatgaaatgaatgaaatgaaatgagaagggaagtttaaagaaaaaagaataaaaagaaacgaacaaagcctccaagaaatatgggactatgtgaaaagaccaaatctacgtctgattggtgtacctgaaagtgacggggagaatggaaccaagttggaaaacactctgcaggatattatccaggagaacctccccaatctagcaaggcaggccaacattcagattcaggaaatacagagaacgccacaaagatactcctcgagaagagcaactccaagacacataattgtcagattcaccaaagttgaaggaaaaaatgttaagggcagccagagagtaaggtcaggttacccacaaagggaagcccatcagactaacagtggatctctcagcagaaactctacaagccagaagagagtgggggccaatattcaacattcttaaagaaaagaattttcaacccagaatttcatatccagccaaactaagcttcataagtgaaggagaaataaaatactttacagacaagcaaatgctgagagattctgtcaccaccaggcctgccctaaaagagctcctgaaggaagcactaaacatggaaaggaacaaccggtaccagccactgcaaaatcatgccaaattgtaaagaccattgaggctaggaagaaactgcatcaactaacgagcaaaataaccagctaacatcataatgacaggatcaaattcacacataacaatattaactttaaatgtaaatggactaaatgcttcaatcaaaagacacagactggcaaattggataaagagtcaagacccatcagtgtgctgtattcaggaaacccatctcacgtgcagagacacacataggctcaaaataaaaggatggaggaagatctaccaagcaaatggaaaacaaaaaaaggcaggggttgcaatcctagtctctgataaaacagactttaaaccaacaaagatcaaaagagacaaagaaggccattacataatggtaaagggatcaattcaacaggaagagctaactatcctaaatatatatgcacccaacaatacaggagcacccagattcataaagcaagtcctgagtgacctacaaagagacttagactcccacacaataataattggagactttaacaccccactgtcaatattagacagatcaacgagacaaaaagttaacaaagatagccaggaattgaactcagctctgcaccaagcggacctaatagacatctacagaactctccaccccaaatcaacagaatatacatgtttttcagcaccacaccacacctatcccaaaattgaccacatagttggaagtaaagcactcctcagcaaatgtaaaagaacagaaattataacaaactgtctctcagaccacagtgcaatcaaaccagaactcaggattaagaaactcactgaaaactgctcaactacatggaaactgaacaacctgctcctgaatgactactgggtacataacgaaatgaaggcagaaataaagatgttctttgaaccgacgagaacaaagacacaacataccagaatctctgggacacattcaaagcagtgtgtagagggaaatttatagcactaaatgcccacaagagaaagcaggaaagatccaaaattgtcaccctaacatcacaattaaaagaactagaaaagcaagagcaaacacattcaaaagctagcagaaggcaagaaataactaaaatcagagcagaactgaaggaaatagagacacaaaaaacccttcaaaaaattaatgaatccaggagctggttttttgaaaggatcaacaaaattgatagactgctagcaagactaataaagaagaaaagagagaagaatcaaatagacgcaaaaaaaaaaatgataaaggggatatcaccaccgatcccacagaaatgcaaactaccatcagagaataccacaaacacctctatgcaaataaactagaaaatctagaagaagtggataaattcctcgacacatacaccctcccaagactaaaccaggaagaagttgattctctgaatagaccaataacaggctctgaaattgtggcaataatcagtagcttaccaaccaaaaagagtccaggaccagatggattcacagccgaattctaccagaggtacaaggaggaactggtaccattccttctgaaactattccaatcaatagaaaaagagggaatcctccctaactcattttatgagggcagcatcatcctgataccaaagccaggcagagacacaaccaaaaaagagaattttagaccaatatccttggtgaacattgatgcaaaaatcctcaataaaatactggcaaacagaatccagcagcacatcaaaaagcttatccaccatgatcaagttggcttcatgcctgggatgcaaggctggttcaatatacccaaatcaataaatgtaatccagcatgtaaacagaaccaaagacaaaaaccacatgattatctcaatagatgcagaaaaggcctttgacaaaattcaacaacccttcatgctaaaaactctcaataaattaggtatgtaaatgggacgtatctcaaaataataagagctatctatgacaaacccacagccaatatcatactgaatgggcaaaaactggaagcattccctttgaaaactggcacaagacagggatgcgctctctcaccactcctattcaacatagtgttggacgttctggccagggcaattaggcaggagaaggaaataaagagtattcagttaggaaaagaggaagtcaaattgtccctgtttgcggatgacatgattgtatatctagaaaaccccattgtctcagcccaaaatctcctgaagctgataagcaacttcagcaaagtctcaggatacaaaatcaatgtacaaaaatcacaagcattcttatacaccaataacagacaaacagccaaatcgtgagtgaactcccattcacaattgcttcaaagagaataaaatacctaggaatccaacttacaagggacgtgaaggacctcttcaagaactacaaaccactgctcaatgaaataaaagaggatacaaacaaatggaagaccattccatgctcatgtgtaggaagaatcaatatcatgaaaatggccatactgcctaaagtaatttatagattcaatgccatccccatcaagctaccaatgactttcttcacagaattggaaaaaactactttaaagttcatgtggaaccaaaaaagagcccgcatcgccaagtcagtcctaagccaaaagaacaaagctggaggcatcacgctacctgacttcaaactatactacaaagctacagtaaccaaaacagcatggtactggtaccaaaacagagatatagatcaatggaacagaacagaaccctcagaaataacgccgcatatctacaactatctgatctttgacaaacctgagaaaaacaagcaatggggaaaggattctttatttaataaatggtgctgggaaaactggctagccatatgtagaaagctgaaactggatcccttccttacaccttatacaaaaattaattcaagatggattaaagacttaaacgttagacctaaaaccataaaaaccctagaagaaaacctaggcattaccattcaggacatagggcatgggcaaggacttcatgtctaaaacaccaaaagcaatggcaacaaaagccaaaattgacaaatgggatctaattaaactaaagagcttctgcacagtgaaagaaactaccatcagagtgaataggcaacctacaaaatgggagaaaatttttgcaacctactcatctgacaaagggctaatatccagactctacaatgaactttaacaaatttacaggaaaaaaacaaacaaccccatcaaaaagtgggcaaaggacatgaacagacacttctcaaaagaagacatttaagcagccaaaaaaacacatgaaaaaatgctcaccatcactggccatcagagaaatgcaaatcaaaaccacaatgagatagcatctcacaccagttagaatggcaatcattaaaaagtcaggaaacaacaggtgctggagaggatgtggagaaataggaacacttttacactgttggtgtaaaagtgttggtgggactgtaaactagttcaacccttgtgggactgtaaactatttggttggtgggactgtaaactagttcaacccttgtggaagtcagtgtggtgattcctcagggatctagaactagaaataccatttgacccagcaatcccattactgggtatatacccgaaggattataaatcatgctgctataaagacacatgcacacgtatgtttattgcggcactattcacaatagcaaagacttggaaccaacccaaatatccaacgatgatagactggattaagaaaatgtggcacatatacaccatggaatagtatgcagccataaaaaatgatgagttcaggtcctttgtagggacatggatgaaattggaaatcatcattctcagtaaactatcgcaagaagaaaaaaccaaatgccgcatattctcactcataggtgggaattgaacaatgagaacaacacggacacaggaaggggaacatcacactctggggactgttgtggggtgggggtagtggggagggatacctttaggagatatacctcgtgctaaatgacgagttaatgggtgcagcacaccagcatggcacatgtatacatatgtaactaacctgcacattgtgcgcatgtaccctaaaacttaaagtataataataataaaataaaaaaatttttaaaaaataaagttaaagggatattattattattatttttgtaagttaaacattaggattaaaaagcacaacagagttttctagagcactgatctactctgtaacagaaaattgtaaagggtttaaaaggtttatgagaatcttaccttatggtcaaactggttaagattgggaagatttgtctataaagttttattaagaattgggtttgacattaatactacactaatgcaaacgtgaaatgtggctttctctcttgaataagattttcatgtattattacaagataatgaaagatttttatttgctttttaaataaactataggaaaaataagggagagaaaagtgacagatcatttggaaacccaagtctcccctatatcaatgagtaaaagtttttacctttttgaaatctttgagttatcattttggctaaataaatgctttatggtgacctgggattctattttgtaatatcaactgtttaaaccttttgtatttgacaaacgttccaaactgaaattctaatgtaagtctttttctgacctgattagtccttctagatattaggtcccctaaagtccaaaagtgacatatttggcttattagatatattaaaatcatacaggaagcactttcaaatataaaatgctatttggctttctttggactatacttatataaatgtgttattggtatatgttccaaaattatgcaaaactcctataattctgatatgacttagtgtacattatcagtcataattatagttcttatgttacattattgtgtgctacagagttaaccaaatttctttgtcaattgcatctttaatcagctgtcctaagacttttgtcacccacagacaattgtcttgttttaatccttttcaaaaggtggtttataatcagctataggactctgatgggtactctaaaatgcaagcctctgataactttgaaaattgtgccattggctgggcatgatggctcacaactgtaatcccagcactttgggaggctgaggcaggcagatcacgtggggtcaggagttcaagactagcttggccagcatggtgaaatgccatctctactaaaaatacaaaaatcagtcaggcatggtggcatgcacctgtaatcccagttactcgggaggctgaggcaggagaatcacttgaacctgggaggcagaggttgcagtgagctgagatcgcaccattgcattccagcctgggcaacaagagggaaactccgtctcaaaaaaaaaaaaaaaaaaaaattgaaaaagaatattgtgccattgaaacagaaaagaaaacacaaataaacttccaggattctcatagaaacttaatatattcataaggaatgtggcccaatatcaggcaaaacaagagttaacagcatggactaaactaataaaagaccaaaacaatcttttaatgactttttgcttaaaacattgcatatcctttctgttttgcttttcagagtcaagaaaacttttcctttggaaagtatttactgcttttaacaattgaaaaaagtatactactatggacaaaatttggagcatatgtctttctttttacctgatttctccagaatttgaaaactatttgggagtattcttaactaatagcaatatagttatttgcctaagtgcagtaagaatcttttcttttgtaataggacacaattaaagaaactgcttattttatgaaggctttgactagaatggtgtgctttcagatacaaacagactgctttaagggatcaaagttgacttatagagccaataaaagccactatggaaaactggccttattctttgtctatgcagtctctgtatggggttcctgacctgtggtaagtgaagaatgtcactttctgacaggcccaggagccccaagttatcttgggacatcaagaagaaaggaatgcacccaacttatacaggtatttgcaggcacagataaatctgtggctggctcaaggctttaagaagcctaatgtgagattctttttaaattaaatttccatcgaaaccaattttaacaagagcctatgtggcaaataattatttttgctgcactttatacaaataatcaggccaaatttcataagattaaaactttatggcaaacaaatttgtcccactatgatttgtctttggtaaaaatggaagctagagagagaatttgtttcaaaaactatgatacaccagttattagattctagtctcgtctgttgtttttgagtttcttctgcaatttaggcagaccctgcttattcctgagaatcaaccagtgatctatggctgttgctcagaagaaataagagggatggctaacgtaaagatctggattagtattctaattctaggcatgtattagaattggctagtgaccccatatcagcttggttttaacaattacccagttcatggaaagccttcttatttagtttacttgggataattgtgctgattttgttttactgttgtggaatatattgctgttgtcctctttgtgtaggaatgcaggaaaagcttacttaacattttcttaaattgaacacttattaatcttccagatttcaccttttgtcagaactcagagttatgatttgtcctcactgtactgacaacaggctctggtagggtgcagaggtcctggtaaacacaccctctgctggaaaacagggagaagtttccatcagtgtaagcctgcacttgggttgtctgggctgaagttaggagactgagtagaacatttgctgcagaaaaaaaagaagatgtgtaattttcacagttagaattaacttaggagagctgaaattaactgagcctcggaaatctgaatcttgaagtcaccagtggcttttgggactgtgagagagtctcttgtggtctttaatcatgtgagggtggggtgaaattcaatattcagtggttctgcaatgggatgcactgtgcaattggtgattgagaagccaactctctggctttaggagaagaatgtcttgctgttagtccttctggaaatagagccttgcattgcctactgtccgtttacactacctttgcacattgcctttggttatagagtcatgtccaatggctctttacttctgtttgcagggcaggagatggcaccctgttaaagagaaaggatagtagctgcaaagtcatttgtttctctgtttctgtgactgtatatattggctcatctttgaatggtctttatagccacaccaggctggaggtaacagggtcatgggagtggactgctggtgtgggctaaatcagagttcagatccatgtctccaagaggtaggaagtgcagggcaagttatgtggcttctggggcatccctcactttcttagttaaagagaagttgaagtaatcattctgaaatattatgggagtctgcagaaaaagtaatgaaaaccaaagcactttccattaatctccataatttagtccttacgataatgtcacagggcaagcaaccaatcagaccttactagtcgtgcttcctagaagagactgaggttcagagatttggacagagtgtcagatatgggatcagtggctagtccaatgtgatttccatcctttcttctgagagaaagcataagaaggctaagaggatgggggtaaagcacaagtcacctgcctgagagtcaacagagcaggggtctctttctcagtttgtttctctaagttatggcaaaagctttttgagctgtgattattgagaatgggggctgaagttcaacacatagttggcatgagagaagtaattatgattgaagaaatctagatgaaatccattgttcttttctgtaaaggggttgttatccctgattctttttttcttttttcttttttagatggagccttgctctgttgcccaggctggagtgcagtggtgtgatcttggctcactgcaacctctgcctcctgggttcaagtgattctcatgcctcagcctttccagtagctggaactacaggagtgtgccaccatgcccggctaatgtttttatttttagtagaggtggagtttcaccatgttggccaggctggtcttgaactcctgacctcaagtgattcacccaccttggcctcccaaagtgctggaattacaggagtgagccattgtgcctggcctgttctcactgattcttatagtgccatgtttctcagaatttgtggcttcaattacttatatttgtgcacctgacttttaggtgagctccagaatagcattactaattaagaatgagcatttagagtagaaaaagtgacaggaacagcaagactcacttccagaaagcctcactacaggtctaataggtgaggaaagtccccatctttcccatttttcttcattacctccctgtggggcaagcactgccattatgcatgagtaaactgtctgagttatagataagtaatgacatgaaacttcacaaacaggcctagatttctacccagggaaccgctgttatcagagaagggagtttggaatcttaagcaacaaacacatgttgattctcagtatttgcctcctgatggcttgctcagagagcctgttttcattgcccactttatatgtcagtaaataatcttccctggcagtgggtccaccatgtctggatgcacacagggaaatctggtggggtctggccagtgaaaaacactcctcaggttttgcaggaaaagcagtgaacccttcttttaagctcgagaatgctttaaagatgcatcattggcaagccttgccaaagaaatacgggatctaaatgtgataaaagccacgacgacatcaagctggctctggaggtctcctttgaagtttgctgagtggattgtcagtgggaggctgatatttacatgtagaagcacacaagtgttactgctaattgtggtaaatcaggctggccagcctggctctggatcccactgtgcctaacaccagccctgcatcccaggcacatgccgggctcctcagaagcgatcagccagccagcattgtgtgaattgcatttgggttcacagcactgtaattgtccttctcctgctatgaggagcagagagggaaaagggaagggagggttgtgtaatttgccctaggaaattgtgggggagggacaggcactgggccgggtggggggcggtgcgacatggctaaaacactgaccttcccttgagagagaccatatggtgaagtggagagggcacagcttttgcatcacacaggccttgtattagaattttggctctgacaccagctgtgtgaccttgggtcatttgcgaaacctctctgagcctcaactgccccttcttaaaatcagctctaagtaaccacagggttattcttcagaaacacagcatgcacatgcaaactttggcttagtaaataatgatttctttttgttctatctactccacctccctttcccattagaagcttgctacctttcactctgtgttttcttcctctcccattttcctggtggcattcaataaagcagaattctgatttctgcaatgtaggccaccttagagcaaaatacatgatcaggcaccaccaaattaggctattatctactggatcctgtttaaccaacccaaacccaactcaggctaaatacaggaatacaagaaaacgctgaatttctcccctttctttttttttttttttttgagacagagtcttgctctgtcacccaggctggagtgcagtggcgcgatcttggctcactgcaagctccacctcctgggttcacgccattctcctgcctcagcctcctgagtagcggggactacaggtgcctgccaccacgcccggctaattttttgtatttttagtagagacagggtttcaccgtgttagccaggatggtctccatctcctgatctcatgatctgcccgcctcagcctcccaaagtgctgggattacaggcgtgagccactgcgcccttccctccttttttttttaaaacaacaacaacaacaacaacaaacagtttattcagtaattatgtatacgtattttagcttccaaagtcagtgatggaacaaattgagtcctattaggcccactccattgcatgagttagcatcagaggaggtcaaactagagtgacttcatcttgaatatgggctaggtaagaagaggatgaggcctgctgggctgcattcccaggaggttaggcatttgtagtcacaggatgagataggagttgggtaggaatggtttcataaagaccacaggatgcaagctgggtgtggtgccttatgcctgtaatcccagtactttgggaggccaacgcaggaggattgcttaatcctaggagttcaagaccagcttgggcaacatagtgagacctcatctctacagataatttttattttattttattttatttttttgtgatggagtcttgctctgccgcccaggctggcgtgcagtggcatgaccttggctcactgcaacttctacctcaggggttcaagcgattctcctgtctcagcctcctgagtagctggaattagaggcgcacaccaccacgcctggctaatttttttgtgtttttagtagagatggggtttcaccatgttggccaggctggtctcgaactcctgacctcaggtgatccacctgccttggcctcccaaagtgctgcgattacaggcatgaaccaccgtgcccagcctctacaaataattttttttttttttgaaatggaatctcagtctgtcgcccacactggagtgcaatggtgcgatctcagctcactgcagcctctgcctccctggttcaagcgatttgccttacaaatgatttttaaaaaatgagctgggtgtggtggtttcacaagatacgggtgataaagaccccaggatgcgggccgggtgtggtggtttatgcctgtaatcccagcactttgggaggccaaggcaggaggattgcttaagcctaggagttcaagactagcctggacaacatagtgagacctcatctctacaaataattttttaaaaatgagctgagtgtggtggtgcaggcctgtagtcccagctcttgggctaggcatgggggtcagctcaggtgggaggattgcttgagcccaggagttcaaggatacagtgaactatgattgtgccagtacactccagcctgggcaacagtgcaagaccctgtttcataaacaaattaaaaaaccccaaaaacctaggatgcaatgaagaaggaagccgaaacccaccaaaaccaagacggtgatgaaagtgacctctggtcatcctcactacccattatatgctaattataatgcattagcatgctaaaagataccaccagcaccatgacagtttacaaatgttgtattaatgacaggaagttaccctatatggtggaaaaaggaaggaaccttcagttctgggaatttcctccctgtttctgggaaaatcatgaataatgcacccttagtttagcatataatcaagaaataaccataagtatactcagttaagcagcgtggctgttctgcctatggagtagccacccttttttattcctttattttcttaataaatttgcttgaattccttcctgggtaaagccaagaacccatgtggcctcccatggtgatctccaattttgggattcaccatgtgacattaggagcaacttagggatctggtgcatcccaggccaagactaacatggtgatttttggggggttatgttaaaactgggggctctgcccaggcccctcagtgtggcttcttgagtcaatacctgggtacttactggccctagcacctacaagttcattcacagttccttctcactgacttcaccagtgaccactatcagtgacttcaagggagaaatgaggggggagataaaataaagtgaatggggaagagataaagaagagaggtcttttcacagtttgccagaatagtcccttcagtggttttaccccagggcaacaggagcccccttttagtttctttctcttttaattttcttttcccttcccactttttgcccactttttgccttatttgtgtctgactcaatttccgtctctttctctacttcttcattcccagatttggctgtagaaaattagaaagttcttgaacttggtttgcacgggtgcttttactttaacatgaaaatgaatgatcagcctccttctaatttcatcctagagtctactgcatccctcctaccccctgcacaggaatttagtcacacttatctctcccactttctctcccttcttcactttctctattgctcctcctttcatgcttgtacctgcttttccatgccctgtttagcctggcttgggatccagcaggttctccaagggttcctgcaagaaccccggctgggtgcccaggtctgagcctggtatgtgcctcagtatcacaaaggcctcctgtaaatgacacacattgttggaagtttcagaaattctaggtcaaaatggcactgaaatattaaggtatttaccccaacccaagcaacttttctaaaagttgtagagagtgtgacctctttattaattgaaacgtgaaaatcagctctagtttggaagctgagaaaaaatatatatatatgtatttatttctttgttgtttgaattcttaatataaatggtttaaaggaccattgaaaactgcatgcaatcacagaaggttttggcttcaggcagctcccgccatgatcttggggccccattgattctttcatctttcaggcgtcttactgtttgaaccttgaattttaacctgggacatgtttgactaaaatgatgctgttaatattttctgttgtgcaaaacacaaagagaactaggctccagggttgtttctatttgctaatgctgtttctgttgacttttgacttttctagtttcccagagctatggggacttcccatccggcgttcctggtcttaggctgtcttctcacaggtacggagcccagtcctctctgagttccttgtttgggtgtcttgtttttttaagctttgtgctgcatgggtttattaccagtactctgcatacacagtccaaaagagtgaaaagaaatagaaaactataggacgttatccagaatgaccacaaaccttcagttccctttgctgtattgcacttactccatttcaaaaggaatgctctccagtggcagttttagtacatatataatgttggcattgaaatgttgttagtaataatgtctaaatttacttactactctcttccttttcctaggacaaggcttctattagagctggattagataaattcaggaatggtcagctgtgggaggtggcacatctgttgtcccagccccttgagcagctgaggtgggatgatcccttaaggccaggagttcaaggttgcagtgcactgtgattatgcctgtgactagccaccacactccagcaacatagcaagacctcatttaaaaaaaatgttcaaaggaaataaataatagaaaattcttgcccaagaaatcatacttgtcttaaatcataactctcttgaggaaagatgcttacattgcttctaaatctcagagtcacctttatcttctctaggaatcaaattgatagatgaatgtttggctcttggaaaatcttaaaaactttcccaccaaaaggatcattggggtaatttgttgaagtgtgtattggactgtcttagttttcctccagatatttatgcactgcagatgttcgccatgaaaccagtgctcttctattctgaggagttagctcagcccgttagtgtctttgtcttacccatttggatatggtagaattgagcaagaccagagattcaacagttctaagctccactaagtataccccatctacagagtaataggtgatccagatgtacttacaaatcctatcttaacaagctttaggaattatagtggtcatatattgaagttgggtgggagtctcacaccaggttccaagggagattacaaatcactaattaataattaagtcataatatctcttctatcagtctcgggtttcttgttttctaagttctgtgctccatgggtttattatctgtactctgcttacacagtccaaaagagtgaaaagaaatagaaaactacaggacgttatccagaatgaccacaaaccttcagttcctttgctgcattgcacttactctattgcaaaaggagtaagtgcaatttcagtctaaataagcgagactgaaatttgagcttcgaagatgaacttagagttttcactcttgggttttacttaccaattgtgaattaaaatccgtatcatctggcaccactgcactccagcctgggtgacagagcaagactccatctcataaaaataaagaaataaataaacaaataaatccacatcatcctgctttggccctggaagtcatgagggagagacggcatgcccgagggctataagaaatggaagatgtggaattcttgagcacagatgtgctttgtgttttcttcagtctgtgtccttgcctccattcttattccatgtgggtttttttttttttttttttttttttttttgagacagggtctctcgctctattgcccaggttggagtgcagaggctgactgcaacctcaatcccctgggctccagtgatcctcccacctcagcctccagagtagctaggactacaggtgtacaccagcacacctggctaatttttttatttttttattttttgtggagaccaggtctcactacgttgcccaggctggtctcgaactcctgagctcaagcgatcctcccacttccacctcacaaagtgctgggattatagacatgagcctctgcgccccagcctcatctcattttaactaaaggaaacctttgcagtgattgtgaaccataaagaacccatatgtgcttgagcccgtgccatcttgggatattttatggttacacataagagtctgaaatatggaattggaatcagacatcctctgtctatttgagtgtttggaggggtgaatctagtggggcttggtggagctatttggaacatttgctgctctcagcagatgcagtggctgttataatgggggagctttcatgggcatccaggctaacggatttttgtgtagaaatggtcattgttcatctaagctgctactgttgcttctctcagttgtcgggatgagactgtcctttctgactgcatcctattcagagcgtgcttccttttgcagggctgagcctaatcctctgccagctttcattaccctctatccttccaaatgaaaatgaaaaggttgtgcagctgaattcatccttttctctgagatgctttggggagagtgaagtgagctggcagtaccccatgtctgaagaagagagctccgatgtggaaatcagaaatgaagaaaacaacagcggcctttttgtgacggtcttggaagtgagcagtgcctcggcggcccacacagggttgtacacttgctattacaaccacactcagacagaagagaatgagcttgaaggcaggcacatttacatctatgtgccaggtgagttggctgggtctccaggaccaagcttcttctcttcctgtctctcctgttaaatgtactaaggttttaaacatatatataaataattaatatttattgcgggaagtttgaaaaatgtaagcgaacacacacaaaaatcatttgtaatattatcaagaaatattcattgttagcatttcagagctgtattaagtttggaaagtcatctttgttatgacatgtcctgtattgatactgtataaacaatctgaaatatactcatctctattcagttcattcaagttgcacacatactcacagtgtgtccagcactgggctaagtgttgagtacacaaaaattaataggtaagccctgtcttggagttgctgatagttcattataatatcttccaaataaacactcgatttttcagattcactatcaacatacatttattcttggagagttggaaggaattttctttttccttttaaaaaagttacatatatatatatatatatatatatatatatatattttttttttttttggtaacagggtctcactctgttgcccaggctggaatgcagtggcatgatcatcatagcttactgcaatctcaactcccttggttcaagcgattctcccacttcagcctccccagtagctgggattacaggcatgcaccaccacgcccagctaatttttatattagttgagacgggggtttcaccatattgaccaggctggtcttgaactcctgaccttaagtgatctgcctgcttcggcctcccaaaatgctgggattacaggcgtgagccactgtgccctaatttttatttttatttttgtagagatagggtttcactgtgttgcccaggctggtctcaaactcctgggctcaagtgatccacagccacctcagcctcccaaagttctgggattacaggcacgagccactgggcctggcctactcctgcattttaattaaaaggacaaaagggtcgagcacaagtgatggcaatttcagtatgcagttgggtaaattaaaaaggactatggctagaatccttggttttagaacaaaacctaaactgtttatgattcttgccatccttgctgttttggcataggtgtgtcttcctacctttctgccttttctttttcagtttttaatgggctcctcttcctaccctctataactacgagtgtccccagggatctagaccctctttactttttcatgatactcttattcatatgaaccttccttcttaacaattaaaaaaaaccaaaaactttgttttgaaaagggaaggtatttagaatgtcactccaacttcattcacacttagattccttcaggaaaatcctctaggtgtggagggattttcccctgctgtgaagagaatggtaggaacgtgaatgtgttaaaggcacacgagtccctgaagttttaatccgtgtaagattgtccaaaaattcttcttgttccagcacagatgccatccaagtagcccctgcatcgctgtctgactgagatctttttattcgcaatcatgcagacgtaggggccctttctgcagctgatgtttgagactgttagaacttcttaccaccgtagcttaagtagctgtttttcttttggaaaggaaattctcaggctccttctccttctttaaattttatgtatttctcaaaggattactttttaataaacagatttctatgctatttttgaatcatactgactataggtggtaagagtttttaaaagcatttcataataaaactcgaaatattttttcctgttttaaacagagttggactgtattattttattgttaatttttgtttttagttgtttaaattttgatttagattcctggttagtatttatttatttatttgtagagacagggtctctctatgttgcccaggctggtctcaaactcctgaacacaagcaaccctcccaccttggcttcccaaagtgctgggattacaggcatgagccacaactcctgtccagtattgatatttatcatcagtattatccatcaggagacaggcaatttggtattattcatacttaaaaatcactttgtagctgtcatgataactaatgccagtggggcaattcttctggatatatgtgtaaaggtgaacttcatacctaatatcaataatgccagtgggatagtttttctggatttatgtgtaaaggtgaaattaatgtctaatagagtcttcattcttttttaaaccacagacccagatgtagcctttgtacctctaggaatgacggattatttagtcatcgtggaggatgatgattctgccattataccttgtcgcacaactgatcccgagactcctgtaaccttacacaacagtgagggggtggtacctgcctcctacgacagcagacagggctttaatgggaccttcactgtagggccctatatctgtgaggccaccgtcaaaggaaagaagttccagaccatcccatttaatgtttatgctttaaaaggtacttgtatcatctccttccttctttaaataagagtaacaggcaaaatcataaggtgcgtgtaggatttttttttttttttaaatcatcatcactggtgatcctaaattctgatttggggatttaggaccccagctaatacaatgtctgtggctataataataagcttaaaattactaaaggccaaagcttgattacccatgcaagatttcatgtttcatcagttgacttcaaaatactgtaaggaattcttttcttacataagcctcttactttcattcacattcctgactatggcggccctaaaaacaaacatacacccagggggttagatgcctagattaattttagtaacttaagaaaagtgatttgaagaaagtagtttagacttcaaccctttgatgtccacagttagtacgcttggggaagtataatacatgctgaggtcaacagatatttcctgaacactatattacatggaggaatgggtagcagcaagagtacactgttttaaaatcagagcacagctaattttgtgccaggcactgtgctaggttctgggaaagtactgagaataactgaggagcagagtggaagagaagaagagaagaaacaattggatagaaacaaagtgtctagagcagtgtggatcagcaaatgttggttgattaaatgaataaatttattagtcaaggagattgtggacgagtataaccataactaacccactgctgaggaatgcggtgttctgtttgattggaatttatttttattgttattattttgtaattctgtattataactatatgcctaattgttgtacaccatctcacaatcaagccttgtgagattttccaaattttatcttgatcaaactggtttgcaaattatttttcagggttttcttaaaaaaaaaaaaaaaaacccaaactttataagatcctggctatcctgtggatttttaggcccttgtatttgttcttttttatagcaacatcagagctggatctagaaatggaagctcttaaaaccgtgtataagtcaggggaaacgattgtggtcacctgtgctgtttttaacaatgaggtggttgaccttcaatggacttaccctggagaagtggtaggtaccctcaaaacgtgcaatggcttggagcagagcaacagggctcagaagacctgcatttgagctcggtctgtcactgatgggcacatcactgagtttctctagaccttagcttcccacctctgggatgaacacatttgattaaatggcctttaggactccttgatcaatgggagagtttgaaatgatagttcctggaccaggcccttcagaatacataaagagtgtgccgtaagccttctttttcagaagtcagacagaaataggaaggttctctggctacaagatatcaaccaaaaaattagaagagcaaaaaaaccactggattttactattgcggagacagtgattgattctcatcgtcttggcttctgtgccctgaggtttgattcatctgatagtgttgattgcccgcaccccttcctcttctgccttgttggcacccaggacaatgtgtcttcctgttccacctcctatgtgcctgacctttgcatggctcaccttcagtgaaccgttatgatgtaatcattcagcaaaggtttaatgaagtttgctcaatcccaagcactgtaccagaagctggttcagtattgcaggaagaagggaggaggggagatggaagtggggaaggggagccaccatgctgcctcttggtcactggagatttacagagtctcagtcattctaatgcattgtcactaagtgtgtaagacagccatgtgtaagaggctatgaatgcccaaatgcaggaatgactaatattcttatggagaacaaaaacgagatatatatatttcttgcctccactcctgacttgtaaatttctgctccctgttcttttaggcatttgacagctttctgtccttctatccattgatctccctccttttatccgtttctctctcccatgcatttgccgctgcttttcatttgtcctggggcatctgataggaagttgggcattttcactattgcctcacaaacttcacacagtgaagggacatttacagtccaacaaatgtacatcttccctgaaatatgaagtgatttggttcttctgttcatacttgattgactttaatccttaacacataaacactgctttctatttataggagacagcaatttttttttccaaaccgaagtacatgctatttggcttacaaatatataatcaaagtattgtttcatacagtatgttttttccgattataaaagtaatgcaggtttattgcagaaactttgtaaaatatggagagacaaaggaaaggctacttcccagagcatcactgtttatattttagggagataaagcttttatttttcatttgtatttctttcttttttttttcttttttcttttttttttttgttgtggagatgaggatctcactacattgcccaggctggtctcaaactcctgggcttaagtgatcctcccaccttggcctttcaaagtgttgggattgattacacatgtgagcctctgagcttgactgagataaagctcttaagtatttcttatccatagataaacattgaataataggtgttattctttaaatggtaatttattacattctttatccttcagcagtatagcacaaacaccttatatgtgtcattaactgtccttttaaaaaatgggctgggtgtggtggctcatgcctgtaatcccagtactttgggaggctgaggcaggagagtcacttgaggccaggagtttgagatcagcctgggcaatgtatcaagactccgtctctacaaaaatttttaaaaattagccaggtgtggtggcatgagcctgtagccccagctactcaggagactgaggtgggaggatcacttgaacccaggaggttggggctgcagtgagccatgattgtgccactgcactccagcctgggcagcagagtgagattctgtctctaaaaaaattaaaaacaaaataaaaaatctcatgattttctaagcagctagcttttattctttaggttttatcttttagagcagttttaggtttacagcaaaattgagaggtacagagatttcccatgtgttccctacacccacacatgtgtagcctcccaccttgtcaacatccctaccatccatttgttataactgctgaacctccattgacacatccatatcatccagagtccatagtttatcttagagttcactcctaggagcgagctttttaaaagtcggttttcttccccttttgctgtagaaaggcaaaggcatcacaatgctggaagaaatcaaagtcccatccatcaaattggtgtacactttgacggtccccgaggccacggtgaaagacagtggagattacgaatgtgctgcccgccaggctaccagggaggtcaaagaaatgaagaaagtcactatttctgtccatggtacattccgctttctaaaatgtcagttgtccatgctgctcgggatccatatgtggtaatcattatttaatggaaactcttccctgtacagagaaaggtttcattgaaatcaaacccaccttcagccagttggaagctgtcaacctgcatgaagtcaaacattttgttgtagaggtgcgggcctacccacctcccaggatatcctggctgaaaaacaatctgactctgattgaaaatctcactgagatcaccactgatgtggaaaagattcaggaaataaggtaaagaaactctctgcccaagtatgcctttttttagtgtgcatcagaggcggactgaggtttgtgtgtgtcttacaacccagacccaaagtcagtctagaaaatgtaacaatctgagttaagagatgcttgaaatcacatccctttaatgataacattgcaaagtggtattagtatgctggtaagtatttaatgagaagatgagaagaaagaactaaaagctctggcccctggggaaagacaggtcactggattcagctagggtggaagaaaggaagtaaaattggactcaccaggattgaatagattgaatatattccctgatgttcatcatccatatcgcaagtagacagatatggtgattacacccatgaggcagttatcacatcaccttacgtgaaagttaacgtcataggcttaatctggaacccatttgccctaattgaggactccacaggaaagaagagtagagcctggctaatcaggagagagatgtgcagtgagttgcttggatccctaccttttaatcagaatggtagattgctctcatctcttaattggtggtggagttttgaatgagtcacccctcagccacagtttcctcatctacaatgtaggataaacaataccttatgtccttcaaggcaaggaattggatcagatgatatcatgaggcctcttaaggttttaagctgtgattagaacccaagagtcagaagatacatctcacagcacccagctaaccagccctatacttttgtcagaaatcatctcagaaagacaaagtcagtcctgtatttcaagccttcaggaggaagaacagagcctttctcatcagttccattcacctcaggatttgctttcttctttgtgaactaaattccacgtgtaattgagaagcaatgtctgagaaaatggaattttacagcctctatagaatagtaaaggaaaaatgaagtgggatactgaatctggaaggctttctgttgacacaaaatgaaggtgtacaacaaggagggcagctttccacgaggaacttccatgaggctgtgcagccagagaggaatagggtaacaaccctggtacagctaacacctccaacacgtgtgtgagcactgtctgcaagccataatccatagcagtggcaggacaggctcgccaactgagtggttctggaaagctgccttttccttttagtgattcaaggatgcttcaacgtggattttttagttcctgttatgagccagtgaatacaaagatgaacatggtagatgggggatctggcttcctggagcttaaaactccaggatgggggatctggctttcctggagcaagaaaaccagtggttttcttggccgaagaagtgaagagaacaaacagcagaggataatttggtaatcagcatcctagtgtgccccagggtactctcttaaggaaatccagtcctggagcacacccagtatggtccagcctgctgtcttcgtaggtctgagtgccccagtatttgcaaagtgttttggagcctatgaaatgctttcacacatacaatctcctttaattaactctcacaatgactctgtgctatgtgtacaattatcacgttttacacacaaggaaactgaggcatggagcattgtaataatacccgagatcttctcactccatgaccaatgcttttcttctccattccagttgctttttcaactgtgatgatttataaaggacaatcaaatgggcacatactatatttatgcacatacatacacacacacacacacacacacacacacacaaccagatgtcatttataatccatgtaaaatatttttggggaagtttctctttaataaagtttgaagagacatatattttttttttttgaagaggcatattttttctaacttttttttttttttttgagatggagtcttgctctgtcacccaggctggagtgcagcggtacgatcacggctcactgcaacctccgcctcctgggttcaagcgattcttcagcttcagcctcctgagtagctgggattacaggcatgtgccaccatgcctggctaatttttttttttttgtatttttagtagagatgggggtttcaccatgtttgtgaggctggtctcgaactcctgacctcaagtgattcacctaccttggcctcccaaagtgctgggattacaggtgtgagtcatcacacccagcctataacttttttttaataggtgatagaatcccgtgcttgaaaaataatcaaacaaaaagagaatgcattgtaagaagcctcactgtactcctgtccccagctgcccagttctcccctcctccccacagggaaacatcttcattagtttcattaggttcttatgaaaccttccagagtttctttaagcaaaatacaagcaagtaggactgtcatatcctgcagaccgctacatacaaatacatagaaagtgtcctcattctatcctccagtgatattccattttttggctgaaccacctaaatgatggatatttaggggaagcaagtattttttaaaaaaggtaaaaatcaaaggtttttattttttatttttttaaagaaaagttggtaggctgtgtttattcattcagaagtcaggccgtggctgaactgatagctcttggagatggccattgctcatctctgaatgtctggttttctcttgtaagaattgtgtgtatgatccagaccttcagtgtgtgcactatatattgagaattccagaagagatgatatggacaagaaaaaaagatgactttactttttacagtaaaaataaaacttaaattgaagagtacaattgtttaaacaattggaacttacttagctactgcttgttgaaacaaaatcctttttttaaaaggtatcgaagcaaattaaagctgatccgtgctaaggaagaagacagtggccattatactattgtagctcaaaatgaagatgctgtgaagagctatacttttgaactgttaactcaaggtatgtaaagggagtataaagataatgctagctctgtagatgagtgtcttccaaggaaagcctggcacttttctccccggtcatggaagaaaagcagcacttaggggagaagcagtgtctgcatatgtcacatatcgggaatacctctgctggactcatgaattcaggtatttctgggaggttctgggttactctagagtaggcgaggaatccctaggctccaccagctagctttatttttgtagagatggagtcttgccatgttgctcaggctggtctcctgggttcaagctatcttcccaccttggcctctcaaagtactgggattacaggtgtgagccactgcacctggcctccaccagcttacttagcacctgcttctcaatctgagaagagagaagcagatgaccttagattgttctggagagttttgctacaagttttccttatagacattgtacagtggtccttaccagaagggagtgcccaagtctgtttacattcaggctcagcacctatccagagtcccagccatgagccaggtgctgtctgaggtgcgctcatgtgatcctcacagtaaaacctgtgatacaagcaacaccgtatatctaatttatttgaccacagatttagaaaagaatctttaaaacctaataacataccacagatgcattttggtaaatgctgctttagattatactttagctgaatccattagttgaatcctaagctataatataattttaagaacctccttgcctttcaagccaaataaccaagggactttctctctctctttccctccctcccttccttccttccttccttcttctctccctcccttgttatctcttttcctttcctttctctccttccttccctcttccctttttcctttctctccttccttccttccttgcttccttcttccctccctcctttgttctctcttttcctttcctttctctttttctttccttccttccttcctcactcactcttttcttttcctttctctccttccttccttccttcctccctccctcactctctcttttctttgcctttctctccttccttccttccttttcctccctccctccctcccttgttctcccttttccttccttccttctttcctttcttccttccttccctcttccctcactctctcttttcctttctctccttccttccttccttcattctcccctcccctcccccctcccctccccctcccctcccccctccccccctcccctccccttcccttcccttcccatttttcttctcaccatgttgcccaggcttgcctcaaactcctgggctcaagtgtttctcttccacctcagcctcccaagtagctggggctacatgtgtgaggcatcacaaccatggacttttcactttcttcactccaggttaaaaacatcacagggataaatctcaaaacaccaaaactgtgaaaatgctgctaaccatgtgggtctgtctaaactggagtgttacttgtacaactggtttcagcccctccggagtgttttgaatgccatgtagatgagttgtgaactcatattccactttgtagtctcatatgttctgggacacgagctattccattctgacttctttctgcctcttgcagttccttcatccattctggacttggtcgatgatcaccatggctcaactgggggacagacggtgaggtgcacagctgaaggcacgccgcttcctgatattgagtggatgatatgcaaagatattaagaagtatggaaaacagatgtgtcttcttctttcgtggtcagaatatttctcccttgacacaaatgatgtcaaatacattttacttattgactataagatagggttttgggtgtgatagcttcagggtgtgtatcttttgtcatgaatagctgtgagaagaaggtccagggctctcattagaccttcaaaatgtctccaatctaaaaacaagagtgaattttaagaaccactgttctaagaagatttttactaccctggctcacatatcttatttggtgaactttgtttggtagtcggactgcatgtaaacataaatgtgactgcttagtcccttatctgcccacctgctgtttggtgggttaattcgccattccctcctccctcccccgagtcctcagccttcttaaatgggcacatgagcaatgtgtttacacttcatccatggtaactggttgtgttcagaagcctcagttgtttcttcctctagacagagactcctcatcttaacttctagggctaagaacagacttggatgttgactggggtttctagtagattccagtgtggagcaggattctaggtcttataactcaatctgaggatcatcgcaaccctagtgacaccctaggggctcttcccagtgtgagtgttgagaagggagggctccaggcctttttgaaggggtgggagattgagatcattaaatatggttgaagttgaactgttcagtttgctcataggttcaagattggggaatggtagtcatattttattaaacttgattatctctgcctgctatgtaaacacttagctttcagttgttcatgtgtgagttattccctcttcagcacatgcagacaagttttaatgttcatctgcatgtaaaataaatcagtgtgtattgccccgaaatgcagacaaggtcccaactccttgccatcttagagtgttcccgtggctccactcattgccatgactctcaggaattggccctatacttaggccctttttctctctagatgtaataatgaaacttcctggactattttggccaacaatgtctcaaacatcatcacggagatccactcccgagacaggagtaccgtggagggccgtgtgactttcgccaaagtggaggagaccatcgccgtgcgatgcctggctaagaatctccttggagctgagaaccgagagctgaagctggtggctcccagtgagttcctcaacagtcaggacaactcatcagctgagccgcatctgccccaggcggaactttgaatcccagataggggttatatagaaatgaaggtcccaaggcagaaattcagttatgaatgctcttaaagtcatgtgggactttgttttattttgttttgttttttgagacagagttttgctctgtggcccaggctggagtgcaatggcacaatattggctcactgcaacctctacctaggacgttgttttagattcagatccaaaactgcatttttgcagaggcccctcaacattttgcttgtctaataatatagctacagtctctactttgaatgtctgtgtatgtggatggagtgtggggaaggatcttctgtctcattgctccttaaaagatagatgaagccaaaagcaatataagcaaaatgcaacttacaaaataagctttataataaagcatatgaagtagaggtgtctgcccatatagtagctgtcaattgcatttatcctattcaaattctgtccacaaggttactgttggagcaactttggagaaaatactgagttctcctgattgaattttgtccccttcttgtataaggaaagagttgatgtagtttcctgggtgtagatggtttgagagatggtactgcctatccctaaaatgaaccaggcagccctcacacttccccaccagcagtgagagattcctggctcagacacagccacactaccttgctgcccctgtgcatgtctgccaggaaacttttcattgtgcctctctctcttgtcacgtagccctgcgttctgaactcacggtggctgctgcagtcctggtgctgttggtgattgtgatcatctcacttattgtcctggttgtcatttggaaacaggtagatattttctcataaaactaaagatctttgaagccaatgagaacaagcatagcaacctagttcagtgcttggcacagagaaggagctcagcaattacatgtggagtgaacgttgttggactctactgtgtccagtcactgtgctgcttcagtgaagctctggtgcactgggactttggtaattcaccagttacctgtcctggtcatttatagaaaccgaggtatgaaattcgctggagggtcattgaatcaatcagcccagatggacatgaatatatttatgtggacccgatgcagctgccttatgactcaagatgggagtttccaagagatggactagtgcttggtaagttccatggggtaacctcccaagactcccttttcccttgcacacaactttacaatttataggccttggcagaatagagatctgagcttgtgcttagtaagaactaggcaatggaaatttgctttcagaaatacatttctgtcttgacagtaagttaattggatcattgcaatgatttttttaaatctctttccataacaaattatagttaaggaaaattttacaaagggagaagagaatatgaagagggctggcaaagatacccaccaaaattgcttttctttagaaatgacacaaattgaaaatgaatttctgtgactaaaaatgagcagatgagaaatgaatgaggacaaccacaaaatgtattttgattcagtacattctgaagatgcattagatactcctttttacatatttggaatatggaatataaaaatataggtacattttgaggcaaaatatgtaaaaataagcaagccaacttatcacaagcatttcaagtatttcaatcctgggctgagaccaagtatatgaagctttagtccaagggagtatttcttttttaaatcacattcctaatgaatgaaagcaagacaaaggcaaatgaaagtagaggtagaggttgtgttatgatgaatgatctaacagtatatatgttaaagaatgccaaatgcaggttttaattatccaccggtctcattgcaaaatacagaagagtttaagtcttcttagagagttaggtaaactgaaatcaagcaaggcaccagagtgaaatcacctttgcaaaaattgtaactgaggaaattatgacagtgaatgagatatgacctaaccaactccattttgctttagcctccaagttgtccttgttccttcctgggcataggccgaactaactttgagaggaacttagtttatagtttgactttgaaaaaaagacaataatagccctttgccaaaacaaaccctctttttccctgggaactagactgcctttgcgggactaacgaattagctacaagattagaaagtatggtttaggggtcactgttgtaaaacctgaggtcagtgcttgagatattttggagaccctgtatttcgatgcaccagctgacaccacccaggtcaataaactggctcatctgatcttggggcccctacctaggaactgactcagtgcaagaggacagcatcagctccctataatttcatctttgacccaaccaatcagcactccccttttcaccccctacccaccaaatcatccttaaaaaccccattcccccagtttcagagacactgatttgagtaatagcagaatagtagaaattcccccagtttcagagacactgattcgagtaatagtagtaatagtagaataggtctcccgtacagctggctctgtgtgaattaaaccctttttctattgcaattcccctgtcttggtaaatcggctctgtctaggcagcggacaaggagaatccatggggcggttataagagctgccccccaatttcaaatatttatatctaagctttctttattttcctgcctatttcccaacaagggatgaggagcttagggagttaaaaagtagtaaaatatggggaaaagggcataattcccattataccaagaggcattgctggtgaagcaatacctttccaggtacgattttcagtaacacagacgtgcagtaagaggcagtgttggctgttagtgtcttttatgagccaagtcttttcctggcttggctatccgtggtgagactgacaccccgggaaatgtttctctcagggtgagctctttcagggtgggacaacagcttcagtgtctttacgtatgtctcctcccaacatgaagctaattgctgtgctctcgggcatgtttagctcttggtagagtggctttcctaacaaatagggagcagtgagcccagcctgaagtttttatttagtcactccttagaatcagtgatattttgaatactgaagtatttccagtggctagtaatttactaagacaaaagatgcccctgtttgcatatggaaaacagaaggggagagagccaggaggtgtgggtgagagccccgaaggcaagaggatcccaggggctggcccagcacggagctggtagacagcgcgctcacaccagggagggctgcaccctcctttctcccgtctgtgttttctttcccttgcaagtgttattcgacaaaagcaattatgctaatttccttccctgtgggctcaattccttttttgacacgatgacttggaggagtcattatgattactccaaacaggaaagacactcgcccagctgtccgcccgcagagagctggctacggtgcagaaagctgaggaggcgtctggagtttttgggtgttaatgattctgcctgcccacaggtcgggtcttggggtctggagcgtttgggaaggtggttgaaggaacagcctatggattaagccggtcccaacctgtcatgaaagttgcagtgaagatgctaaaacgtaagtgctccttcctggggattttttgagcacggggattttttgagcatggggatattaagggaatttctcaaaatcatgcagctagtaaataagacatttaggactaggtcctgattattttgactccaggttttatgtgtatttagattaggtttatttagattgctcttgctgcctgtatgttggaaaattaagagcttgttatttccagtgacttctttttactagaaagaccaggaattagttattagcactgaggccaagtagctatctgcttcttttagacttctggtaaatagaatgatatccaatcacaggattagtcatattcttggtttttttctgagaacaggaagttggtagctcagctggactgatatgtgatttattctttcaacagccacggccagatccagtgaaaaacaagctctcatgtctgaactgaagataatgactcacctggggccacatttgaacattgtaaacttgctgggagcctgcaccaagtcaggtgggctcactgacctggagtgaggattttcactggacacatgtggttgtgaaaactgttcaatcaggcttaaatcctccactctccatccccacacatggcagggaatagaagtcccttgaatggagctgactggtcccttgaattgatggaagctcattggtttttgagcaaaatctgttgccagtccagtcatagccattcatggctctttattaaaaaaaaaaaaaaaaaaaaaaaaaaaaaacttttttggtatcttatttttttctgtgccatatggtctgcaggacaattcatggcttttctgttcttcattttcatacccatctcctaacggcttttgtccccataggccccatttacatcatcacagagtattgcttctatggagatttggtcaactatttgcataagaatagggatagcttcctgagccaccacccagagaagccaaagaaagagctggatatctttggattgaaccctgctgatgaaagcacacggaggtgggtgcaaagagagatgttgctgtctatcattatcttacaggcatcacaaatggaaagacccatgtcctgatagatatcatgtctgcagattcagtgcccaaggtagcaagacttagagtcaaaccaccctgtccagtctttccatggtcatgcagagagatgcatgatgtctaaaggtgttttggactggggtgtcacatgggaaggccttgctgataggtttgaatgagagtgagttagaatgactctgggagctcttctgctatttacatgtgatccacttagacctataaaatgcagctctggccagggatgcttgagttctggaaccttgcaagaactgtctgtggatctccaagctcgaggtccttgctgaacctggacctataaatgacgtcaatgatagtgatccctactgcagaaatctacaagtggctataaagaactctgtaggtaagaaattctgtaagatcagaaagtacaatgaattcacttcataataaattacttggtggacaccaaatgggtgctaaattgattgggtagaaggaattgtatgcccaagccacatggccacacggctcaagttccaaccaaggcttgtgagttgaaaaactgagaaagaataatgacagacttaacgtagtgaattcttcaaactttaagtgtaatggacttacaggtccatgggagcacagccccactgtcttagatgtggctcttcaggatgtgcgggctcctgctaaggatgtgcagggaactggctctgaaaacaagtgaacagtagtcatcatggcagctgacatttgtggagtcctttgtatgtgccaggtgccatgacaaatattccgctagtctttcccatctttgtcagtgggatccattctacgtcttctgaaaagtgcttccttgacccccagatcaagtcattttccttacaagctattgaaacctttcttccttcacaacacagctgagtttgagttgatctgtgtatttattttgttttttacatttctttttttccctatttaaaaaatttttttatttccataggtttttggggaacaagtggtatttggttacatgagtaaattcttcagtggtgatttgtgagattttggtgcacccatcactggagcagtatacactgaacccagtttgtagtcttttatccctcacctgcctctcaatttttccccgagtccccaagtccattgtgtcattcttatgcctttgcatcctcatagcttagctctcacttatgagtgagaacgtacgatgtttggtttccatttctgagttacttcacttagaataatagtctctaatcccatccaggttgctgcaaaagccattaattcattcctttttatagctgagttacatatatatatatatatatgcacacctacacatacatatgtatagatacactgcagtttctttatccactccttgattgatgggcatttggggttggttccacattttttcaatatgtgaattgtgctgctataaacatgtgtgtgcaagtatctttttagtatgacttcctttcctctggtagatacccagtagtggaattgctgtgatgcatgtatttgtgcgactatttgattaatgctcatttccttgactagatcacctcatgtgaaaggtatggattggttttgcttttacccagttagctcccatgcctacctcagtacctggcacataatcatcatctactgaaagtggaatgaccacttcagaagggcaccctgggtaagatttctctttctgtttttacagctatgttattttatcttttgaaaacaatggtgactacatggacatgaagcaggctgatactacacagtatgtccccatgctagaaaggaaagaggtttctaaatattccgacatccagagatcactctatgatcgtccagcctcatataagaagaaatctatgttaggtaaaagtgtctatactcactctgggtgttgggactttccagtggtttaatatgatacttaaagtatttagagggaagtgtatagggatggtaagtgaacctggcagcccacgtggtctctaaatgcaggtctgcacaaccagttctgtgacatgtttccaggtttgtggcctgtaaattgaaaagaataaaagctgacaatgtaacaaattttttaaactttaaatttaatagttttaaagaattttcttggtgtgttcctgcagtaaacattttttaaaaaaaataattatttattctgatataatgaacttccttttttattgctgtctttttcttttttaatgaaaatatggtgattgattttttttaatgcccttacttggcagaattacaagttggctgtcttatgttggttcctcaccttgctttttttcccttaagttttagaagtctctgatgtctatgagttcagtaacccttgcttttacttttcctaacattcaatttgtgataggaactctagagtagataatttgcagttatattttctggaccagtgtttctgttgaatgtattttgaaggtgggtctatctgtttttcaagtacatgaatatgtggcagggttaaattgatttataaactccagggagtccagctgatgcccagaccagatggatcacttcacatctgctcagggtggttcctccagagccctgaactggtcacagacatgaagctggaagtctgacattggcttgtcctgtgagcttgcctttttgggtctgagccttcccattagtcaatgcaaaaaagtgttgagctgccctggacattgttttggaaattattgatgtgctctgaatgttttcaggttcttaagtgaaaggtacaatccatttaaaaaagaatgtgtttgttttgcaaagctcagtacacaatattttccatttctgcggttccaagttccattcacttctcattgccaaatgggtgaacttccaagcgcttttaaaagattagccagtgagagttatcggaaccagtacttcctctcccctcccatattgttaaaaatagtttacattgcttcccaggctgggctggtggagttggcacgagatgtcagaggaacctgagtcatgctcaggcccaagccctgttggcaggcagaccactgctttctggccttccgtgactatctgaaaaaaatcgtgaatggctagagctactcttcacttgctgaacattttcaaaaagaattgagaacttctggattaaattgccttcttcctcgaaaaccctgggacccttccagatgggactaactggggaaagtggacaagttacaaacaaagaaactcaaaggaaagtcattggcactgatctctaagatgctatcacatgtgattggtggttgattttattaacaaattataagcaaagtactacaaaggtggctttaaaaagaaaataaagcaattcacagaaactactttttcatgtagcttgtatgtgtgctccatgtatttcatcatggaagattttagtgtgtgtttatgtgtatgtgtgttttaaaggtagctgagatgatttgctaattatggttgaaaaaaagaaatttaggaggtaaacaaaataattatgtgtaagattggtccttgtggctgtgtgtgtgttttgtgtgtgcgtgtatgtctctgtgtgttttaggctgttcttttattgctataaataaatacttgagactgggtaatttataagggaaagaggtttaattagttcatgattctgcaggctttacaggaatcaagatactggtagatctgctcagtttttggagaggcctcatgaagccatgaagtcatggcagaaggcaaagcagtgcaggcacatcacatggccagagcaagagcaagcgagagagagaaagagagaggtgccacacacttctaaacagtcagatcttacaagaagtcacttactattgcgaggacagcaccagaaggatggtgctaaattgttcgtaagaaatctgtccccatgatccattcatctgccaccagtccccacctccaatactggagattacaattcaacatgagatttgggtggggacacatattcaaactatatcatactgaccctggaccctcccaaatctcatgtccttctcacatttcaaaatacaatcatccctccacaatagtcccctcaagccttaactcattccagcatcaactcaaagtccaaagtcttatctgacacaaggcaggtcccttccacctatgagcctgtaaaataaagaacaagttatttactttcaagatacaatggggttataggcattgggtcaacattcccattcccaaagggagaaatcggccaaaagaaaggggctacaagccccacagaagttcagaacccagcagggctgaaaactccaaataaactccattgactccatatcccatgtccagagcacactgatgcaaggggtggagctcttgggagggatggaacaccctgtggctttgcagggtttagcccctgcagctgctctcaggggctgttgtcgagtgcctgtggtttttcctggtgcagagtgcaggctgttggtggatatattattcatggaggatggtggccctcccctcgtagcttcacgaggcagtgccccagtggagactctgtgtggggacttcaaccccacatttcccctctgcagtgccctagtagaggttctctgtgagggctccaatcctgcagcatgcttctgtctggacaccctggttttttaatatatcctccgaaatctaggcagaggctcccaagcctcaactcttaacactctgtgcacccacaggctaacaccacatggaagcggccaaggtttatggctgtcacaagctgaagcagcagcccaagctgcacctgaactcctttgagccacagctggagctggagtcatagggatgcagggagcagtgtctcgaggctgcacagggcagtggaccctggggctggcccatgagaccattcttccctcctaggcctctgggcctgtgatgggaggggctgccatgaaggtgtctgaaatgccttaaaggcctttttcccattgttttggcaatcagcctttgcctcctttttagttatgcaaatttctctagcaagtggttgcccagcagccctctttaattctctcccaaaaaagcttttactttctctgtcacatggccaagctacaaattttccaaccttttatgctctgcttcccttttactttttttttattttaaagagatggggtctcactatgttgtccaggctagtttgaactcttggactcaagcaatcctctcactcatcctcccaaagtgttgggattataggtgtgagccactgcgcccagcctctgcttctcttttaaatataagtttcaacttcaagtcatttctttgcttctgcatctgactgtaggctattggaagcagccaggccatatcgtgaacactttgctgcttagaaatttcttccaccagatatcctaggtcatcactctcaagttcaaacttccacatattcctagggcatggacataatgtggccaagttctttgctgaagcttaacaagggtgacctttactccagttcccaataagttcttcattttcatccgagaccttggcagcctggatttcattgtccatatcattatcagcattttggtcacaagcatttaaccagtctctaagaagttccaaactttccttcatcttcctgtcttcttctgagccctccaaactcttcttatctctgcctgttacccagttatctttacagcaattccccattccttgataccaattttctctattaggctgtttttgcattgctataaagaaatacctgagactgagtaatttataaagaaaagaggtttcattggcacatggattctgcaggctatacaggcatttgcttctggagaggcctcaggaagcttccaatcatggtggaaggtaaagggggagcaggcatatcacatggccagagcaggagcaagtgagagagagacagagagagagagagagagagagagagagagagaggtgccatacagttttaaacaggcagatcttgtaagaagtcactcacttttgcaaggatagcaccaaggggatggtgctaaaccatttgtgagaaattcacccccatgatccagtcacctcccaccaggccccacctccaatactggggattacacttcaacatgagatttgggtggggacacatatccaaactatatcattgcgtgtgtgtgtgtgtgtataatttttaaaccagatatatgtttctgcatatctctttcctttctttcattctttctatcttttttttttttttttttttttgagacagagtctcactctgtcacccaggctgcagtgcagtggtgtgatcttggctcactgcaactcattgcaacctcctcctccctgattcaagcaattcccctgcctcagcctcctgagtagctgggattacaggcacatgccaccatgcctggctaatttttttgtattattagtagagatagggttttaccatgttggccagactggtctcaaacttctgacctcaggcaatccacccacctcggcctcccaaagtgctgggattataggcataagccaccatgcctggcctatatatctattttctaagatagaatctttgcatagtgatattcatctgtgagatctaaacattctacaaaaaaattaagaaaatatttttggatgtgttctttgggcatgcctctgcaacctgatgatttcctgctgcctgccagcaccaatacatttaatttcttttctgcagactcagaagtcaaaaacctcctttcagatgataactcagaaggccttactttattggatttgttgagcttcacctatcaagttgcccgaggaatggagtttttggcttcaaaaaatgtaagttcaaggaacacagacctttttagacccagatttcagtgagtggagtgtggacggagatgctaggagatagatgttggaaaggccattaataacaggggcctcttacttacctgtctctctccttcatcccctacgcaggtcagggagtctgaaatcatcaggcatctactcttctctagagctttctctctgttgggagtgggtggagtgagaacctgggagaaggccagccctttatatccaggcagacagctccaagtgccaccatggatcagccagtcttgcaggggtgatgctattcagctacagatggcttgatcctgagtcatttcttccttttccatgcagtgtgtccaccgtgatctggctgctcgcaacgtcctcctggcacaaggaaaaattgtgaagatctgtgactttggcctggccagagacatcatgcatgattcgaactatgtgtcgaaaggcagtgtacgtcctcacttccctcactggtcaggctcatcctccttcactttaatctctaaagtcaggtgttgcttctagagattcggtgcctgttttttaaaacatcaatagatttcaaggggtcagtacactgccttggcagcagattgcccaggtttgagtgccagctccaccacttacttaatttggatttggggctagatacttgactgttctgcccctctgtctccctgattgtagtgggaggtgataatagtacctatttgctgagttgctatggggattaaatcaatgaattcatgtaaagtgcttaggacagtgcctggcatatagaaacagcactcaataatgttagctattttatttatttatttatttatttatttatttatttatttattttctttttttttgagacagagtctcactctgtcacccaggctggagtgcagtggcgcaatcttggctcactgcaaacttctgcctcccaggttgaagcaattctcctgccttagcctcccgagtaggtgggattacaggcatgcaccaccatgttcagctaatttttgtatttttagtagagacagggtttcaccatgttgcccagactggtctcgaactcctggcctcaagtgatctacctgcctcagcctcccaaagtgctgggatgacaggtgtgagccactgcatctggcaagtgttagctattaatatgtcaattgcgtgtatgcatggacaagcatgcattcccaaggatggtgtctttacattttaagcttttatcagattttcaaaagccatctgtgacccctaaaatagattggaaccatttgggtttatgtatcttggaggcacagtttccttaaagatactcattttgttgtctacttgaaccattcttcccatcccttccacttctcagcagatgacatagctccctgtggggatatatctgctccctgtaggtacaattccaaatcacctcactgcactggatgtgagacagcttatggcagctgctgcttccacctagagaaagacatgggcctgcatccatgctgtgtgtgattcatgtactcatgtggccgtgatagctgtaatcggctcatagatcattggatctgttcttagttttgttcccaggaatatctaaaaataggaaactggtccattcagggcttacaccttttgggtgaaaattcaggattaatgtttttggatattattcctttggaggacataaaaggcaatattgaccattcatcattcatctagtatttattgagcacctactatgtgccagggactgagagttcagtaatgaacaaaacacatgtaaaagacactcaaatgggacaagataattagcacaagttattaagagcccaaggggaacccttttctatttccactgctgtggatcatcagtgagtagacatgggtttaactgtctccctccttccttgcagacctttctgcccgtgaagtggatggctcctgagagcatctttgacaacctctacaccacactgagtgatgtctggtcttatggcattctgctctgggagatcttttcccttggtatgggcctgacattgctgcttatttgggctgttctgaaacaccactggaaggaaaatgtgttctttcaagccccaggatgtagacagtgttaagataacctggtgtgaggccagtatgctgcagccacctcaaaccacatgttgtgccttattgtgtctgagataggcccatgcaggtggagatgggggtttttgttgggggttgcgtcttactcctggcctctgcccctcctctcctttgggctatgccagagtgacttcctcccactggaagtggtcccaatgacattcgcatcccagctgctttttcattttgggctttgggtcacatgggttcacccatggagagtgggccctccctcacctggtggcgattgatgctcaggtgaaaaggggtacgtggcgggaagggcagggctctcattcctggttgtcattggccagtcttgacaacccaggtgctgaacaacccaggtgccctgggctatccggtgaggtccctaagagaaggatgagccataaccctgacatctggatggttcatctggggagatgagacttacacacttagggataaacagtgtgctgctgatttaaaattgtaatttgagtcttgagtaaagagaaaggagtcctggaatagtgtgggaaggcttcagagagggaacttaacttgacctggccttggctttgaaagtgtgaaatgtttcatgaatttatctgtgatcaggatgtaatagtaaagtgtgtcttcctgccccgtctcctttttcatcctagttctccctccatggatgatcacaatggatcatcccccagtggcttaatggagtcctgtactcccttaaaagcagagaggccacaactttgatttttgctttagctatttgaacatacctggtgaaaaagactctctgggttttaatgattcagaatttctccttgcttttctagttcattttgtctgtgttgatccagtagtcatacacattgaaaaacacttgaacgcttatttctaaagatgtagaatttttgtgatggtacttggacttgaccaacctggagtcctaattaaacttaaggtttgagctggtctctgaagtcaaggagatgatgacactgaattttcttgaaaaaaccagtgcttcaaggctataggatctgaaaggttttctaacagtgttctatcatgccaagtgtttcagcaatgcactgagcgtttgttagtcctggtgttttattgtttggcttttaggtggcaccccttaccccggcatgatggtggattctactttctacaataagatcaagagtgggtaccggatggccaagcctgaccacgctaccagtgaagtgtgagctccttccccatcccgggggcctgtgttcacagtctgtgggtctagggggagggaggggccctgagacttccccctgtgcccactcttgagttctgtccccacagctacgagatcatggtgaaatgctggaacagtgagccggagaagagaccctccttttaccacctgagtgagattgtggagaatctgctgcctggacaatataaaaaggtgtgtttggatctgtgggtggaaaggtctggataaagctggaagttataccagtgagctgtgctgttccgcagttctagaggagcattttcaaaagaggcaaaagactgtgtgatccagtggctgggcttcatggcggtgctccacgagaccctagtagcaatgatgaatgaaaaccctccccttcccgtggggctttcctttcatcttatatgtacagtacctgtaagcactattctccagatgtttgagtatcagaagttagtgtgcagttagaagactcagggcatccatggccattacatcactaatttgagtgcacttaaatccatgcgaaattggcttttaccagcggactggaaggaacaacctcagctgttatctgtggcaccagctggttttttgtggaatgggaagcattgttcaaaggaacaaatgtaatttcttggaaccaggcaggatatgtaaatgaatgaaacaactttctgctgaggtgttgagaggaaaactcagacataacctcagtttcttagattgagattagtccctgtgtagactttttatacttatcatttttcttccttcttctcaaggaggaatagtgttaggagattgtgtgccgaactggaagttaaatgcttctgtctgttaattatctcactgcccactacaactttcacaggtgaggcagtgaggaggcagaaggaaattaaccctcagttggtcaaagatgctctgactggtggaaatgtgttggtgggaagagattgaagttattgttgaaaatagggtcttttcacatccaatgttagacctctccaatgtttaaggatcatgaaggctttgggtattatccacccaatagaaggcctcactgcctctctatgggacccatccaagccctggaaaggcaacgtgatggggaccagaaggattctcagttgtagctactgacttggagaaggggctactggtatcttagcacctaatggcagaagctctttaccattggtggccccttcttcatgttctatgtctctggggatagttgacatgactctccttcaactaagtcccacatcttccaggtagtttggagatatgtacagttaaataatagtaagttctgagtgtctctattcatttttgaggtttggttgttaacacttgattaaatatgttcaatgaatgtttatagagttatgaaaaaattcacctggacttcctgaagagtgaccatcctgctgtggcacgcatgcgtgtggactcagacaatgcatacattggtgtcacctacaaaaacgaggaagacaagctgaaggactgggagggtggtctggatgagcagagactgagcgctgacagtggctacatcattcctctgcctgacattgaccctgtccctgaggaggaggacctgggcaagaggaacagacacaggtagctgtgggggcagcctcggtgtctcacctttcccctcccctataggccctgaaggagaggacccattttcccgataatggtgcactcccggttggtaaatatgtactcagggacaagttgcagaatcctcaggaggtccacgtggttttgaaaatgcttcccagatgattctaatatgttccccctggggctgggagagggatgtgcatgttgtggggagagggacatgcttccctggtggagaatctttgagctaaattctcaggtaatttgatcaaattgatacagaactgtgattactgagatcatataagcctctcctgccattgtcttaaatagtcattgaactggggaaaaagtgaagagaggcgggactgggtcctttgacgctataccctacctgtgaattggaatcacctgcagagatttaaaaactgctgatctacaagcctcacccaaaacaacaaattagaatccctgggggtggtggccaactgctccctggctgatttgtttcttctttcttttaaattttgtattatggaagatttctaacgtgtgcacaattcacatagtatagtgagctgttcagtattcgtcacccagcttcaatgactatgccctctgccagcctggatgcacacatggccatgtctgtctctcctcagcctcctctggattgtttggaagcaaatcctagacaccttatcatttcacccataaatattccagtgtgtgtctcttaaagataagggctctattttaaagaagaacaacagttattaaaaataactacaatgccgttatctcacccaaaacagggacaataaatcgttaaggcatcaggcagccagttaaagttcaaattatctcacaaatattatcatactccattaaaaagtgggcagaggacataagcagacacttttcaaaagaagacatacctgcagccaacaagcatatgaaaaaatgctcaacatcactgatcactagagaaatgcaaatcagaaccgtgatgagataccatctcacaccagacagaatggttattattaaaaagtcaaaaaataacagatgctggtgaggttgtggagaaaaggggaagcgtatacactgcttgttgaagtgcaaattagttcagctattgtggaaagcagtgtggtgatttctcaaagaacttttaacagaattaccattggatccagcaatcccattactgggtatataaccaaaggaatataaatcattctaccataaagacatgcatacgtatgttcactgcagcactattcacgatagcaaagacatggaatcatcctaaatgcccattgacagtagactggataaagaacatctggcacatatacaccatggaatactatgtgttgataaaaaagaacaagatctgagataccatctcccaccagtcagaatggctattatttaaaagtcaaaaagcaacagattgtggcgaggttgtggagaaaaagaaacacttttacaatgttggttggagtgtaaattagttcaaccattgtggaagacagtgtggcgattccccaaagacctagaggcagaaatactgtttgacccatcaatcccattactgagtatatacccagagtgatgtaaatcattctattataaaggcacatgaatgtgtatgttcactgctgcactgttcacaatagcaaaatcatggaatcaacctaaatgcccatcaatgatagactggataaagaaaatgtgatacatatacaccatggaatacgatgcagccgtaaaaaggaatgagatcatgtcctttgcagggacatggatggagctggaagccgttaccgtcagcaaactaacacaggaacagaaaaccaaacaccacatgttctcacttataagtgggagctgaacgatgaggacacatggacacatggagggaaacaacacacactggagcctttcaggggttggggattgggtggaacatcaggaagaatagctaatggatactgggcataatacctgggtgatgggatgatctgtgcggcaaaccaccatgacgcatgtttacccatgtaacaaacctgcacatcctgcatatgtacccctgaacttaaaaagtggaaaatacaaaaatgaaattaaaaaaagaacaagatcatgtcctttgcagcaacgtggatggagccggaggtcactatccttagcaaactaatacgggaacagaagaccagataccgcatgttctcacttataagtgggagctaaaactacgagaacacatggacacaaagaggggaacaacagacaccagggcatagttgagggtgcagggtgggagaaggaagaggatcagaaaaaatacctatcggatactgtgcttattatttgggtgatgaaataatctgtacatcaaaccgccatgacatgtgatttatccatgtaacctgcacacgtgcccttgaacataaaataaaagttaaaaaaaaattatcatacacttgttttgttctgtctgagatccagataagagtcacacattgcacttggttgctatgtctctgtaagttcactatgtctctattttttgccctcttacatattatttgtgaagaaaccatagtgtttgcctgtggagttcccacaatcggcattttgctgattacatccttgaagtgtccttctcaggtgcttctgtcttctctatgtgttgtaaactggtagttagtctaggaacttaacctgactcaggttagatctttggcaaacatgcttcatagatggttctgtgtgcttctgtcaagaggtatgcactgtccagttgtctgccttttgtaacattatcagtcattgggtgatcattacctagaatttctttttttttttttttttttgagatggagtctcgctctgtcacccaggctggagtgcagtggtgtgatctcagcttactgtaacctccacctcctgagttcaagccattctcatacctccgcctcctgagtagctgggattacaggcacatgccaccatgcccagctaatttttgtatttttagtagaaatggggtttcagcatgttggccaggctggttttgaactcctgacctcaagtgatctgccggtctcggcctcccaagatgctgggattataggcatgaaccacctcacccggcctagattctttaactcagcaccaaggtggagctaatgcccaggcaggactgagaatcactggctgacgtggtcagatggaggagaccatgccccagttctccgctgtctttgcatggcccttggacagaggtaggagaaggtgatgatagtggcccctagttcaaggtccaagttgcttgtgtgtgtgtgtgtgtgtgtgtgtgtgtgtgtgttttcctcttctttcccatcagaacattattttggaggcttatgactgtgacctttgttaaccaatttaggtataatatgtagacagcccttgtttatttgtatggactgggtaattttgaaagtatggcttttctattttgttttagaatatgttatgtgatttgaagatgggacacagtggcccatcagtcttcggttttttattatgctttgctcaggccagtttttataacgtgtttatatctcttgagcatacggtgttcctccaagttttgggggtctgcgatggaacttcacgggggtcggggaaggctgggcagtgaatctagggctctctgtctcagatcctttctcaatttggttactttgtgtttgtgggctctgaataatatttgagttgtaagagggttctgcttttatataaagttagaaagtcacattggaataaataacatgagaaaggtgcccagaagttttctagggctacaacaggctgagctgcagaatttgacacgccaggaattgaactttctcagttgaagttcacgttcaagttaagtaacttgtgtggcatcacacagctagtaagtggggggaccattccagacctaaggctttctgactccagaactcccctttcagccacttctctagtacgtaaggagccgtcacctgggccctcaagttgggggttggtgggggggcatttgatgtcaagagagaggggaagagggcattccaggcaagtggcaggagatcctgagaacacagtttggatgctcaggaggcttccgggagagcacctgatgggcctggctgcagcttgcaccctgatgggcctgacttcaccccctgctctgccttcccaggcctttggatcaggcattgcttatgttctcttccactaggattgagtagggaaagtagaaattcttgcagcttgtcagtaactttgatgaaagacccagcagaaaagcaggaaagctgaagagtaaaaatgatgggtggaccttggttttccacgtggcctaccacagcatgtcaggcctgggggcagaatcttgccatactgtgcagcccaaatttgaatgccaaaggctttcgtttgtctctggggggccacagtctaggtctagttctgtgcaggagttgtaatatttgctcttctctccctcctccagctcgcagacctctgaagagagtgccattgagacgggttccagcagttccaccttcatcaagagagaggacgagaccattgaagacatcgacatgatggatgacatcggcatagactcttcagacctggtggaagacagcttcctgtaactggcggattcgaggggttccttccacttctggggccacctctggatcccgttcagaaaaccactttattgcaatgcagaggttgagaggaggacttggttgatgtttaaagagaagttcccagccaagggcctcggggagcgttctaaatatgaatgaatgggatattttgaaatgaactttgtcagtgttgcctcttgcaatgcctcagtagcatctcagtggtgtgtgaagtttggagatagatggataagggaataataggccacagaaggtgaactttgtgcttcaaggacattggtgagagtccaacagacacaatttatactgcgacagaacttcagcattgtaattatgtaaataactctaaccaaggctgtgtttagattgtattaactatcttctttggacttctgaagagaccactcaatccatccatgtacttccctcttgaaacctgatgtcagctgctgttgaactttttaaagaagtgcatgaaaaaccatttttgaaccttaaaaggtactggtactatagcattttgctatcttttttagtgttaaagagataaagaataataattaaccaaccttgtttaatagatttgggtcatttagaagcctgacaactcattttcatattgtaatctatgtttataatactactactgttatcagtaatgctaaatgtgtaataatgtaacatgatttccctccagagaaagcacaatttaaaacaatccttactaagtaggtgatgagtttgacagtttttgacatttatattaaataacatgtttctctataaagtatggtaatagctttagtgaattaaatttagttgagcatagagaacaaagtaaaagtagtgttgtccaggaagtcagaatttttaactgtactgaataggttccccaatccatcgtattaaaaaacaattaactgccctctgaaataatgggattagaaacaaacaaaactcttaagtcctaaaagttctcaatgtagaggcataaacctgtgctgaacataacttctcatgtatattacccaatggaaaatataatgatcagcaaaaagactggatttgcagaagttttttttttttttttcttcatgcctgatgaaagctttggcgaccccaatatatgtattttttgaatctatgaacctgaaaagggtcagaaggatgcccagacatcagcctccttctttcaccccttaccccaaagagaaagagtttgaaactcgagaccataaagatattctttagtggaggctggatgtgcattagcctggatcctcagttctcaaatgtgtgtggcagccaggatgactagatcctgggtttccatccttgagattctgaagtatgaagtctgagggaaaccagagtctgtatttttctaaactccctggctgttctgatcggccagttttcggaaacactgacttaggtttcaggaagttgccatgggaaacaaataatttgaactttggaacagggttggcattcaaccacgcaggaagcctactatttaaatccttggcttcaggttagtgacatttaatgccatctagctagcaattgcgaccttaatttaactttccagtcttagctgaggctgagaaagctaaagtttggttttgacaggttttccaaaagtaaagatgctacttcccactgtatgggggagattgaactttccccgtctcccgtcttctgcctcccactccataccccgccaaggaaaggcatgtacaaaaattatgcaattcagtgttccaagtctctgtgtaaccagctcagtgttttggtggaaaaaacattttaagttttactgataatttgaggttagatgggaggatgaattgtcacatctatccacactgtcaaacaggttggtgtgggttcattggcattctttgcaatactgcttaattgctgataccatatgaatgaaacatgggctgtgattactgcaatcactgtgctatcggcagatgatgctttggaagatgcagaagcaataataaagtacttgactacctactggtgtaatctcaatgcaagccccaactttcttatccaactttttcatagtaagtgcgaagactgagccagattggccaattaaaaacgaaaacctgactaggttctgtagagccaattagacttgaaatacgtttgtgtttctagaatcacagctcaagcattctgtttatcgctcactctcccttgtacagccttattttgttggtgctttgcattttgatattgctgtgagccttgcatgacatcatgaggccggatgaaacttctcagtccagcagtttccagtcctaacaaatgctcccacctgaatttgtatatgactgcatttgtgtgtgtgtgtgtgttttcagcaaattccagatttgtttccttttggcctcctgcaaagtctccagaagaaaatttgccaatctttcctactttctatttttatgatgacaatcaaagccggcctgagaaacactatttgtgactttttaaacgattagtgatgtccttaaaatgtggtctgccaatctgtacaaaatggtcctatttttgtgaagagggacataagataaaatgatgttatacatcaatatgtatatatgtatttctatatagacttggagaatactgccaaaacatttatgacaagctgtatcactgccttcgtttatatttttttaactgtgataatccccacaggcacattaactgttgcacttttgaatgtccaaaatttatattttagaaataataaaaagaaagatacttacatgttcccaaaacaatggtgtggtgaatgtgtgagaaaaactaacttgatagggtctaccaatacaaaatgtattacgaatgcccctgttcatgtttttgttttaaaacgtgtaaatgaagatctttatatttcaataaatgatatataatttaaagtta

SEQ ID NO: 15 - DNA, 70616 bp, Pan troglodytes
  misc_feature (537)..(976): n is a, c, g, or t
  misc_feature (40932)..(42507): n is a, c, g, or t
  misc_feature (45574)..(46359): n is a, c, g, or t
  misc_feature (64665)..(64665): n is a, c, g, or t
caaaaagcgaaggcgcaatctggacactgggagattcggagcgcagggagtttgagagaaacttttattttgaagagaccaaggttgaggggggggcttatttcctgacagctatttacttagagcaaatgattagttttagaaggatggactataacattgaatcaattacaaaacgcggtttttgagcccattactgttggagctacagggagagaaacagaggaggagactgcaagagatcattggaggccgtgggcacgctctttactccatgtgtgggacattcattgcggaataacatcggaggagaaggtaagggaaaagaaaaaatgattttttgtttataagggaaatccctgatcagactctgggactggagaaagcgaagtaacttcaaactttgggcgacaagaaaaaaaaaaggagctggattccagttgtgtgtccagagagtaatttttttttttttcggaataaacttcacttggggacgggtgggagataaccatagagttataaagtctaggtattttnnnnnnnnnnnnnnnnnnnnnnnnnnnnnnnnnnnnnnnnnnnnnnnnnnnnnnnnnnnnnnnnnnnnnnnnnnnnnnnnnnnnnnnnnnnnnnnnnnnnnnnnnnnnnnnnnnnnnnnnnnnnnnnnnnnnnnnnnnnnnnnnnnnnnnnnnnnnnnnnnnnnnnnnnnnnnnnnnnnnnnnnnnnnnnnnnnnnnnnnnnnnnnnnnnnnnnnnnnnnnnnnnnnnnnnnnnnnnnnnnnnnnnnnnnnnnnnnnnnnnnnnnnnnnnnnnnnnnnnnnnnnnnnnnnnnnnnnnnnnnnnnnnnnnnnnnnnnnnnnnnnnnnnnnnnnnnnnnnnnnnnnnnnnnnnnnnnnnnnnnnnnnnnnnnnnnnnnnnnnnnnnnnnnnnnnnnnnnnnnnnnnnnnnnnnnnnnnnnnnnnnnnnnnnnnnnnnnnnnnaacccacattttccagacctatttttaaaaacaatgtttttctaacaaccctatggcctcccaaagaaattgtttaggcttacatttttgaggtttcttttgggagtgggggtggtgttcgtgaatactgggccgaacaccaaggaactgggggtggaggcagaggtgtttgccctcttcttggcagtgggtcctggaaggcgacaggttttaaatgagtgttttcattcctcgcctgcggtttggcgggacagcgctgcagcccatggtgtggagcgcggctgggggaccaggggaggtggggagaggggagcgtggaggggggcgcaggaggcgggcagggctcggctggagaccggacctcggtgttggcctacagcacagggagccggccgaatgcgcgtgattactggacggcgctgctctgggtgagagtcggggccagatttggcgcggcggtgaggcggctgcgggacaagcagaggcgcgcgggcgtgggcaagggtttggggcgctctggagcggtttgttgggtcagtgaggtgccagggagagcgggtgcctgccgggcagtgtgctcgggttgcacgccctagcgcgggggcgacagcggcggcgcgggcgggcggtctggaataatgacaaacacatttggccctgagtgaagaagtcgtcgtcgcctcgcattccagcaactgggatttgaggaatttcgaaccgcacaccaaggggccctcattgtgcgccgtggcccccgcccccgcccgtcttcccgcgcctcctcctcggtagaatcatttctgcattgcccgggggctctactttcgctcagttctggccgcaggcaggaagagaggaaaggtctccaggaaggtgccgaacttcttgtgaggaagttagggacgacttggaactggggaaacttgtttgcaggtaagacagaaaggtgggaggtaagccatattctccctccgggcacccgagccctggacaccccctacccggcgcccttctccgcgcgggggtgcgtggcacttgccgtctgagctcgcccagcgctgctcggtcctctctagttgcccttttttccattcctctccctgcccgcttcagagccttctgtgcgtacttctccttcctctgctgtctacccccatggaaaccagatttacacacgaaattaactccgcccggctgcgcccagggagcgggcggcgtccatttggcattgaatatgtgggatcagctgttctattccgggagggtgtcggccaggtcggagcgacgagtgtggcccaacccgagtacggttgccagagggagccaggagccggggccgggccaggtgtgcgagagctgccgatggcctggcctcgcgtcttggtcgggaaggacttgctggcccggcaggctgtgcgttgtgcatccctcccgcagccagagcgccggtccggcacttcgctccccgaattgtgctaagacctcaggatgtgcgcaaggagtgcctggaagaacttgccactcactccatctccctgggtgggaggcaagcatggatggggcccctatcaggtccctaccgccccgcgtccgaaaagccccgggctgggcggtgtgggaaatggctttttggctccgaggccaaattgctcaatgttttggaccgactcgcctcgccgcggtcgctcctgacaagaactagacagatttttggagcagggagcatccagggcaaacgcacgacagtcctccgcagtgcatctcaccggacaaacatccccggagccacaggaggggaggaaggggctctccgggcgtgcgcacctccccagccgccgcgctgtcccatccccgacccctaatctggtcaacctggaccccggcactgctgaattgcatccccctccctcttctccctttctcctcggcctcctcctttccaaaaccctcacgatgaggaggccctgcctcgactccccgacaggcgcaaggccgaccagcctcgctttgatgccctggtcaggccctgcttcggagcttgcagttttgggttgacccaagtgcagctggacctcgttcacaagagtgaggggacgccaagaatgaacccgtcgttagcccccggtgccctggctcttgtttaaatccttagatcgagaaggacttgaaggagatcccaggctcccagctctccgcccctgggccagtttcctctcgggacgcggactgaggagggatgcagggggaggggcattgggccgggctttccagctgcaaacacgtctggcgccgaggcgggcccattttgtgcctcctggggacggaccgtgggcggcgcgcagcggcgggacgcgttttggggacgtggtggccagcgccttcctgcagaccccacagggaaggactccctttgacctccggggagctgcgaccaggttatacgttgctggtggaaaagtgacaattctaggaaaagagctaaaagccggatcggtgaccgaaaggtgtgggtctcaggattccccgggtctaactcgccgggtccaaccgcagcatcagccttggggcggcagataatctttcggtctcgcctggggcgcaagatgcaggatcgggggcaaatggcttctcccaacttccccctaattcgggttctgccagatggttgtcgtttgctgaagtggctcggcggcatttccttttgttttaaactgatcaatgagcgaacctgggatgggctgaaaaagtagattgtaggagggaataatgggaaacccgacttggggcgcctccttccctgcctcctactgcagtttctcggcccccgcgaaaggggagcgacaagcgcgggtggccgcggactcttgagggggcagaggcggctatggcgcgtgtcgggcaaggtggcaccagaaggcacttttgtgtgtgtgtgtgacaagagtctcgctctgtcgcccaggctgaagtgcagtggtgcgatctcggctcactgcaacctctgcctcccaggttcaagcgattctcctgcctcagcctcccgagtaactgggattacaggtgcccgccaccacgccaggctaatttttgtatttttagtagagacggggtttcaccatgttggccatgctggtctcgaactcctgacctcaggtgatccgcccacctcggcctcccaaagtgctgggatttacaggcgtaagccaccgcgcccggccaggaaccgttcttaaatgccgagagggcgcatgctagctctccccagcattcccggtgagccgctacccacggccgtgcggctctcgtgcccataggaggcgctggctagcgcctgtaaccctaaacccctcggcccctttccccccatccgcccggactctcttcccgctctcccccctctctccacaccccgcccggccccctctcgggtctcagttcaaaacaatgcaaacgcagagcgtcgtgcctggggcgcagcggcctctgcagctctgaggttcagagcgcggcgcgcaggggctcaggggcgcaggtccccggagcggctgggcatcgccaccaaccccgggacaaccgagccgccgaggacttggtggaggtgggagggagagcggaccgcgcagtgttcctctgggtcccggggtcagaaaccggacagtggcgggggctggaccgtccgagcgcagagcctcccgggcgaagtctgcgcgcagcactcccggctgcgctgtcggggaccaggagcctgggctgcgggcgagctagctggcgagccgggtaagattcgcggggctgtcgcgccctctagtgggctccggggacgcatcccgctttccccagccccgggcggtcggcgccgctatctcagtggagcgcagcgctggaaccccgggggcccggagcggaggctaatctgggtcacctttcccctcctccgggcagccagtggacgcctcgcaggctctgtgtgggcccgggaggcgccgggtggacgagcgggggccgaggtctctgggtttggattgagaatgggacgtccttgtaattcaatgtgggagaagcaggggagtgtggaggaggacgggtcccgtgcgttcttggggggcaggcgccgtcttctgcgttccagcccctcgccagctcccttgccccgcgggcggcctgttgctgtttgttttacgaccctgcgttattgtgcaacgggaacagtcgtttccaatcagctgcgcggccgtcgcggccctctccaggctggtttatgggggcggcggtggcgcgcggacagataggacagcgcggcccgggaacggcgtcgaggtccaggcggtccccctgccccgagggggcggaaatgctgaggtggcgagagcgtgggttccacagaaccctagtagcgagtccggctgagcctctgcggcctagcccagcagcgtcgtcttcccggctccgaagacgtcttcccgaagccccgctgccccggcgcaccagctcccggtgatggggatgatgatggggatgatggggatgatgatggggatgatggggagatgtccccgaattctcgtggggtcccgaggagatttagccattttcaacatcagttttcctatttctgcttaaaccccgcgggctttcaactgaggtcaccacgaaagctaaaagtacaacctaaggaaggaagagactggaaattaacatttggggtagtggagctcagaattcctcgcagcggcgtctgtgtcgcaacccgtggacgcacgtccttggaccaacactgccatctgctggccactcgcaagaactactgcgacccgctgtgagaatgggcttcgcggagaccattaggaaggtgctttttttttttttttttttttttttttttttttttattttttgctcagtaggaccgtaataggtgactgattttcttttgctgtgaggctacaagaatcgctggaagacaacatttttatttcgtggaaatttgtgttgtgtttcgccttggttgttaatgctttgcatttacatagtgaacatcttattatcagagctggcctgtgaggagggtagtggggggcattgatgttcccgtttctgagtgaggagacctatgtcggggccttggtgacctcaagccgaatgctcaaactgctactgctactcttaaggttgtgccattaggagtcacacccgtttggtgatattcaaaaggatatgtcattttattctcccgtggttaaatatatggtgagaggagagcaggcatgtttatgagcccagattgtcccataaaacgctcctgtgtaaaaacactccagccccctcccattactggaatgtctgatggagctccgggagatcaaaacaacaaaacaggctctggtagggtgcagaggtcctggtaaacacaccctctgctggaaaacagggagaagtttccaccagtgtagacctgcacttgggttgcctgggctgaagttaggagactgcgtagaaaaaggaagatgtgtaattttcacagttagaattaacttaggagagctgaaattaactgagcctcggaaatctgaatcttgaagtcaccagtggcttttggggctgtgagagagtctcctgtggtctttaatcatgtgagggtggggtgaaattcaatattcagtggttctgcaacgggatgcactgtgcaattggtgattgagaagccaactctctggctttaggagaagaatgtcttgctgttagtccttctggaaatagagccttgcattgcctgctgtctgtttacactagctttgcacattgcctttggttatagagtcatgtccaatggctctttacttctgtttgcagggcaggagatggcaccctgttaaagagaaaggatagtagctgcaaaatcatttgtttctctgtttctgtgactgtatatattggctcatctttgaatggtctttatagccacaccaggctggaggtaacagggtcatgggagtggactgctggtgtgggctgaatcagagttcagatccatgtctccaggaggtaggaggtgcagggcaagtcatgtggcttctggggcatccctcactttcttagttaaggagaagttgaaggagccgatctaaaataccttgggagtctgcagaaaaagtcgtgaaaatcaaagcactttcaattaaactatataatttagtccttacaagaatgccacagggcaagcaaccagtcaggccttgctagtcgtgcttcctagaagaaaagactgaggttcagagagttggacagagtgtcagatttgggatcagtggctagtccaatgtgatttccatcctttcttctgagagaaagcataagaaggccaagaggatggcggaaaagcacaagtcacctgcctgagagtcaacagggcagggggtctctttctcagtttgtttctctaagttacggcaaatgttttttgagctgtgattattgagaatgggggctgaagttcaacatgtagttggcatgagggaagtaattataattgaagaaaagatgtgggtgaaatctattgttcttccctgcaaaggggattgttctcacggattcttatggtgccatgtttctcagaatttgtagcttcagttacttatatttgcacacctgactttagatgagctccagaatagcagttactaattaaggatgagcatttagagtagataaaagtggcaggaacagcaagactcactcccagagagcctcactacaggtctaataggtgaggaaattccccatgtttcccatttttcttcattacctccctgtggggcaagcactgccattatgcatgagtaaactgtctgagttatagataagtaatgacatgaaacttcacaaacacgctgagcacagtggctcacgcctgtaatcccagcactttgggaagctgacgcgggtgaatcacgaggtcaggagttcaagatcagcctggccaacatggtgaaaccctgtctgtactaaaaatacaagaaattagctggccatgatggtgggcacctgtaataccagctacttgggaggctgagacaggagaatcgcttgaacttgggaggcagaggttgcaatgagctgagatcatgccactgcacttcagcccaggcggcagtgcaagactccatctaaaaaaagaaaaagaaagaaagaaaaaaagaaacttcacaaacaggcctgatttctacccagggaaccactgttatcagagatgggagtttggaatcttaagcaacaaacacatgtttattctcttctctcctgatggcttgctcaaagggctgtttccattgcccactttttttttgagacggaatcttgctctgtcacccaggctggagtgcagtggcgagatcctggctcactgcaacctctgcctactgggttgaagccattctcctgcctcagcctcccgagtagctgggattataggtacctgccgccatgcctggctaattttttgtatttttagtagagatggggtttcatcatgtcggccaggatggtcttgaactcctgacctcaagtgatctgcccacctcagccttccaaagtgttgggattacagacgtaagccaccacgcccggcctcattggccactttatatgtcagtaaataatctttcctggcagagggtccactgtatctggaggcactgaaggaaatctgggagtgtctggccagggcaaagcactgcttagagcttgcacaggaaaagcagtgagcccttcttttaagctggagaatgctttaaagatgcatctttggcaagtcttgccaaagaaatatgggatctaaatgtgataaaaccaaagacatcaagctggctctggaggccttctttgaagtttgctgagtggattgtcagtgggaggctgatatttatatgtacaaacacacaagcattactgctaattgtggtaaatcagtctggccagcctggctctggggcccactgtgcctgccaccgcagcagtgtggaagccttgcatcccaggcacatgtcaggatcctcggaggccatcagccagccagcattgtgtgaattgcatttgggttcacagcactgtaattgtgtttctcctgctgtggtgagcaaaggaggaaaatggaaggaggaggtgtaatttgccctaggaaatagtcaggcaggtggcacacaggggtgggatatggctaaaacactgaccttcccttgagagagaccatatggtgaagtggagagggcatggcatttgtatcacacgaccttgtgttcgaatcctggctctgtcactggctgtgtgactttgggtcatttgcaaaacctctctgagcctcaactgccacttcttaaaatcagctctaagtaatcacagggttattcttcacaaacacagcatgcacatgcaaactttggcttagtaaataatggtttctccttctcttactttgttttctacgtaccccactccccttcctgtaaggagccttccaccgttttctctgtgttctcttcctctcccattttcctggtagcattcaataaaacagaaatctgatttctgcaaagtaggccaccttacggtagaaatacatgattaggccccaccaaaaactttgtttaggctattatcttctggatcctagatcccctccaaccaaaccaaacccaactagggctaaacacagcaatatatgaatacattgaatttctctctcactctttctttttttaaaccagtttactcaggaatcacatgcacacatattttagcttccaaagtcaatgatggaacaaatcgtgtcccattaggctcgctccattgtatgagttagcgtcagaggagttcataccagagtgacttcatcttgaatagggcctaggtaagaagaggatgagacctgctgggctgcattcccaggaggttacacatttgtagtcacaggagagaaaggagttggtataggagttgatagatacaggtcataaagaccccagtgataaaacaggttgcaggccaggtttggtggcttattcctgtaatcatagtactttgggaggccaaggcaggaagattgcttgagcccaggatttcaagatgagcctggacaacatagtgagaccttgtctccacaaacaataattttaaaaacatgagctgggcatgatggtgcaggcctatagtcccagctactggtctgaggggcagttgggtggcaggctgagatgggaggatggaggctgcagtgagctgagatcaggccactgcactccagcctggatgacggaataagaccctgtctcaaaaatagataaataagcaaataaatgagccagcaaaaccaggatgcagtgaagaagctggccaaaacccaccaaaacgaagatggtgatgaaagtgacctctggtcatccctactgcttattacacactaattataatgcattagcatgttaaaagacactcccaccagtgccatggcagtttacaaatgccatagcaatgaccagagatactctatatggtctaaaaaggggaggaaccctcagtcctgggaattacctgtccctttcagggaaaactcatgaatcttctaccgcttgttgagcatataatcaagaaataactataggtatactcactcaagcagccatgcagttgctgtgcccatggagtagccactcttttattcttttactttcttaatatatttgctgtcattttactcttttggcttgttcttgaattccttcctgcatgaagtcaagaacctttgtgacctcccaggccgaaccccaattttgaggttcaccctatgacatcttttctgtgtccaatcaccctatgacatcaccctatgaccaatgaagggacaatggtaacctcccgttgactttaaattagaactgattggcactgtttgggcttcaccagtgggtgagtctctccttgcccagattcaacttgctaacatttttttcccttcaattttggctcctttgtcctttctaatgttctttattttggacagatgggaaagtggctgtgaggcctctggcttagcagcctgatagcagcctcctgttgtctgggtgccccagatgggagcacgcctggctggccacatcttttgcaacccaccttgtcatcccttctctgggaccttttctctttagtttctttttttaaaattttttaaagtatttatttatttattatttatttttagagatagcatctcgctgtgttgcccaggctggagtgcagtggcataatcatggctcactgaagcctggacctcactggctcaagtgatccttccacctcagcctcctgagtagctgggactataggcatgcaccaccacgcctggctaaattttgtattttttttgtagagacggggttttgccatgctgcctagactggtcttgaactcctgggctcaaacgatctgcctgcctcagcttcccaaagtactgggattataggcgtgagccactgcacctggcctctctttagtttttaatgactggctgtttgacttctctgctcttcaggctgaaattcttatttcatgtttgtagtctttgccttggctatttggcaactgtttaaggcaagatacttggttttgagagttctcccattgtgttgaccctgggacaccagggtcattgttctgtagctccaattatgttaggtctcatgcttttgggtttcactattggccaccctccagatgctctggggtttttggcatttggtgtggggacccttgttagctgatactctgggtttttcggcatttggatgctccagggtgtttggcactgacattcccctctagcattgtgggttagagtcccacccaggggaaatcttggtcttgcctttccttgttttctactctaaagttatcattttctgtaaaaacattttcttttcttattgtcactttgtttaatgctttgctccaggaggtgggaatttgcaggggaaaataattgggctctccctatacttagaaaaacttctgtgtctagtagagatccttgttagacaaagggacagtggtgagtcccagagaactcgtcactagggtgccttttaggcaattggagcaaattcaaattagcaaactaagtttggccatttggataagtcccaattttgtcagggaaataatttgggtccagctatcttttataaaatagtgcgtttgcgttcctacattatggctagacctcaaagataaaagctattggatctttgtttatgtgtgtgtataaatgtctagatgtgtttatgtgtatgtacatttattatgttatatattttgtctacagggtaccaaattggcttataaataaaagagtgctcataaaaagagtaaataagtccaagcatttctcaagctcatgtaacttaagtttactaaaatttagagttactaaaaattcatatataactctgtataaatgtgccaaagaagatatgctcttagtgaaaataaattctttttggccaattcagatgtcatttatatgtggggtttaaaatatgaatttcgaaagaaaataaaaacaagtagaaagaaataaaaaacaataagcagtggagagagatgtgaggaaagttatgaatataaagatgtatttttggtaaggaatgttataaagaaattttatgagaaaggatcttatatgataaattcttgtcctaaggtagaatgactgattgtttagaaaagaaggaaatataggacaagtcagaaagtccaagcatgttgtagatgacttatgtaagtcacgataaagtttatacaagagaatttattaaaatttagctgtaattagccataactgaaaggaaatttatttatttatttatttatttatttatttatttattatttattttgagaaggagttttgctcttgttgcccaggctggagtgcaatggcatgatcttggttcactgcaacctctgcctcctgggttcaggcatttctcctgtctcagcctcctgagtagctaggattacaggcatgcaccaccacacctggctaattttgtatttttagtagagatggggtttcatcatgttggtcaggctggtctcaaactcctgacctcagttgatccacccacctcggcctcccaaggtgctgggattacaggcatgagccatctcatgcgcccagccaggaaatttatttataacactctatctaaattttggtgccctatgttaaaacaagtttttcttcaagtattggtttgctttcagtaagattgcaagaaatattgacttttaattctagaatctgtttcctttgaaggcctctcagatttatatcttttccttttcccttgaaaaggtatagcctttgcaagttcaaaactgacttccctagactccttttaggaaaagcaatacagtgcttgtttcaggctgtggctcaatagccaagcctttgttctttcatggtggtggcccgggttcagttcctggcttagagaatgagaggtttccagtttgctacttctgggacttttgtcatttatttattctttttgtctccatcgacagcttctgattttctcacttgaatttttttttctgtgagctaccttaagggtaatgctggatcttgtaaaaattgcttgccatctctttggagatacctcttgtgtccatggttaagttataaccttggttaaggcctgttggtttcactagggaaaatacctttaaaaaaaggcttaaaagccagagatgttggctatttgtcctggctagagtctggtattaagggatttaaaaggagtttttaaaggacctctatagttataagtcagcttaattaaaaatggatattccatattcatatttatatatatatacacacacatatatatgtatgtatgtgtatgtgtatatatatatatatatatatttaaaatgacctgtatgatttgttcttcttggaacttatttttttgagagaaagtgttttgtgtgtttgttgtttgtttttcttctcagtggactgaattatttctccattctgtctttttaccccctttaatgcccatattagaggacctaagataatttctgacagtctgggactccttgggaggaaacagaaggtgccacagacctcgttttgggagaaacctctgttttcttcatggaaccccaagaactgtaagcagacaggtctccctcagaatccaaggctctgctctgtttacgtcacattacctgacctttgtgacttttgggggcatcagaaattactttgcattatgagggaacctttagcattggtgtgtattacctaggtaggatgtgtgcttttagggattgcagttgcttccatgagtggttattactacagaccaatacttctttcttctcacatttaaatgaaaaaaaaagcatgctcttgggcatccacctatgaatggagggtgggctgatttgctttaggttggccaccagcctttggggaacatccttgcagtgaaatgcttggtgaaagcattgcactgtcttattgcatagtgcatttctatgcacttctgtctgatgtcctaggcttaacacctgctacataattaagatcacttacttatcaggtttttaatcaaaatgaaatgttgctaagagttaacattgtagcatatgtaattgagattactggagaaacagttttacctacaagatatgtaaggaaagcaaaatgtatttttggtaaaagattataggaaggtgtgccagtatagttttttattttgcttactttagtgggttaaaggattgttttaagtttgataggagaaagctgaagcatgagcaagttgtggaaggtatatgaaagatgaacattttaaaagaaattctgtgtgtaaacattggctgaagttaaagggggaggctggagccaagatggctgaataggaacagctccggtctacagctcccagcatcagcgacgcagaagatgggtaatttctgcatttccatctgaggtaccaggttcctatcactagggagtgccagacagtgggcgcaagacagtgggtgcagcgcactgtgcacgagccgaagcagggtgagccattgcctcactcgggaagcgcaaggagtcagggagttcccttccctagtcaaagaaaggggtgacagacggcacctggaaaatcgggtcactcccaccccaatactgcacttttccgacaggcttaaaaaacggcgcaccaggagattatatcctacacatggctcagagggtcctacgcccatggagtctcgctgattgctagcacagcagtctgagatcaaactgcaaggcagcagcgaggctgggggaggggtgcccaccattgcccaggcttgcttaggtaaacaaagcggccgggaagctcaaactgggtggagcccaccacagctcaaggaggcctgcctgcctctgtaggctccacctctgggggcagggcacagacaaacaaaaagacagcagtaacctctgcagacttaaatgtccctgtctgacagctttgaagagagcagtggttctcccagcacacagctggagatctgagaacgggcagactgcctcctcaagtgggtccctgacccctgacccctgagcagcctaactggaaggcaccccgtagtaggggcagactgacacctcacacagccgggtactcctctgagacaaaacttccagaggaacgatcagacagcagcatttgcggttcacgaaaatccgctggtctgccgccaccgctgctggtacccaggcaaacagggtctggagtggacctctagcaaactccaacagacctgcagctgagggtcctgtctgttagaaggaaaactaacaaacagaaaggacatccacaccaaaaacccatctgtacatcaccatcatcaaagaccgaaagtagataaaaccacaaagatggggaaaaaacagagcggaaaaactggaaactctaaaaagcagagtgcctctcctcctccaaaggaacgcagctcctcaccagcaatggaacaaagctagacggagaatgactttgatgagttgagagaagaaggcttcagacgatctaactactccgagctacaggaggaaattcaaaccaaaggcaaagaagttgaaaactttgaaaaaaatttagatgaatctataagtagaataaccaatacagagaagcgcttaaaggagctgatggagctgaaagccaaggctcaagaactacgtgaagaatgcagaagactcaggagctgatgcgatcaactggaagaaagggtatcagtgatggaagatgaaatgaatgaaatgaaacgagaagggaagtttaaagaaaaaagaatgaaaagaaacgaacaaagcctccaagaaatatgggactatgtgaaaagaccaaatctacatctgattggtatacctgaaagtgacggggagaatggaaccaagttggaaaacactctgcaggatattatccaggagaacctccccagtgtagcaaggcaggccaacattcagattcaggaaatacagagaacgcctcaaagatactcctcgagatgagcaactccaagacacataattgtcagtttcaccaaagttgaaggaaaaaatgttcagggcagccagagagaaaggtcaggttacccacaaagggaagcccatcagactaacagcggatctcttggcagaaactctacaagccagaagagagtgggggccaatattcaacattcttaaagaaaagaattttcaatccagaatttcatatccagccaaactaagcttcataagtgaaggagaaataaaatactttatagacaagcaaatgctgagagattctgtcaccaccaggcctgccctaaaagagctcctgaaggaagcactaaacatggaaaggaacaaacggtaccagccactgcaaaatcatgccaaattgtaaagaccattgaggctaggaagaaactgcatcaactaacgagcaaaataagcagctaacatcatactgacaggatcaaattcacacataacaatattaactttaaatgtaaatggactaaatgctccaatcaaaagacacagactggcaaattggataaagagtcaagacccatcagtgtgctgtattcaggaaacccatctcatgtgcagagacacacataggctcaaaataaaaggatggaggaagatctaccaagcaaatggaaaacaaaaaaaggcaggggctgcaatcctagtctctgataaaacagactttaaaccaacaaagatcaaaagagacaaggccattacataatggtaaagggatcaattcaacaagaaaagctaactatcctaaatatatatgcacccaacaatacaggagcacccagattcataaagcaagtcctgagtgacctacaaagagacttagactcccacacaataataatgggagactttaacaccccactgtcaacattagacagatcaatgagacagaaagttaacaaggatacccaggaattgaactcagctctgcaccaagcggacctaatagacatctacagaactctccaccccaaatcaacagaatatacattttttcagcaccacaccacacctattccaaaattgaccacatagttggaagtaaagcactcctcagcaaatgtaaaataacagaaattataacaaactgtctctcagaccacagtgcaatcaaactagaactcaggattaagaaactcactgaaaactgctcaactacatggaaactgaacaacctgctcctgaatgactactgggtacataacgaaatgaaggcagaaataaagatgttctttgaaaccgacgagaacaaagacacaacataccagaatctctgggacacattcaaagcagtgtgtagagggaaatttatagcactaaatgcccaccagagaaagcaggaaagatccaaaattgacaccctaacatcacaattaaaagaactagaaaagcaagagcaaacacattcaaaagctagcagaaggcaagaaataactaaaatcagagcagaactgaaggaaatagagacacaaaaaacccttcaaaaaattaatgaatccaggagctggttttttgaaaggatcaacaaaattgatagaccgctagcaagactaataaagaagaaaagagagaagaatcaaatagacgcaaaaaaaaaaaaaaatgataaaggggatatcaccaccaatcccacagaaatgcaaactaccatcagagaataccacaaacacctctacgcaaataaactagaaaatctagaagaagtggataaattcctcaacacatacaccctcccaagactaaaccaggaagaagttgattctctgaatagaccaataacaggctctgaaattgtggcaataatcagtagcttaccaaccaaaaagagtccaggaccagatggattcacagccgaattctaccagaggtacaaggaggaactggtaccattccttctgaaactattccaatcaatagaaaaagagggaatcctccctaactcattttatgaggccagcatcatcctgataccaaagccgggcagagacacaaccaaaaacgagaattttagaccaatatccttggtgaacattgatgcaaaaatcctcagtaaaatactggcaaaccgaatccagcagcacatcaaaaagcttatccaccatgatcaagttggcttcatgcctgggatgcaaggctggttcaatatacccaaatcaataaatgtaatccagcatgtaaacagaaccaaagacaaaaaccacatgattatctcaatagatgcagaaaaggcctttgacaaaattcaacaacccttcatgctaaaaactctcaataaattatgtatgtaaatgggacgtatctcaaaataataagagctatctatggcaaacccacagccaatatcatactgaatgggcaaaaactggaagcattcactttgaaaactggcacaagacagggatgccctctctcaccactcctcttcaacatagtgttggaggttctggccacggcaattaggcaggagaaggaaataaagggtattcaattaggaaaagagaaagtcaaattgtccctgtttgcagatgacatgattgtatatctagaaaaccccattgtctcagcccaaaatctccttaagtgataagcaacttcagcaaggtctcaggatacaaaatcaatgtacaaaaatcacaagcattcttatacaccaataacagacaaacagagagccaaatcgtgagtgaactcccgttcacagttgcttcaaagagaataaaatacttaggaatgcaacttacaagggacgtgaaggacctcttcaagaactacaaaccactgctcaatgaaataaaagaggatacaaacaaatggaagaacattccatgctcatgggtaggaagaatcaatatcatgaaaatggccatactgcctaaagtaatttatagattcaatgccatccccatcaagctaccaatgactttcttcacagaattggaaaaaactactttaaagttcatatggaaccaaaaaagcgcccgcatcgccaagtcaatcctaagccaaaagaacaaagctggaggcatcacgctacctgacttcaaactatactacaaggctacagtaaccaaaacagcatggtactggtaccaaaacagagatatagatcaatggaacacaacagaaccctcagaaataacgctgcatatctacaactatctgatctttgacaaacctgagaaaaacaagcaatggggaaaggattctctatttaataaatggtgctgggaaaactggctagccatatgtagaaagctgaaattggatcccttccttacaccttatacaaaaattaattcaagatagattaaagacttaaacgttagacctaaaaccataaaaaccctagaagaaaacctagacattaccattcaggacataggcatgggcaaggacttcatgtctaaaacaccaaaagcaatggcaacaaaagccaaaattgacaaatgggatctaattaaactaaagagcttctgcacagcaaaagaaactaccatcagagtgaacaggcaacctacaaaatgggagaaaatttttgcaacctactcatctgacaaagggctaatatccagactctacaatgaactcaaacaaatttacaagaaaaaaaacaaacaaccccatcaaaaagtgggcaaaggacatgaacagacacttctcaaaagaagacatttaagcagccaaaaaacacatgaaaaaatgctcaccatcactggccatcagagaaatgcaaatcaaaaccacaatgagatagcatctcacaccagttagaatggcaatcattaaaaagtcaggaaacaacaggtgctggagaggatgtggagaaatgggaacacttttacactgttggtgtaaaagtgttggtgggactgtaaactagttcaacccttgtgggactgtaaactatttggttgttgggactgtaaactagttcaacccttgtggaagtcagtgtggtgattcctcagggatctagaactagaaataccatttgacccagccatcccattactggctatatacccaaaggattataaatcatgctgctataaagacacatgcacacgtatgtttattgcggcactattcacaatagcaaagacttggaaccaacccaaatgtccaacaatgatggactggattaagaaaatgtggcacatatacaccatggaatagtatgcagccataaaaaatgatgagttcatgtcctttgtagggacatggatgaaattggaaatcatcattctcagtaaactatcgcaagaacaaaaaaccaaacgccgcatattctcactcatagatgggaattgaacaatgagaacacatggacacaggaaggggaacatcacactctggggactgttgtggggtgggggtaatggggagggataggtttaggagatatacctaatgctaaatgacgagttaatgggtgcagcacaccagcatggcatatgtatacatatgtaactaacctgcacattgtgcacatgtaccctaaaacttaaagtataataataataaaataaaataaatttaaaaaaataaagttaaagggatattattattattatttttgtaagttaaacattaggattaaaaagcacaacagagttttctagagcactgatctactctgtaacagaaaattgtaaagggttataaaaggtttatgagaatcttaccttatggtcaaactgattaagattgggaagatttgtctataaagttttattaagaattgggtttgacattaatactacactaatgcaaaggtgaaatttggctttctctcttgaataagattttcatgtattattacaaggtaaagaaagatttttatttgctttttaaataaactataggaaaaataagggagagaaaagtgacagattgtttggaaacccaagtctcccctatatcaatgagtaaaagtttttacctttttgaatctttgagttatcattttggctaaataaatgctttatggtgacctgggattctattttgtaatatcaaccgtttaaaccttttgtatttgacaaacgttccaaactgaaattctaaagtaagtctttttctgacctgattagtccttctagatattaggtcccctaaagtccaaaagtgacatatttgacttacttgatatattaaaatcatacaggaagcactttcaaatataaaatactatttggctttctttggactatacttatataaatgtgttattggtatgtgttccaaaattatgcaaaactcctataattctgatatgacttagtgtacgttatcagtcataattatagttcttatgttacattattgtgtgctacagagttaaccaaatttctttgtcaattgcatctttaatcggctgtcctaagacttttgtcacccacagacaattgttgtcttgttttaatccttttcaaaaggtggtttataatcagctataggactctgatgggtactctaaaatgcaagcctctgataactttgaaaattgtgccattggctgggcatgatggctcacaactgtaatcccagcactttgggaggctgaggcaggcagatcacgtggggtcaggagttcaagactagcctggccagcatggtgaaatgccatctctactaaaaatacaaaaatcagtcaggcatggtggcatgcacctgtaatcccagttacttgggaggctgaggcaggagaatcacttgaacctgggaggcagaggttgcagtgagctgagatcgcaccattgcattccagcctgggcaacaagagggaaactctgtctcaaaaaaaaaaaaaaaatagaaaaagaatattgtgccattgaaacagaaaagaaaacacaaataaacttccaggattctcatagaaacttaatatattcataaggaatgtggcccaatatcaggcaaaacaagagttaacagcatggactaaactaataaaagaccaaaacaatcttttaatgactttttgcttaaaacattgcatatcctttctgttttgcttttcagagtcaagaaaacttttcctttggaaagtatttactgcttttaacaattgaaaaaagtatactactatggacaaaatttggagcatatgtctttctttttacctgatttctccagaatttgaaaactatttgggagtattcttaactaatgacaatatagttatttgcataagtgcagtaagaatcctttcttttgtaacaggacacaattaaagaaactgcttattttatgaaggctttgactagaatggtgtgctttcagatacaaacagactgctttaagggatcaaagttgacttatagagccaataaaagccactatggaaaactggcctcattccttgtctatgcagtctctgtatggggttcctgacctgtggtaagtgaagaatgtcactttctgaccagcccaggagccccaagttatcttgggacatcaagaagaaaggaatgcacccaacttatacaggtatttgcaggcacagataaatctgtggctggctcaaggctttaagaagcctaatgtgagattctttataaattaaatttccatcgaaaccaattttaaaaagagcctatgtggcagataattatttttgctgcactttatacaaataatcaggccaaatataataagattaaaactttatggcaaacaaatttgtcccactgtgatttgtctttggtaaaaatggaagctagagagagaatttgtttcaaaaactatgatacaccagttattagattctaggctcatctgttgtttttgagtttcttctgcaatttaggcagaccctgcttattcctgagaatcaaccagtgatctatggctgttgctcagaagaaataagagggatggctaacataaagatatggattagtattctaattctgggcatgtattagaattggctagtggccccatatcagcttggttttaacaattacccagttcatggaaagccttcttatttagtttacttgggataattgtgctgattttgttttactgttgtggaatatattgctgttgtcctctttgtgtaggaatgcaggaaaagcatacttaacattttcttaaattgaacacttattaatcttccagatttcaccttttgtcagaactcagagttatgatttgccctcactgtactgacaacaggctttggtagggtgcagaggtcctggtaaacacaccctctgctggaaaacagggagaagtttccgtcagtgtaaacctgcctgggctgaagttaggagactgagtagaacatttgctgcagaaaaaaaagatgtgtaattttcacagttagaattaacacttaggagagctgaaattaactgagcctcggaaatctgaatcttgaagtcaccagtggcttttggggctgtgagagagtctcttgtggtctttaatcaggtgagggtggggtgaaattcaatattcagtggttctgcaatgggatgcactgtgcaattggcgattgagaagccaactctctggctttaggagaagaatgtcttgctgttagtccttctggaaatagagccttgcattgcctgctgtctgtttacactacctttgcacattgcctttggttatagagtcatgtccaatggctttttacttctgtttgcagggcaggagatggcaccctgttaaagagaaaggatagtagctgcaaaatcatttgtttctctgtttctgtgactgtatatattggctcatctttgaatggtctttatagccacaccaggctggaggtaacagggtcatgggagtggactgctggtgtgggctgaatcagagttcagatccatgtctccaagaggtaggaagtgcagggcaagtcatgtggcttctggggcatccctcactttcttagttaaggagaagttgaagtagtcattctgaaatattatgggagtctgcagaaaaagtaatgaaaaccaaagcactttccattaaactccataatttagtccttacaataatgccacagggcaagcaaccagtcagaccttactagtcgtgcttcctagaagagactgaggttcagagagtgggacagagtgtcagatttgggatcagtggctagtccaatgtgatttccatcctttcttctgagagaaagcataagaaggctaagaggatgggggaaaagcacaagtcacctgcctgagagtcaacagagcaggggtctctttctcagtttgtttctctaagttatggcaaatgctttttgagctgtgattattgagaatgggggctgaagttcaacacatagttggcatgagagaagtaattatgattgaagaaatctagatgaaatccattgttcttttctgtaaaggggttgttatccctgattctttttttcttttttcttttttagatggagccttgctctgttgcccaggctggagtgcagtggtgtgatcttggctcactgcaacctctgcctcctgggttcaagtgattctcatgcctcagcctttccagtagctggaactacaggagtgtgccaccatgcccggctaatgtttgtatttttagtagaggtggagtttcaccatgttggccaggctggtcttgaactcctgacctcaagtgattcacccaccttggcctcccaaagtgctggaattacaggagtgagccattgtgcctggcctgttctcactgattcttatagtgccatgtttctcagaatttgtagcttcaattacttatatttgtgcacctgacttttaggtgagctccagaatagtattactaattaagaatgagcatttagactagaaaaagtgggaggaacagcaagactcacttccagaaagcctcactacaggtctaataggtgaggaaagtccccatctttcccatttttcttcattacctccctgtggggcaagcactgccattatgcatgagtaaactgtctgagttatagataagtaatgacatgaaacttcacaaacaggcctagatttctacccagggaaccactgttatcagagaagggagtttggaatcttaagcaacaaacacatgttgattctcagtatttgcctcctgatggcttgctcagagggcctgttttcattgcccactttatatgtcagtaaataatcttccctggcagtgggtccaccatgtctggatgcacacagggaaatctggtggggtctggccagggaaaaacactcctcaggttttgcaggaaaagcagtgaacccttcttttaagctcgagaatgctttaaagatgcatcattggcaagccttgccaaagaaatacgggatctaaacgtgataaaagccacgacgacatcaagctggctctggaggtctcctttgaagtttgctgagtggattgtcagtgggaggctgatatttacatgtagaagcacacaagtgttactgctaattgtggtaaatcaggctggccagcctggctctggatcccactgtgcctaataccagccctgcatcccaggcacatgccgggctcctcagaagagatcagccagccagcattgtgtgaattgcatttgggttcacagcactgtaattgtccttctcctgctatgaggagcagagagggaaaaggggagggagggttgtgtaatttgccctaggaaattgtgggggagggacaggcacggggggtggggggcgggcggcacgacgtggctaaaacactgaccttcccttgagagagaccatatggtgaagtggagagggcacagcttttgcatcacacaggccttgtattagaattttggctctgacaccagctgtgtgaccttgggtcatttgcaaaacctctctgagcctcaactgccccttcttaaaatcagctctaagtaaccacaggattattcttcagaaacacagcatgcacatgcaaactttggcttagtaaataatgatttctttttgttccatctactccacccccctttcccattagaagcttgctacctttcactctgtgttttcttcctctcccattttcctggtggcattcaataaagcagaattttgatttttgcaatgtaggccaccttagagcaaaatacatgatcaggcaccaccaaattaggctattatctactggatcctgtttaaccaacccaaacccaactcaggctaaatacaggaatacatgaaaacgctgaatttctcttttttttttttttttttttttttgagatggagtcttgctctgtcacccaggctggagtgcagtggtgcgatcttggctcactgcaagctccacctcttgggttcatgccattcttctgcctcagcctcctgagtagcggggactacaggtgcctgccaccacgcctggctaattttttgtatttttagtagagacagggtttcaccgtgttagccaggatggtctccatctcctgacctcatgatctgcccgcctcagcctcccaaagtgctgggattaccgccgtgagccactgcgccctttcctcctttttttttttaaaacaacaacaacaacaacaacaacaaacagtttattcagtaattatgtatacgtattttagcttccaaagtcagtgatggaacaaattgagtcctattaggcccactccattgcatgagttagcatcagaggaggtcaaactagagtgacttcatcttgaatatgggctaggtaagaagaggatgaggcctgctgggctgcattcccgggaggttaggcatttgtagtcacaggatgagataggagttgggtaggaatggtttcacgagatacaggtcataaagaccacaggatgcaggctgggtgtggtgccttatgcctgtaatcccagtactttgggaggccaaagcaggaggattgcttaatcctaggagttcaagaccagcttgggcaacatagtgagacctcatctctacagataatttttattttattttattttattttttgtgatggagtcttgctctgccgcccaggctggagtgcagtggcatgaccttggctcactgcaacctccacctcgtgggttcaagcgattctcctgtctcagcctcctgagtagctggaattacaggcgcacaccaccatgcctggctaatttttttgtgtttttagtagagatggggtttcgccatgttggccaggctggtctcgaactcctgacctcaggtgatccgcctgccttggcctcccaaagtgctgcgattacaggcatgagccaccgtgcccagcctctacaaataattttttttttttttgaaatggagtctcagtctgtcgcccacactggagtgcaatggtgcgatctcagctcactgcagcctctgcctccctggttcaagcgattcgccttacaaataatttttaaaaaatgagctgggtgtggtggtttcacaagatacgggtgataaagaccccaggatgcgggccaggtgtggtggtttatgcctgtaacccagcactttgggaggccaaggcaggaggattgcgtaagcctaggagttcaagactagcctggacaacatagtgagacctcatctccacaaataattttttaaaaatgagctgagtgtgatggtgcaggcctgtagtcccagctcttgggctaggcgtgggggtcagctcaggtgggaggattgcttgagcccaggagttcaaggatacagtgaactatgattgtgccagtacactccagcctgggcaacagtgcaagaccctgtttcataaataaattaaaaaaccccaaaaacccaggatgcaatgaagaaggaagcccaaacccaccaaaaccaagacggtgatgaaagtgacctctggtcatcctcactacccattatatgctaattataatgcattagcatgctaaaagataccaccagcaccatgacagtttgcaaatgttgtattaatgacaggaagttaccctatatggtggaaaaaggaaggaaccttcagttctgggaatttcctccctgtttctgggaaaatcatgaataatgcaccctttgtttagcatataatcaagaaataaccataagtatactcagttaagcagcgtggctgttctgcctatggagtagccacccttttttattcctttattttcttaataaatttgcttgaattccttcctgggtaaagccaagaacccatgtggcctcccatggtgatctccaattttgggattcaccttgtgacattaggagcaacttagggatctggtgcatcccaggccaagactaacgtggtgatttttggggggttatgttaaaactgagggctctgcccaggcccctcagcatggcttcttgagtcaatacctgggtacttactggccctggcacctacaagttcattcacagttccttctcactgacttcaccagtgaccactatcagtgacttcaagggagaaatgaggggggagataaaataaagtgaatggggaagaaataaagaagagaggtcttttcacagtttgccagaatagtcccttcagtggttttaccccagggcaacaggggcccccttttagtttctttctcttttaattttcttttcccttcccactttttgcccactttttgccttatttgtgtcttactcaatgttcatctctttctctacttcttcattcccagatttggctgtagaaaattagaaagttcttgaacttggtttgcacgggtgcttttactttaacatgaaaatgaatgatcagcctccttctaattttatcctagagtctactgcatccctcctaccccctgcacaggaatttagtcacacttatctctcccactttctctcccttcttcactttctctattgctcctcctttcatgcctgtacctggttttccatgccctgtttagcctggcttgggatccagcaggttctccaagggttcctgcaagaaccccggctgggtgcccaggtctgagcctggtatgtgcctcagtatcacaaaggcctcctgtaaatgacatccattgttggaagtttcagaaattctaggtcaaaatggcactgaaatattaatgtatttactccaacccaagcaacttttctaaaagttgtagagagtgtgacctctttattaattgaaacgtgaaaatcagctctagtttggaagctgagaaaaaaaatatatatatatgtatttatttctttgttgtttgaattcttaatataaatggtttaaaggaccattgaaaactgcatgcaatcacagaaggttttggcttcaggcagctcccgccatgatcttgggaccccattgattctttcatctttcaggcgtcttactgtttgaaccttgaattttaacctgggacatgtttgactaaaatgatgctgttaatattttctgttgtgcaaaacacaaagagaactaggctccagggttgtttctatttgctaatgctgtttctgttgacttttgacttttctagtttcccagagctatggggacttcccatccggcgttcctggtcttaagctgtcttctcacaggtacggagcccagtcctctctgagttccttgtttgggtgtctcgtttttttaagctttgtgctgcatgggtttattaccagtactctgcatacacagtccaaaagagtgaaaagaaatagaaaactataggacgttatccagaatgaccacaaaccttcagttccctttgctgtatcgcacttactccatttcaaaaggaatgctctccagtggcagttttagtacatatataatgttggcattgaaatgttgttagtaataatgtctaaatttacttactactctcttccttttcctaggacaaggcttctattagagctggattagataaattcaggaatggtcagctgtgggaggtggcacatctgttgtcccagccccttgagcagctgaggtgggatgatcccttaaggccaggagttcaatgttgcagtgcactgtgattatgcctgtgactagccaccacactccagcaacatagcaagacctcatttaaaaaaaaatgttcaaaggaaataaataatagaaaattcttgcccaagaaatcatacttgtcttaaatcataactctcttgaggaaagatgcttacattgcttccaaatctcagagtcacctttatcttctctaggaatcaaattgatagatgaatgtttggctcttggaaaatcttaaaaactttcccaccaaaaggatcattggggtaatttgttgaagtgtgtattggactgtcttagttttcctccagatatttatgcactgcagatgttcgccatgaaaccagtgctcttctattctgaggagttagctcagcccgttagtgtctttgtcttacccatttggatatggtagaattgagcaagaccagagattcaacagttctaagctccactaagtataccccatctacagagtaataggtgatccagatgtacttacaaatcctatcttaacaagctttaggaattatagtggtcatatactgaagttgggtgggaatctcacaccaggttccaagggagattacaaatcattaattaataattaagtcataatatctcttctatcagtctcgggtttcttgttttctaagttctgtgctccatgggtttattatctgtactctgcttacacagtccaaaagagtgaaaagaaatagaaaactacaggacattatccagaatgaccacaaaccttcagttcctttgctgcattgcacttactctattgcaaaaggagtaagtgcaatttcagtctaaataagtgagactgaaatttgagcttcaaagatgaacttagagttttcactcttgggttttacttaccaattgtgaattaaaatccatatcatctggcaccactgcactccagcctgggtgacagagcaagactccatctcataaaaataaataaataaataaacaaataaatccacatcatcctgctttggccctggaagtcatgagggagagacggcatgcccgagggctataagaaatgaagatgtggaattcttgagcacagatgtgctttgtgttttgttcagtctgtatccttgcctccattctcattccatggggggttttttttttttttttttttttttttgagacagggtctctcgctctattgcccaggttggagtgcagaggctcactgcaacctcaatcccctgggctccagtgatcctcccacctcagcctctggagtagctaggactacaggtatacaccagcacacctggctaatttttttatttttttattttttgtggagaccaggtctcactacgttgcccaggctggtctcgaactcctgagctcaagcaatcttcccacttccacctcacaaagtgctgggattatagacatgagcctctgcgccccagcctcatctcattttaactaaaggaaacctttgcagtgattgtgaaccataaagaacccatatgtgcttgagcccgtgccatcttgggatattttatggttacacataagagtctgaaatatggaattggaatcagacatcctctgtctatttgagtgtttggaggggtgaatctagtggggcttggtggagctatttggaacatttgctgctctcagcagatgcagtggctgttataatgggggagctttcatgggcatccaggctaacggatttttgtgtagaaatggtcattgttcatctaagctgctactgttgcttctctcagttatcgggatgagactgtcctttctgactgcatcctattcagagcgtgcttccttttgcagggctgagcctaatcctctgccagctttcattaccctctatccttccaaatgaaaatgaaaaggttgtgcagctgaattcatccttttctctgagatgctttggggagagtgaagtgagctggcagtaccccatgtctgaagaagagagctccgatgtggaaatcagaaatgaagaaaacaacagcggcctttttgtgacggtcttggaagtgagcagtgcctcggcggcccacacagggttgtacacttgctattacaaccacactcagacagaagagaatgagcttgaaggcaggcacatttacatctatgtgccaggtgagttggctgggtccccaggaccaagcttcttctcttcctgtccttcctgttaaatgtactaaggttttaaacatatatataaataattaatatttattgtgggaagtttgaaaaatgtaagtgaacacacacaaaaatcatttgtaatattatcaagaaatattcattgttagcatttcagagctgtattaagtttggaaagtcatctttgttatgacatgtcctgtattgatactgtataaacaatctgaaatatactcatctctattcagttcattcaagttgcacacatactcacagtgtgtccagcactgggctaagtgttgaatacacaaaaattaataggtaagccctgtcttggagttgctgatagttcattataatatcttccaaataaacactcgatttttcagattcactatcaacatacatttattcttggagagttggaagaaattttctttttccttttaaaaaagttacatatatatatatatatatatatatttttttttggtaacagggtctcactctgttgcccaggctggagtggcataatcatcatagcttactgcaatctcaactcccttggttcaagcgattctcccacttcagcctccccagtagctgggattacaggcacgcaccaccacgcccagctaatttttatattagttgagacaggggtttcaccatattgaccaggctggtcttgaactcctgaccttaagtgatctgcctgcttcggcctcccaaaatgctgggattacaggcatgagccactgtgcctgaatttttatttttatttttgtagagatagggtttcactgtgttgcccaggctggtctcaaactcctgggctcaagtgatccacacccacctcagcttcccaaagttctgggattacaggcacgagccactgggcctggcctactcctgcattttaattaaaaggacaaaagggtcgagcacaagtgatggcaatttcagtatgcagttgggtaaattaaaaaggactatggctagaatccttggttttagaacaaaacctaaactgtttatgattcttgccatccttgctgttttggcataggtgtgtcttcctacctttctgccttttctttttcagtttttaatgggctcctcttcctaccctctataactacgagtgtccccagggatctagaccctctttactttttcatgatactcttattcatatgaaccttccttcttaacaattaaaaaaaaacaaaaactttgttttgaaaagggaaggtatttagaatgtcactccaacttcattcacacttagattccttcaggaaaatcctataggtgtggagggattttcccctgctgtgaagagaatggtaggaacgtgaatgtgttaaaggcacacgagtccctgaagttttaatccgtgtaagattgtccaaaaattcttcttgttccagcacagacgccatccaagtagcccctgcatcgctgtctgactgagatctttttattcgcgatcatggagacttaggggccctttctgcagctgatgtttgagactcttagaacttcttaccaccgtagcttaagtagctgtttttcttttggaaaggaaattctcaggctccttctccttctttaaattttatgtatatctcaaaggattactttttaataaacagatttctatgctatttttgaatcatactgactataggtgataagagtttttaaaagcatttcataataaaactagaaatattttttcctgttttaaacagagttggactgtattattttattgttaatttttgtttttagttgtttaaattttgatttagattcctggttagtatttatttatttatttgtagagacagggtctctctatgttgcccaggcaggtctcaaactcctgaacacaagcaaccctcccaccttggcttcccaaagtgctgggattacaggcatgagccacaactcctgtccagtattgatatttatcatcagtattatccatcaggagacaggcaatttggtattattcatacttaaaaatcactttgtagctgtcatgataactaatgccagtggggcaattcttctggatatatgtgtaaaggtgaacttcatacctaatatcaataatgccagtgggatagtttttctggatttatgtgtaaaggtgaaattaatgtctaatagagtcttcattcttttttaaaccacagacccagatgtagcctttgtacctctaggaatgacggattatttagtcatcgtggaggatgatgattctgccattataccttgtcgcacaactgatcccgagactcctgtaaccttacacaacagtgagggggtggtacctgcctcctacaacagcagacagggctttaatgggaccttcactgtagggccctatatctgtgaggccaccgtcaaaggaaagaagttccagaccatcccatttaacgtttatgctttaaaaggtacttgtatcatctccttccttctttaaataagaataacaggcaaaatcatcaggtgcatgtaggatttttttttttttttttaaatcatcatcactggtgatcctaaattctgatttggggatttaggaccccagctaatacaatgtctgtggctataataataagcttaaaattactaaaggccaaagcttgattacccatgcaagatttcatgtttcatcagttgacttcaaaatactgtaaggaattcttttcttacataagcctcttactttcattcacattcctggctatggcggccctaaaaacaaacatacacccagggggttagatgcctagattaattttagtaacttaagaaaagtgatttgaagaaagtagtttagacttcaaccctttgatgtccacagttagtatgcttggggaagtataatacatgctgaggtcaacagatatttcctgaacactatattacatggaggaatgggtagcagcaagagtacactgttttaaaatcagagcacagctaattttgtgccaggcactgtgctaggttctgggaaagtactgagaataactgaggagcagagtggaagagaagaagagaagaaacaattggatagaaacaaagtgtctagagcagtgtggatcagcaaatgttggttgattaaatgaataaatttattagtcaaggagattgtggacgagtataaccataactaacccactgctgaggaatgcggtgttctgtttgattggaatttatttttattgttattattttgtaattctgtattataactatatgcctaattgttgtacaccatctcacaatcaagccttgtgagattttccaaattttatcttgatcaaactggtttgcaaattatttttcagggttttcttaaaaaaaaaaaaaacacccaaactttataagatcctggctatcctgtggatttttaggcccttgtatttgttcttttttatagcaacatcagagctggatctagaaatggaagctcttaaaaccgtgtataagtcaggggaaacgattgtggtcacctgtgctgtttttaacaatgaggtggttgaccttcaatggacttaccctggagaagtggtaggtaccctcaaaacgtgcaatggcttggagcagagcagcagggctcagaagacctgcatttgagctcggtctgtcactgatgggcacatcactgagtttctctagaccttagcttcccacctctgtgatgaacacatttgattaaatggcctttaggactccttgatcaatgggagagtttgaaatgatagttcctggaccaggcccttcagaatacataaagagtgtgcagtaagccttctttttcagaagtcagacagaaataggaaggttctctggctacaagatatcaaccaaaaaattagaagagcaaaaaaaccactggattttactattgcggagacagtgattgattctcatcgtcttggcctctgtgccctgaggtttgattcatctgatagtgttgattgcccgcaccccttcctcttctgccttgttggcacccaggacaatgtgtcttcctgttccacctcctatgtgcctgacctttgcatggcccaccttcagtgaacagttatgatgtaatcattcagcaaaggtttaatgaagtttgctcaatcccaagcactgtaccagaagctggttcagtattgcaggaagaagggaggaagggagatggaagtggggaaggggagccaccatgctgcctcttggtcactgaagatttacacagagtctcagtcattctaatgcattgtcactaagtgtgtaagacagccatgtgtaagaggctatgaatgcccaaatgcaggaatgactaatattcttatggagaacaaaaacgagatatatatatttcttccctccactcctgacttgtaaatttctgctccctgttcttttaggcatttgacagctttctgtccttctatccattgatccccctccttttatccgtttctctctcccatgcatttgccgctgcttttcgtttgtcctggggcgtctgataggaagttgggcattttcactattgcctcacaaacttcacacagtgaagggacatttacagtccaacaaatgtacatcttccctgaaatatgaagtgatttggttcttctgttcatacttgattgactttaatccttaacacataaacactgctttttatttataggagacagcaatttttttttccaaaccaaagtacatgctatttggcttacaaatatataatcaaagtattgtttcatacagtatgttttttccgattataaaagtaatgcaggtttattgcagaaactttgtaaaatatggagagacaaaggaagggctacttcccagagcatcactgtttatattttagggagataaagcttttatttttcatttgtatttctttcttttttttttcttttttctttttgttgtggagatgaggatctcactacattgcccaggctggtctcgaactcctgggcttaagtgatcctcccaccttggcctttcaaagtgttgggattacacatgtgagcctctgagcttgactgagataaagctcttaagtatttcttatccatagataaacattgaataataggtattattctttaaatggtaatttattacattctttatccttcagcagtatagcacaaacaccttatatgtgtcattaactgtccttttaaaaaatgggctgggtgtggtggctcatgcctgtaatcccagtactttgggaggctgaggcaggagagtcacttgaggccaggagtttgagatcagcctgggcaatgtatcaagactccgtctctacaaaaatttttaaaaattagccaggtgtggtggcatgagcctgtagcctcagctactcaggagactgaggtgggaggatcacttgaacccaggaggttggggctgcagtgagccatgattgtgccactgcactccagcctgggcagcagagtgagattctgtctctaaaaaaattaaaaacaaaataaaaaatctcatgattttctaagcagctagcttttattctttaggttttatcttttagagcagttttaggtttacagcaaaattgagaggtacaaagatttcccgtgtgttccctacacccacacattgcatagcctcccaccttgtcaacatccctaccatccatttgttataactgctgaacctccattgacacatccatatcatccagagtccatagtttatcttagagttcactcctaggagcgagctttttaaaagtcggttttcttccccttttgctgtagaaaggcaaaggcatcacaatgctggaagaaatcaaagtcccatccatcaaattggtgtacactttgacggtccccgaggccacggtgaaagacagtggagattacgaatgtgctgcccgccaggctaccagggaggtcaaagaaatgaagaaagtcactatttctgtccatggtacattccgctttctaaaatgtcagttgtccatgctgcttgggatccatatgtggtaatcattatttaatggaaactcttccctgtacagagaaagggttcattgaaatcaaacccaccttcagccagttggaagctgtcaacctgcatgaagtcaaacattttgttgtagaggtgcgggcctacccacctcccaggatatcctggctgaaaaacaatctgactctgattgaaaatctcactgagatcaccactgatgtggaaaagattcaggaaataaggtaaagaaattctctgcccaagtatgcctttttttagtgtgcatcagaggcagactgaggtttgtgtgtgtcttacaacccagacccaaagtcagtctagaaaatgtaacaatctgagttaagagatgcttgaaatcacatccctttgatgataacattgcaaagtggtattagtatgctggtaagtatttaatgagaagatgagaagaaagaactaaaagctctggcccctggggaaagacaggtcactggattcagctagggtggaagaaaggaagtaaaattggactcaccaggattgaatagattgaatatattccctgatgttcatcatccatatcgcaagtagacaggtatggtgattacacccatgaggcagttatcacatcaccttatgtgaaagttaacgtcataggcttaatctggaacccatttgccctaattgaggactccacaggaaagaagagtagagcctggctaactttaatcaggagagagatatgcagtgagttgcttggatccctaccttttaatcagaatggtagattgctctcatctcttaactggtggtggagttttgaatgagtcacccctcagccacagtttcctcatctacagtgtaggataaacaataccttatgtccttcaaggcaaggaattggatcagatgatatcatgaggcctcttaaggttttaagctgtgattagaacccaagagtcagaaggtacgtctcacagcacccagctaaccagccctatacttttgtcagaaatcatctcagaaagacaaagtcagtcctgtatttcaagccttcaggaggaagaacagagcctttctcatcagttccattcacctcaggatttgctttcttctttgtgaactaaattccacgtgtaattgagaagcaatgtctgagaaaatggaattttacaacctctatagaatagtaaaggaaaaatgaagtgggatactgaatctggaaggctttctgttgacacaaaatgaaggtgtacaacaaggagggcagctttccatgaggaacttccatgaggctgtgcagccagagaggaatagggtaacaaccctggtacagctaacacctccaacacgtgtgtgagcactgtctgcaagccataatccatagcagtggcaggacaggcttgccaactgagtggttctggaaagctgccttttccttttagtgattcaaggatgcttcaacgtggattttttagttcctgttatgagccagtgaatacaaagatgaacatggtagatgggggatctggcttcctggagcttaaaactccaggatgggggatctggctttcctggaggaagaaaaccagtggttttcttggccgaagaagtgtagagaacaaacagcagaggataatttggtaatcagcatcccagtgtgccccaggggactctcttaaggaaatccagtcgtggagcacacccagtatggtccagcctgctctcttcgtaggtctgagtgcccaagtatttgcaaagtgttgtggagcctatgaaatgctttcacacatacaatctcctttaattaactctcacaatgactctgcgctatgtgtacaattatcacgttttacacacaaggaaactgaggcatggagcattgtaataataatgcctgagatcttctcactccatgaccagtgctttccttctccattccagttgctttttcaactgtgatgatttataaaggacaatcaaatggcacatactatatttacgcacatacatacacccacacacacacatcaccaacgaccagatgtcatttataatccatgtaaaatatttttggggaaatttctcnnnnnnnnnnnnnnnnnnnnnnnnnnnnnnnnnnnnnnnnnnnnnnnnnnnnnnnnnnnnnnnnnnnnnnnnnnnnnnnnnnnnnnnnnnnnnnnnnnnnnnnnnnnnnnnnnnnnnnnnnnnnnnnnnnnnnnnnnnnnnnnnnnnnnnnnnnnnnnnnnnnnnnnnnnnnnnnnnnnnnnnnnnnnnnnnnnnnnnnnnnnnnnnnnnnnnnnnnnnnnnnnnnnnnnnnnnnnnnnnnnnnnnnnnnnnnnnnnnnnnnnnnnnnnnnnnnnnnnnnnnnnnnnnnnnnnnnnnnnnnnnnnnnnnnnnnnnnnnnnnnnnnnnnnnnnnnnnnnnnnnnnnnnnnnnnnnnnnnnnnnnnnnnnnnnnnnnnnnnnnnnnnnnnnnnnnnnnnnnnnnnnnnnnnnnnnnnnnnnnnnnnnnnnnnnnnnnnnnnnnnnnnnnnnnnnnnnnnnnnnnnnnnnnnnnnnnnnnnnnnnnnnnnnnnnnnnnnnnnnnnnnnnnnnnnnnnnnnnnnnnnnnnnnnnnnnnnnnnnnnnnnnnnnnnnnnnnnnnnnnnnnnnnnnnnnnnnnnnnnnnnnnnnnnnnnnnnnnnnnnnnnnnnnnnnnnnnnnnnnnnnnnnnnnnnnnnnnnnnnnnnnnnnnnnnnnnnnnnnnnnnnnnnnnnnnnnnnnnnnnnnnnnnnnnnnnnnnnnnnnnnnnnnnnnnnnnnnnnnnnnnnnnnnnnnnnnnnnnnnnnnnnnnnnnnnnnnnnnnnnnnnnnnnnnnnnnnnnnnnnnnnnnnnnnnnnnnnnnnnnnnnnnnnnnnnnnnnnnnnnnnnnnnnnnnnnnnnnnnnnnnnnnnnnnnnnnnnnnnnnnnnnnnnnnnnnnnnnnnnnnnnnnnnnnnnnnnnnnnnnnnnnnnnnnnnnnnnnnnnnnnnnnnnnnnnnnnnnnnnnnnnnnnnnnnnnnnnnnnnnnnnnnnnnnnnnnnnnnnnnnnnnnnnnnnnnnnnnnnnnnnnnnnnnnnnnnnnnnnnnnnnnnnnnnnnnnnnnnnnnnnnnnnnnnnnnnnnnnnnnnnnnnnnnnnnnnnnnnnnnnnnnnnnnnnnnnnnnnnnnnnnnnnnnnnnnnnnnnnnnnnnnnnnnnnnnnnnnnnnnnnnnnnnnnnnnnnnnnnnnnnnnnnnnnnnnnnnnnnnnnnnnnnnnnnnnnnnnnnnnnnnnnnnnnnnnnnnnnnnnnnnnnnnnnnnnnnnnnnnnnnnnnnnnnnnnnnnnnnnnnnnnnnnnnnnnnnnnnnnnnnnnnnnnnnnnnnnnnnnnnnnnnnnnnnnnnnnnnnnnnnnnnnnnnnnnnnnnnnnnnnnnnnnnnnnnnnnnnnnnnnnnnnnnnnnnnnnnnnnnnnnnnnnnnnnnnnnnnnnnnnnnnnnnnnnnnnnnnnnnnnnnnnnnnnnnnnnnnnnnnnnnnnnnnnnnnnnnnnnnnnnnnnnnnnnnnnnnnnnnnnnnnnnnnnnnnnnnnnnnnnnnnnnnnnnnnnnnnnnnnnnnnnnnnnnnnnnnnnnnnnnnnnnnnnnnnnnnnnnnnnnnnnnnnnnnnnnccccccccccctcccctccctttcccttcccatttttcttctcaccatgttgcccaggcttgcctcaaactcctgggctcaagtgtttctcttccacctcagcctcccaagtagctggagctacatgtgtgaggcatcacaaccatggacttttcactttcttcactccaggttaaaaacatcacagggataaatctcaaaacaccaaaactgtgaaaatgctgctaaccatgtgggtctgtctaaaccggagtgttacttgtacaactggtttcagccccaccggagtgttacttttacaactggtttcagcccctccggagtgttttcaatgccatgtagatgagttgtgaactcatattccactttgtagtctcacatgttctgggacacgaactattccattctgacttctttctgcctcttgcagttccttcatccattctggacttggtcgatgatcaccacggctcaactgggggacagacggtgaggtgcacagctgaaggcacgccgcttcctgatattgagtggatgatatgcaaggatattaagaagtatggaaaacagatgtgtcttcttctttcgtggtcagaatctttctcccttgacacaaatgatgtcaaatacattttacttattgactataagatagggttttgggtgtgatagcttcagggtgtgtatcttttgtcatgaatagctgtgagaagaaggtccagggctctcattagaccttcaaaatgtctccaatctaaaaacaagagtgaattttaagaaccactgttctaagaagatttttactaccctggctcacatatcttatttggtgaactttgtttggtagtcggactgcatgtaaacataaatgtgactgcttagtcccttatctgcccacctgctgtttggtgggttaattcgccattccctcctccctccccccagtcctcagccttcttaaatgggcacatgagcaatgtgtttacacttcatccatggtaactggttgtgttcagaagcctcagttgtttcttcctctagacagagactcctcatcttaacttctcctagggctaagaacagacttggatgttgactggagtttctagtagattccagtgtggagcaggaatctaggtcttataactcaatctgaggatcatcgcaaccctagtgacaccttaggggctcttcccagtgtgagtgttgagaagggagggctccaggcctttttgaaggggtgagagatcgagatcattaaatatggttgaagttgaactgttcagtttgctcataggttcaagactggggaatggtagtcatattttattaaacttgtttatctctgcctgctatgtaaacacttagccttcagttgttcatgtgtgagttattccctcttcagcacatgcagacaagttttaatgttcatctgcatgtaaaataaatcagtgtgtattgccccgaaatgcagacaaggtcccaactccttgccatcttagagtgttcccgtggctccactcattgccatgactctcaggaattggccctatacttaggccctttttctttctagatgtaataatgaaacttcctggacgattttggccaacaatgtctcaaacatcatcacggagatccacccccgagacaggagtaccgtggagggccgtgtgactttcgccaaagtggaggagaccatcgcggtgcgatgcctggctaagaatctccttggagctgagaaccgagagctgaagctggtggctcccagtgagttcctcaacagtcaggacaactcatcagctgagccgcatctcccccaggcggaactttgaatcccagatagaggtcatatagaaatgaaggtcccaaggcagaaattcagttatgaatgctcttaaaggcatgtgggactttgttttattttgttttgttttttgagacagagttttgctctgtggcccaggctggagtgcaatggcacaatattggctcactgcaacctctacctgggactttgttttagattcagatccaaaactgcatttttgcagaggcccctcaacattttgcttgtctaataatatagctacagtctctactttgaatgtctgtgtatgtggatggagagtggggaaggatcttctgtctcattgctccttaaaagatagatgaagccaaaagcaatataagcaaaatgcaacttacaaaataagctttattttttatttatttatttatttttgaatttttatttatttatttatttttattgatcattcttgggtgtttctcgcagagggggatttggcagggtcataggacaatagtggagggaaggtcagcagataaactggtgaacaaaggtctctggttttcctaggcagaggaccctgcggccttccgcagtgtttgtgtccctgggtacttgagattagggagtggtgatgactcttaaccagcatgctgccttcgagcatctgtttaacaaagcacatcttgcaccgcccttaatccatttaaccctgagtggacacagcacatgtttcagagagcacagggttgggggtaaggtcacagatcaacaggataagaatttttcttagtacagaacaaaatgaaaagtctcccatgtctacctctttctacacagacacggcaaccatccgatttcgcaatattttccccacctttcccccctttctattccacaaaaccgccattgtcatcatggcctgttctcaatgagctgctgggtacacctctcagacggggtggtgcccgggcagaggggctcctcacttcccagtagaggcggccgggcagaggcgcccctcacctcctgggcggggtggctggccaggcgggggctgccccccccacctccctcccggacggggcagctggccgggcagaggggctcctcacttcccagtaggggcggccgggcagaggggcccctcacctcccagacggggcggctggctgggcggggggctgacccccccacatccctcccggacggggcggctggccgggcggggggctgacacccccacctccctcnnnnnnnnnnnnnnnnnnnnnnnnnnnnnnnnnnnnnnnnnnnnnnnnnnnnnnnnnnnnnnnnnnnnnnnnnnnnnnnnnnnnnnnnnnnnnnnnnnnnnnnnnnnnnnnnnnnnnnnnnnnnnnnnnnnnnnnnnnnnnnnnnnnnnnnnnnnnnnnnnnnnnnnnnnnnnnnnnnnnnnnnnnnnnnnnnnnnnnnnnnnnnnnnnnnnnnnnnnnnnnnnnnnnnnnnnnnnnnnnnnnnnnnnnnnnnnnnnnnnnnnnnnnnnnnnnnnnnnnnnnnnnnnnnnnnnnnnnnnnnnnnnnnnnnnnnnnnnnnnnnnnnnnnnnnnnnnnnnnnnnnnnnnnnnnnnnnnnnnnnnnnnnnnnnnnnnnnnnnnnnnnnnnnnnnnnnnnnnnnnnnnnnnnnnnnnnnnnnnnnnnnnnnnnnnnnnnnnnnnnnnnnnnnnnnnnnnnnnnnnnnnnnnnnnnnnnnnnnnnnnnnnnnnnnnnnnnnnnnnnnnnnnnnnnnnnnnnnnnnnnnnnnnnnnnnnnnnnnnnnnnnnnnnnnnnnnnnnnnnnnnnnnnnnnnnnnnnnnnnnnnnnnnnnnnnnnnnnnnnnnnnnnnnnnnnnnnnnnnnnnnnnnnnnnnnnnnnnnnnnnnnnnnnnnnnnnnnnnnnnnnnnnnnnnnnnnnnnnnnnnnnnnnnnnnnnnnnnnnnnnnnnnnnnnnnnnnnnnnnnnnnnnnnnnnnnnnnnnnnnnnnnnnnnnnnnnnnnnnnnnnnnnnnnnnnnnnnnnnnnnnnnngattcaccagtcaggcgtggcggcgcgcgcctgcaatcgcagggacttggcaggctgaggcaggagaatcaggcagggaggttgcagtgagccgagatggcagcagtacagtccagcttcggctcggcatcagagggagaccgtggaaacagagggagagggagaccatggggagagggagagggagagggagagggagagggggagggggagggggagggagagggagagggagagggagagggaataagctttataataaagcatatgaagtagaggtgtctgcccatatagtagctgtcaattgcatttatcctattcaaattctgtccacaaggttactgttggagcaactttggagaaaatactgagttctcctgattgaattttgtcctcttcttgtataaggaaagagttgatgtagtttcctgggtgtagatggtttgagagatggtactgcctatccctaaaatgaaccaggcagccctcacacttccccaccagcagtgagagattcctggctcagacacagccacactaccttgctgcccctatgcatgtctgccaggaaacttttcattgtgcctctctctcttgtcacgtagccctgcgttctgaactcacggtggctgctgcagtcctggtgctgttggtgattgtgatcatctcacttattgtcctggttgtcatttggaaacaggtagatattttcttataaaactaaagatctttgaagccaatgataacaagcatagcaacctagttcagtgcttggcacagagaaggagctcagcaattacatgtggagtgaacgttgttggactctactgtgtccagtcactgtgctgcttcagtgaagctctggtgcactgggactttggtaattcaccagttacccgtcctggtcatttatagaaaccgaggtatgaaattcgctggagggtcattgaatcaatcagcccggatggacatgaatatatttatgtggacccgatgcagctgccttatgactcaagatgggagtttccaagagatggactagtgcttggtaagttccatggggtgacctcccaagactcccttttcccttgcacacaactttacaatttataggccttggcagaatagagatctgagcttgtgcttagtaagaactaggcaatggaaatttactttcagaaatacatttctgtcttgacaataagttaattggatcattgcaatgatttttttaaatctctttccataacaaattatagttaaggaaaattttacaaagggagaagagaatatgaagagggctggcaaagatacccaccaaaattgcttttctttagaaatgacacattgaaaatgaatttctgtgactaaaaatgagcagatgagaaatgaatgaggacaaccacaaaatgtattttgattcagtacattctgaagatgcattagatactcctttttacatatttggaatatggaatataaaaatataggtacattttaaggcaaaatatgtaaaaataagcaagccaacttatcacaagcatttcaagtatttcagtcctgggctgagaccaagtatatgaagctttagtccaagggagtatttcttttttaaatcacattcctaatgaatgaaagcaagacaaaggcaaatgaaagtagaggtagaggttgtgttatgatgaatgatctaacagtatatatgttaaagaatgccaaatgcaggttttaattatccaccagtctcattgcaaaatacagaagagtttaagtcttcttagagagttaggtaaactgaaatcaagcaaggcaccagagtgaaatcaccttcgcaaaaattgtaactgaggaaattatgacagtgaatgagatatgacctaaccaactccattttgctttagcctccaagttgtccttgttccttcctgggcataggccgaactaactttgagaggaacttagtttatagtttgactttgaaaaaaaagacaataatagccctttgccaaaacaaaccctctttttgcctgggaactagactgcctttgcgggactaacgaattagctacaagattagaaagtatggtttaggggtcactgttgtaaaacctgaggtcagtgcttgagatattttggagaccctgtatttcgattcgccagctgacgccacccaggtcaataaactggctcatctgatcttgtggcccctacctaggaactgactcagtgcaagaggacagcatcagctccctatgatttcatctttgacccaaccaatcagcactccccatttcaccccctacccaccaaatcatccttaaaaaccccattcccccagtttcagagacactgatttgagtaatagcagaatagtagaaattcccccagtttcagagacactgattcgagtaatagtggtaatagtagaataggtctcccgtacagctggctctgtgtgaattaaaccctttttctattgcaattcccctgtcttgataaatcggctctgtctaggcagcgggcaaggagaatccatggggcggttataagagctgccccccaatttcaaatatttatatctaagctttctttattttcctgcctatttcccaaaaagggatgaggagcttagggaggtaaaaagtagtaaaatatggggaagagggcataattcccattataccaagaggcattgctggtgaagcaatacctttccaggtacgattttcagtaacatagacgtgcagtaagaggcagtgttggctgttagtgtcttttatgagccaagtcttttcctggcttggctatccgtggtgagactgacaccccgggaaatgtttctctcagggtgagctctttcagggtgggacaacagcttcagtgtctttacgtatgtctcctcccaacatgaagctaattgctgtgctctcgggcatgtttagctcttggtagagtggctttcctaacaaatagggagcagtgagcccagcctgaagtttttatttagtcactccttggaatcagtgatattttgaatactgaagtatttccggtggctagtaatttactaagacaaaagatgcccctgtttgcatatggaaaacagaaggggagagacccagggggtgtgggtgagagcccccgaagccagaggatcccaggggctggcccagcatggagctggtagacagcgcactcacaccagggagggctgcaccctcctttctcccgtctgtgttttctttcccttgcaactgttattcgacaaaagcaattatgctaatttccttccctgtgggctcaattccgtttttgacacgatgacttggagaagtcattatgattactccaaacaggaaagacacccgcccagctgtccacccgcagagagctggctacggtgcagaaagctgaggaggcgtctggagtttttgggtgttaatgattctgcctgcccacaggtcgggtcttggggtctggagcgtttgggaaggtggttgaaggaacagcctatggattaagccggtcccaacctgtcatgaaagttgcagtgaagatgctaaaacgtaagtgctccttcctggggattttttgagcatggggattttttgagcatggggatattaagggaatttctcaaaatcatgcagctagtaaataagacatttaggactaggtcgtgattattttgactccaggttttatgtgtatttagattaggtttatttagattgctcttgctgcctgtatgttggaaaattaagagcttgttatttccagtgacttctttttactagaaagaccaggaattagttattagcactgaggccaagtaactatctgcttcttttagacttctggtaaatagaatgatatccaatcacaggattagtcatattcttggtttttttctgagaacaggaagttggtagctcagctggactgatatgtgatttattctttcaacagccacggccagatccagtgaaaaacaagctctcatgtctgaactgaagataatgactcacctggggccacatttgaacattgtaaacttgctgggagcctgcaccaagtcaggtgggctcactgacctggagtgaggattttcactggacacatgtggttgtgaaaactgttcaatcaggcttaaatcctccactctccatccccacacatggcagggaatagaagtcccttgaatggagctgactggtcccttgaatggatggaagctcattgttttttgagcaaaatctgttgccagtccagtcatagccgttcatggctctttataaaaaaaaaaaaacaacaacaaaaaaaaccttttttggtatcttatttttttctgcaccatatggtctgcaggacaattcatggcttttctgttcttcattttcatacccatctcctaacggcttttgtccccataggccccatttacatcatcacagagtattgcttctatggagatttggtcaactatttgcataagaatagggatagcttcctgagccaccacccagagaagccaaagaaagagctggatatctttggattgaaccctgctgatgaaagcacacggaggtgggtgcaaagagagatgttgctgtctatcattatcttacaggcatcacaaatggaaagacccatgtcctgatagatatcatgtctgcagattcagtgcccaaggtagcaagacttagagtcaaaccaccctgtccagtctttccatggtcatgcagagagatgcatgatgtctaaaggtgttttggactggggtgtcacatgggaaggccttgctgataggtttgaatgagagtgagttagaatgactctgggagctcttctgctatttacatgtgatccacttagacctataaaatgcagctctggccagggatgcttgagttctggaaccttgcgagaactgtctgtggatctccaagctcgaggtccttgctgaacctggacctataaatgacgtcaatgatagtgatccctactgcagaaatctacaagtggctataaagaactctgtaggtaagaaattctgtaagatcagaaagtacaatgaattcacttcttaataaattacttggtggacaccaaatgggtgctaaattgattgggtagaaggaattgtatgcccaagccacatggccacacggctcaagttccaaccaaggcttgtgagttgaaaaactgagaaagaataatgacagacttaatgtagtgaattcttcaaactttaagtgtaatggacttacaggtccatgggagcacagccccactgtcttagatgtggctcttcaggatgtgcgggctcctgctaaagatgtgcagggaactggctctgaaaacaagtgaacagtagtcatcatggcagctgacatttgtggagtcctttgtatgtgccaggtgccatgacaaatattccgctagtctttcccatctttgtcagtgggattcattctacatcttctgaaaagtgcttccttgacccccagatcaagtcattttccttacaagctattgaaatctttcttccttcacagcgcagctgagtttgatttgatctgtgtatttattttgtttgttttttacatttctttttttccctatttaaaaaatttttttatttccataggtttttggggaacaagtggtatttggttacatgagtaaattctttagtggtgatttgtgagattttggtgcacccatcactggagcagtatacactgaacccagtttgtagtcttttatccctcacctgcctctcaatttttccccctgagtccccaagtccattgtgtcattcttatgcctttgcatcctcatagcttagctctcacttatgagtgagaacgtacgatgtttggtttccatttctgagttacttcacttagaataatagtctctaatcccatccaggttgctgtgaaagccattaattcattcctttttatagctgagttttttatatatatatatatgcatacctacacatacatatgtatagatacactgcagtttctttatccactccttgattgatgggcatttggggttggttccacattttttcaatatgtgaattgtgctgctataaacgtgtgtgcaagtatctttttcgtatgacttcctttcctctggtagatacccagtagtggaattgctgtgatgcatgtatttgtgtgactatttgattaatgctcatttccttgactagatcacctcatgtgaaaggtgtggattggttttgcttttacccagttagctcccatgcctacctcagtacctggcacattgtaggtcccccaaaatcatcatctactgaaagtggaatgaccacttcagaagggcaccctgggtaagatttctctttctgtttttacagctatgttattttatcttttgaaaacaatggtgactacatggacatgaagcaggctgatactacacaatatgtccccatgctagaaaggaaagaggtttctaaatattccgacatccagagatcactctatgatcgtccagcctcatataagaagaaatctatgttaggtaaaagtgtctgtactcactctgggtgttgggactttccagtggtttaatatgatacttaaagtatttagagggaagtgtatagggatggtaagtgaacctggcagcccacgtggtctctaaatgcaggtctgcacaaccagttctgtgacatgtttccaggtttgtggcctataaattgagaagaataaaagctgacaatgtaacaaattttttaaactttaaatttaatagttttaaagaattttcttggtgtgttcctgcagtaaacattttttttaaaaaataattatttattctgatataatgaacttccttttttattgctgtctttttcttttttaatgaaaatatggtgattgattttttttaatgcccttacttggcagaattacaagttggctgtcttacgttggttcctcacattgctttttttcccttaagttttagaagtctctgatgtctatgagttcagtaacccttgcttttacttttcctaacattcaatttgtgataggaactctagagtagataatttgcagttatattttctggaccagtgtttctgttgaatgtattttgaaggtgggtctgtttttcaagtacattaatatgtggcagggttaaattgatttataaactccagggagtccagctgatgcccagaccagatggaccactcacatctgttcagggtggttcctccagagccctggactggtcacagacatgaagctggaagtctgacattggcttgtcctgtgagcttgcctttttgggtctgagccttcccattagtcaatgcaaaaaagtgttgagctgccctggacatagttttggaaattattgatgtgctctgaatgttttcaggttcttaagtgaaaggtacaatcgatttaaaaaagaatgtgtttgttttgcaaagctcagtacacaatattttccatttctgcggttccaagttccattcacttctcattgccaaatgggtgaacttccaagtgcttttaaaagattagccagtgagagttatcggaaccagtacttcctctcccctcccatattgttaaaaatagtttacattgcttcccaggctgggctggtggagttggcacgagatgtcagaggaacctgagtcatgctcaggcccaagccctgttggcaggcagaccactgctttctggccttccgtgactatctgaaaaaattgtgaatggctagagctactcttcccttgctgaacattttcaaaaagaattgagaacttctggattaaattgccttcttcctcgaaaaccctgggacccttccagatgggactaactggggaaagtggacaagttagaaacaaagaaactcaaagcaaagtcattggcactgatctctaagatgctatcacatgtgattggtggttgattttattaacaaattataagcaaagtactacaaaggtggctttaaaaagaaaataaagcaattcacagaaactactttttcatgtagcttgtatgtgtgctccatgtatttcatcatggaagattttagtgtgtgtttatgtgtatgtgtgttttaaaggtagctgagatgatttgctaattatggtcgaaaaaaagaaatttaggaggtaaacaaaataattatgtgtaagattggtccttgtggctgtgtgtgttttgtgtgtgcgtgtatgtctctgtgtgttttaggctgttcttttattgctataaataaatacttgagactgggtaatttataagggaaagaggtttaattagttcatgattctgcgggctttacaggaatcatgatactggtagatctgctcagtttctggggaggcctcatgaagccatgaagtcatggcagaaggcaaagcagtgcaggcacatcacatggccagagcaagagcaagcgagagagagaaagagagaggtgccacacacttctaaacagtcagatcttacaagaagtcacttactattgcgaggacagcaccagaaggatgatgctaaattgttcataagaaatctgtccccatgatccattcatctgccaccagtccccacctccaatactggagattacaattcaacatgagatttgggtggggacacatattcaaactatatcatattgaccctggaccctcccaaatctcatgtccttctcatatttcaaaatacaatcatccctccacaatagtcccctcaagccttaactcattccagcatcaactcaaagtccaaagtcttatctgacacaaggcaagtcccttccacctatgagcctgtaaaataaagaacaagttatttacttccaagatacaatggggttataggcaatgggtcaacattcccattcccaaagggagaaatcggccaaaagaaaggggctacaagccccacagaagttcagaacccagcagggctgaaaactccaaataaactccattgactccgtatcccatatccagagcacactgatgcaaggggtggagctcttgggaggggtggaacaccctgtggctttgcagggtttagcccctgcagctgctctcaggggctggtgtcgagtgcctgtggtttttccaggtgcagagtgcaggctgttggtggatatattattcatggaggatggtggccctcccctcgtagctccacgaggcagtgccccagtggagactctgtgtggggacttcaaccccacatttcgcctctgcaatgccctagtagaggttctctgtgagggctccactcctgcagcatgcttctgtctggacaccctggttttttaatatatcctccgaaatctaggcagaggctcccaagcctcaactcttacactctgtgcacccacaggctaacaccacatggaagcggccaaggtttatggctgtcacaagctgacgcaacagcccaagctgcacctgaactcctttgagccacggctggagctggagtcatagggatgcagggagcagtgtctcgaggctgcacagggcagtggaccctggggctggcccatgaaaccattcttccctcctaggcctctgggcctgtgatgggaggggctgccatgaaggtgtctgaaatgccttaaaggcctttttcccattgttttggcaatcagcctttgcctcctttttagttatgcaaatttctctagcaagtggttgcccagcagccctcttaaattctctcccaaaaaagcttttactttctctgtcacatggccaagctacaaattttccaaccttttatgctctgcttcccttttactttttttttttttttaaagagatggggtctcgctatgttgtccaggctagtttgaactcttggactcaagcaatcctctcacctcatcctcccaaagtgttgggattatagctgtgagccactgcgcccagcctctgcttctcttttaaatataagtttcaacttcaagtcatttctttgcttctgcatctgactgtaggctattggaagcagccaggccatatcgtgaacactttgctacttagaaatttcttccaccagatatcctaggtcatcactctcaagttcaaacttccacatattcctagggcatcgacataatgtggccaagttctttgctgaagcttaacaagggtgacctttactccagttcccaataagttcttcattttcatccgagaccttggcagcctggatttcattgtccgtatcattatcagcattttggtcacaagcatttaaccagtctctaagaagttccaaactttccttcatcttcctgtcttcttctgagccctccaaactcttcttatctctgcctgttacccagttatctttacagcaattccccattccttgataccaattttctctattaggctgtttttgcattgctataaagaaatacctgagactgagtaatttataaagaaaagaggtttcattggcacatggattctgcaggctatacaggcgtttgcttctggagaggcctcaggaagcttccaatcatggtggaaggtaaagggggagcaggcatatcacatggccagagcaggagcaagtgagagagagagagagagaggtgccatacagttttaaacaggcagatcttgcaagaagtcactcacttttgcaaggatagcaccaaggggatggtgctaaaccattcgtgagaaattcacccccatgatccagtcatctcccaccaggccccacctccagtactggggattacacttcaacatgagatttgggtggggacacatatccaaactatatcattgcgtgtgtgtgtgtaatttttaaaccagatatatgtttctgcatatctctttcctttctttcattcattctttctttcttttttttgagacagagtctcactctgtcacccaggctgcagtgcagtggtgtgatctcagctcactgcaactcattgcaacctcctcctccctggttcaagcaattcccctgcctcagcctcccgagtagctgggattacaagcacatgccaccatgcctggctaatttttttgtattattagtagagatagggtttcaccatgttggccagactggtctcaaacttctgacctcaggcaatccacccacctcggcctcccaaagtgctgggattataggcataagccaccatgcctggcctatacatctattttctaagatagaatctttgcatagtgatattcatctgtgagatctaaacattctacaaaaaaattaagaaaatatttttggatgcgttctttgggcatgcctctgcaacctgatgatttcctgctgcctgccagcaccaatacatttaatttcttttctgcagactcagaagtcaaaaacctcctttcagatgataactcagaaggccttactttattggatttgttgagcttcacctatcaagttgcccgaggaatggagtttttggcttcaaaaaatgtaagttcaaggaacacagacctttttagacccagatttcagtgagtggagtgtggaaggagatgctaggagatagatcttggaaaggccattaataacaggggcctcttacttacctgtctctctccttcatcccttacgcaggacagggagtctgaaatcatcaggcgtctactcttctctagagctttctctctgttgggagtgggtggagtgagaacctgggagaaggccagccctttatatccaggcagacagctccaagtgccaccatggatcagccagtcttgcaggggtgatgctattcagctacagatggcttgatcctgagtcatttcttccttttccatgcagtgtgtccaccgtgatctggctgctcgcaacgtcctcctggcacaaggaaaaatcgtgaagatctgtgactttggcctggccagagacatcatgcatgattcgaactatgtgtcgaaaggcagtgtacgtcctcacttccctcactaggcaggctcaccctccttcactttaatctctgaagtcaggtgttgcttctagagattcggtgcctgttttttaaaacatcaatagacttcaaggggtcagtacactgccttggcagcagattgcccaggtgtgagtgccagctccaccacttacttaatttggatttggggctagatacttgactgttctgcccctctgtctccctgactgtagtgggaggtggtaatagtacctatttgctgagttgttatggggattaaatcaatgaattcatgtaaagtgctcaggacagtgcctggcatatagaaacagcactcaataatgttagctattttatttatttatttatttatttatttatttatttattttctttttttttgagacagagtctcactctgtcacccaggctggagtgcagtggcacaatcttggctcactgcaaacttctgcctcccaggttgaagcaattctcctgcctcagcctcccgagtagctgggattacaggcatgcaccaccatgttcagctaatttttgtatttttagtagagacagggtttcaccatgttgcccagactggtctcgaactcctggcctcaagtgatcgacctgcctcagcctcccaaagtgctgggatgacaggtgtgagccactgcatctggcaagtgttagctattaatatgtcaattgtgtgtatgcatggacaagcatgcattcccaaggatggtgtctttatattttaagcttttatcagattttcaaaagccatctgtgacccctaaaatattgaaaccatttgggtttatgtatcttagaggcacagtttccttaaagatactcattttgttgtctacttgaaccattcttcccatcccttccacttctcagcagatgacatagctccctgtggggatatatctgctccctgtaggtacaattccaaatcacctcactgcactggacgtgagacagcttatggcagctgcagcttccacctagagaaagacatgggcctgcatccatgctgtgtgtgattcatgtactcatgtggccgtgatagctgtaatcggctcatagatcgttggatctgttcttaattttgttcccaggaatatctaaaaataggaaaccggtccattcagggcttacaccttttgggtgaaaattcaggattaatgtttttggatattattcctttggaggacataaaaggcaatattgaccattcatcattcatctagtatttgttgagcacctactatgtgccagggactgagagttcagtaatgaacaaaacacatgtaaaagacactcaaatgggacaagataattagcacaagttattaagagcccaaggggaacccttttctatttccactgctgtggatcatcagtgagtagacatgggtttaactgtctccctccttccttgcagacctttctgcccgtgaagtggatggctcctgagagcatctttgacaacctctacaccacactgagtgatgtctggtcttacggcattctgctctgggagatcttttcccttggtatgggcctgacatcgctgcttatttgggctgttctgaaacaccactggaaggaaaatgtgttctttcaagccccaggatgtagacactgttaagataacctggtgtgaggccagtatgctgcagccgcctcaaaccacatgttgtgccttattgtgtctgagataggcccatgcaggtggagatgggggtttttgttgggggttgcgtctcactcctggcctctgcccctcctctcctttgggctatgccagagtgacttcctcccactggaagtggtcccaatgacattcgcatcccagctgctttttcattttgggctttgggtcacatgggttcacccatggagagtgggccctccctcacctggtggcaattgatgctcaggtgaaaaggggtatgtggcgggaagggcagggctctcattcctggttgtcactggccagtcttgacaacccaggtgctgaacaacccaggtgccctgggctgtccggtgaggtccctaagagaaggatgagccataaccctgacatctggatggttcatctggggaggtgagacttacacacttagggataaacagtgtggtgctgatttaaaattgtaatttgagtcttgagtaaagagaaaggagtcctggaatagtgtgggaaggcttcagagagggaacttaacttgacctggccttggctttgaaagtgtgaaatgtttcatgaatttatctgtgatcaggatgtaatagtaaagtgtatcttcctgccctgtctcctttttcatcctagttctccctccatggatgatcacaatggatcatccccagtggcttaatggagtcctgtactcccttaaaagcagagaggccacaactttgatttttgctttagctatttgaacatacctggtaaaaaagactctctgggttttaatgattcagaatttctccttgcttttctagttcattttgtctgtgttgatccaatagtcatacacattgaaaaacacttgaacgcttatttctaaagatgtggaatttttgtgatggtacttggacttgaccaacctggagtcctaattaaacttaaggtttgagctggtctctgaagtcaaggagatgatgacactgaattttcttgaaaaaaccagtgcttcaaggctataggatctgaaaggttttctaacagtgttctatcatgccaagtgtttcaacaatgcactgagcgtttgttagtcctggtgttttattgtttggcttttaggtggcaccccttaccccggcatgatggtggattctactttctacaataagatcaagagtgggtaccggatggccaagcctgaccacgctaccagtgaagtgtgagctccttccccatcccgggggcctgtgttcacagtctgtgggtctagggggagggaggggccctgagacttccccctgtgcccactcttgagttctgtccccacagctacgagatcatggtgaaatgctggaacagtgagccggagaagagaccctccttttaccacctgagtgagattgtggagaatctgctgcctggacaatataaaaaggtgtgtttggatctatgggtggaaaggtctggttaaagctggaagttataccagtgagctgtgctgttccacagttctagaggagcattttcaaaagaggcaaaagattgtgtgatccagtggctgggcttcatggcggtgctccacgagaccctagtagcaatgatgaatgaaaaccctccccttcccgtggggctttcctttcatcttatatgtgcagtacctgtaagcactattctccagatgtttgagtatcagaagttagtgtgcagttagaagactcagggcatccatggccattacatcactaatttgagtgcacttaaatccatgcgaaattggcttttaccagcggactggaaggaacaacctcagctgttatctgtggcaccagctggttttttgtggaataggaagcattgttcaaaggaacaaatgtaatttcttggaaccaagcaggatatgtaaatgaatgaaacagctttctgctgaggtgttgagaggaaaactcagacataacctcagtttcttagattaagattagtccctgtgtagactttttatacttaccatttttcttccttcttctcaaggaggaatagcgttaggagattgtgtgccgaactggaagttaaatacttctgtctgttaattatctcactgcccactacaactttcacaggtgaggcagtgaggaggcagaaggaaattaaccctcagttggtcaaagatgctctgactggtggaaatgtgttggtgggaagagattgaagttattgttgaaaatagggtcttttcacatccaatgttagacctctccaatgtttaaggatcatgaaggctttgggtattatccacccaatagaaggcctcactgcctatctatgggacccatccaagccctggaaaggcaacgtgatggggaccagaagggttctcagttgtagctactgacttggagaaggggctactggtatcttagcacctaatggcagaagctctttaccattggtggccccttcttcatgttctatgtctctggggatagttgacatgactctccttcaactaagtcccacatcttccaggtagtttggaaatatgtacagttaaataatagtaagttctgagtgtctctattcatttttgaggtttggttgttaacacttgattaaatatgttcaatgaatgtttatagagttatgaaaaaattcacctggacttcctgaagagtgaccatcctgctgtggcacgcatgcgtgtggactcagacaatgcatacattggtgtcacctacaaaaacgaggaagacaagctgaaggactgggagggtggtctggatgagcagagactgagcgctgacagtggctacatcattcctctgcctgacattgaccctgtccctgaggaggaggacctgggcaagaggaacagacacaggtagctgtgggggcagcctcagtgtctcacctttcccctcccctataggccctgaaggagaggacccattttcccgataatggtgcactcccggttggtaaatatgtactcagggacaagttgcagaatcctcaggaggtccacgtggttttgaaaatgcttcccagatgattctaatatgttccccctggggctgggagagggatgtgcatgttgtggggagagggacatgcttccctggtggagaatctttgagctaaattctcaggtaatttgatcaaattgatacagaactgtgattactgagatcatataagcctctcctgccattgtcttaaatagtcattgaactggggaaaaagtgaagaaaggtgggactgagtcctttgacgctatgccctacctgtgaattggaatcacctgcagagatttaaaaactgctgatctacaagcctcacccaaaacaacaaattagaatccctgggggtggtggccaactgctccctggctgatttgtttcttctttcttttaaattttgtattatggaagatttctaacgtgtgcacaattcacatagtatagtgagctgttcagtatccgtcacccagcttcaatgactatgcactctgccagcctggatgcacacatggccatgtctgtctctcctcagcctcctctggattgtttggaagcaaatcctagacaccttatcatttcacccataaatattccagtgtgtgtctcttaaagataagggctctattttaaagaagaacaacagttattaaaaataactacaatgctgttatctcacccaaaacagggacaataaatcattaaggcatcaggcagccagttaaagttcaaattatctcacaaatattatcatactccattaaaaagtgggcagaggacataagcagacacttttcaaaagaagacatacctgcagccaacaagcatatgaaaaaatgctcaacatcactgatcactagagaaatgcaaatcagaaccgtgatgagataccatctcacaccacacagaatggttattattaaaaagtcaaaaaataacagatgctggtgaggttgtggagaaaaagggaagcgtatacactgcttgttgaagtgcaaattagttcagctattgtggaaagcagtgtggtgatttctcaaagaacttttaacagaattaccattcgatccagcaatcccattactgggtatataaccaaaggaatataaatcattctaccataaagacatgcatacgtatgttcactgcagcactattcacgatagcaaagacatggaatcatcctaaatgcccattgacagtagactggataaagaacatctggcacatacacaccatggaatactatgcgttgataaaaaagaacaagatctgagataccatctcccaccagtcagaatggctattatttaaaagtcaaaaagcaacagattgtggcgaggttgtggagaaaaagaaacacttttacaatgttggttggagtgtaaattagttcaaccattgtggaagacagtgtggcgattccccaaagacctagaggcagaaatactgtttgacccatcaatcccattactgagtatatacccagagtgatataaatcattctattataaaggcacatgaatgtgtatgttcactgctgcactgttcacaatagcaaaatcatggaaatcaccctaattncccatcatgatagactggataaagaaaatgtgatacatatacaccatggaatacgatgcagccataaaaaggaatgagatcatgtcctttgcagggacatggatggagctggaagccgttaccgtcagcaaactaacacaggaacagaaaaccaaacaccacatgttctctcttataagtgggagctgaacgatgaggacacatggacacatggagggaaacaacacacactggagcctttcaggggttggggattgggtggagcatcaggaagaatagctaatggatactgggcataatacctgggtgatgggatgatctgcgcagcaaaccaccgtgacgcatgtttacccatgtaacaaacctgcacatcctgcatatgtacccctgaacttaaaaagtggaaaatacaaaaatgaaattaaaaaaagaacaagatcatgtcctttgcagcaacgtggatggagccggaggtcattatccttagcaaactaatacgagaacagaagaccagatacctcatgttctcacttataagtgggagctaaaacaacgagaacacatggacacaaagaggggaacaacacacaccagggcatagttgagggtgcagggtgggagaaggaagaggatcagaaaaaatacctatcggatactgtgcttattacttgggtgatgaaataatctgtacatcaaaccgccatgacgtgatttatccatgtaacctgcacacgtgcccttgaacataaaataaaagttaaaaaaaaattatcatacacttgttttgttctgtttgagatccagataagagtcacacattgcacttggttgctatgtctctgtaagttcactatgcctcttttttttgccctcttacatattatttgtgaagaaaccatagtgtttgcctgtggagttcccacaatcagaattttgctgattacatccttgaagtgtccttctcaggtgcttctgtcttctctatgtgttgtaaactggtagttagtctaggaacttaacctgactcaggttagatcttcggcaaacatgcttcatagatggttctgtgtgcttctgtcaggaggtatgcactgtccagttgtctgccttttgtaacattatcagtcattgggtgaccattacctagaatttctttttttttttttttttgagatggagtctcgctctgtcacccaggctggagtgcagtggtgtgatctcagcttactgtaacctctgcctcctgggttcaagccattctcatacctccgcctcctgagtagctgggattacaggcacatgccaccatgcccagctaatttttgtatttttagtagaaatggggtttcagcatgtgggccaggctggttttgaactcctgacctcaagtgatctgccagtctcggcctcccaaggtgctgggattataggcatgaaccatctcacctggcctagattctttaactcagcaccaaggtggagctaatgcccaggcaggactgagaatcactggttcatgtggtcagatggaggagaccatgccccagttctccgctgtctttgcatggcccttggacagaggtaggagaaggtgatgatagtggcccctagttcaaggtccaagttgcttgtgtgtgtgtgtgtgttttttttttcctcttctttcccatcagaacattattttggaggcttatgactgtgacctttgttaaccaatttaggtataatatgtagacagcccttgtttatttgtatggactgggtaattttgaaagtatggcttttctattttgttttagaatgtgttatgtgatttgaagatgggacacagtggcccatcagtcttcggttttttattatgctttgctcaggccagtttttataacgtgtttatatctcttgagcatatggtgttcctccaagttttgggggtctgcaatggaacttcacgggggtcggggaaggctgggcagtgaatctagggctctctgtctcagatcctttctcaatttggttactttgtatttgtgggctctgaataatatttgagttgtaagagggttctgcttttatataaagttagaaagtcacattggaataaataacatgagaaaggtgcccagaagttttctagggctacaacaggctgagctgcagaatttgatgcaccaggaattgaactttctcagttgaagttcacgttcaagttaagtaacttgtgtggcatcacacagctagtaagtggggggaccattccagacctaaggctttctgactccagaactcccctttcagccacttctctagtatgtaaggagccgtcacctgggccttcaagttgggggccggtgggggggcatttgatgtcaagagagaggggaagagggcattccaggcaagtggcaggagatcctgagaacacagtttggatgctcaggaggcttccgggagagcacctgatgggcctggctgcagcttgcaccctgatgggtctgacttcaccccctgctctgctttcccaggcctttggatccggcattgcttatgttctcttccactaggattgagtagggaaagtagaaattcttgcagcttgtcagtaactttgatgaaagacccagcagaaaagcaggaaagctgaagtgtaaaagtgatgggtggaccttggttttccacgtggcctaccacagcatgtcaggcctgggggcagaatcttgccatactgtgcagcccaaatttgaatgccaaaggcttttgtttgtctctggggggccacagtctaggtctagttctgtgcaggagttgtaatatttgctcttctctccctcctccagctcgcagacctctgaagagagtgccattgagacgggttccagcagttccaccttcatcaagagagaggacgagaccattgaagacatcgacatgatggacgacatcggcatagactcttcagacctggtggaagacagcttcctgtaactggcggattcgaggggttccttccacttctggggccacctctggatcccgttcagaaaaccactttattgcaatgcggaggttgagaggaggacttggttgatgtttaaagagaagttcccagccaagggcctcagggagcgttctaaatatgaatgaatgggatattttgaaatgaactttgtcagtgttgcctcttgcaatgcctcagtagcatctcagtggtgtgtgaagttggagatagatggataagggaataataggccacagaaggtgaactttgtgcttcaaggacattggtgagagtccaacagacacaatttatactgcgacagaacttcagcattgtaattatgtaaataactctaaccaaggctgtgtttagattgtattaactatcttctttggacttctgaagagaccactcaatccatccatgtacttccctcttgaaacctgatgtcagctgctgttgaactttttaaagaagtgcatgaaaaaccatttttgaaccttaaaaggtactggtactatagcattttgctatcttttttagtgttaaagaggtaaagaataataattaaccaaccttgtttaatagatttgggtcatttagaagcctgacaactcattttcatattgtaatctatgtttataatactactactgttaccagtaatgctaaatgtgtaataatgtaacatgatttccctccagagaaagcacaatttaaaacaatccttactaagtaggtgatgagtttgacattttttgacatttatattaaataacatgtttctctataaagtatggtaatagctttagtgaattaaatttagttgagcatagagaacaaagtaaaagtagtgttgtccaggaagtcagaatttttaactgtactgaataggttccccaatccatcgtattaaaaaacaattaactgccctctgaaataatgggattagaaacaaacaaaactcttaagtcctaaaagttctcaatgtagaggcataaacctgtgctgaacataacttctcatgtatattacccaatggaaaatataatgatcagcaaaaagactggatttgcagaagttttttttttttcttcttcatgcctgatgaaagctttggcgaccccaatatatgtattttttgaatctgtgaacctgaaaagggtcagaaggatgcccagacatcagcctccttctttcaccccttaccccaaagagaaagagtttgaaactcgagaccataaagatattctttagtggaggctggatgtgcattagcctggatcctcagttctcaaatgtgtgtggtagccaggatgactagatcctgggtttccatccttgagattctgaagtatgaagtctgagggaaaccagagtctgtatttttctaaactccctggctgttctgatcagccagttttcagaaacactgacttaggtttcaggaagttgctatgggaaacaaataatttgaactttggaacagggttggaattcaaccacgcaggaagcctactatttaaatccttggcttcaggttagtgacatttaatgccatctagctagcaattgcgaccttaatttaactttccagtcttagctgaggctgagaaagctaaagtttggttttgacaggttttccaaaagtaaagatgctacttcccactgtatgggggagattgaactttccctgtctcccgtcttctgcctcccactccataccccgccaaggaaaggcatgtacaaaaattatgcaattcagtgttccaagtctctgtgtaaccagctcagtgttttggtggaaaaaacattttaagttttactgataatttgaggttagatgggaggatgaattgtcacatctatccacactgtcaaacaggttggtgtgggttcattggcattctttgcaatactgcttaattgctgataccatatgaatgaaacatgggctgtgattactgcaatcactgtgctatcggcaggtgatgctttggaagatgcagaagcaataataaagtacttgactacctactggtgtaatctcaatgcaagccccaactttcttatccaactttttcgtagtaagtgcgaagactgagccagattggccaattaaaaacgaaaacctgactaggttctgtagagccaattagacttgaaatacgtttgtgtttctagaatcacagctcaagcattctgtttatcgctcactctcccttgtacagccttattttgttggtgctttgcattttgatattgctgtgagccttgcatgacatcatgaggccggatgaaacttctcagtccagcagtttccagtcctaacaaatgctcccacctgaatttgtatatgactgcatttgtgtgtgtgtgtgttttcagcaaattccagatttgtttccttttggcctcctgcaaagtctccagaagaaaatttgccaatctttcctactttctatttttatgatgacaatcaaagccggcctgagaaacactatttgtgactttttaaacgattagtgatgtccttaaaatgtggtctgccaatctgtacaaaatggtcctatttttgtgaagagggacataagataaaatgatgttatacatcaatatgtatatatgtatttctatatagacttggagaatactgccaaaacatttatgacaagctgtatcactgccttcgtttatatttttttaactgtgataatccccacaggcacattaactgttgcacttttgaatgtccaaaatttatattttagaaataataaagagaaagatacttacatgttcccaaaacaatggtgtggtgaatgtgtgagaaaaactaacttgatagggtctaccaatacaaaatgtattacgaatgcccctgttcatgtttttgttttaaaacgtgtaaatgaagatctttatatttcaataaatgatatataatttaaagtta

SEQ ID NO: 16 - DNA, 46811 bp, Mus musculus
aaagctttcctagggtacgtcgcgtgcgacccactcggaagggtggaatttaggaggataaaaatccttctgccatcaagatgcagagggcaggcatttggtagtcacgcctagcctgagcgttttcatatgaagatagaagaagcgaggaccagataacccccgaaaacaaaggcaggaccagataagtggctccgaagggataaaggtcgttctttccttcttccggagaacatcccaaaggtacgccgagcaaccgttatttgcacaccgcctcacaatccagcctttcaaaaacccatcatcttcctattagactccacagtttcctaatcccattaaaggattagcaactacacggcactttcccttaagacccccagttcaaaacgacgcagccgcgttagaatttctccccagggccatatttctagcgaggcccagactgtctatagaaaggataatttgaattctagatttatattcgttttagaaatgagcagcaattttacgtgtattttcttttcgaagagaatacaaaacaatagcacccccacccccaaattgggaagtcaactcattttggaaatgatggctgtttgtagtttcctgaaacctctttcccggcagaacgtcaacacctcccccttcggccccccaccccaccccatctggtttgctcccccctcctcgttgttgttgaagtctgggggttgggactggcccccctgattgcataagagcaaaaagcaaagaagaggtcttgagcctgagagagtcagagagcaaggagtcctagggaaacttttattttgaagagaccaagggggggggggacttcatttcctgacagctatttactttaagcaaatgattagtttttggaggacggactataacattgaatcaattacaaaatgcgggttttgagcccattactgttggagcttgagggagagaaacaaacggaggagctgcggggaaggactggaagcttggggcttacttttcactccgggtatcggattttctttgcaaattgacatagaaggagaaggtaagggagaggaaaaagtgacttttgtttctcaagaaggtccctgatcataacttggggctgcaagaagctaagtaacttcaaattttgggcaacgaggaaaacaaaaacaaaacagctgagttcagtggtgtgtccagaaagtaacttattctgaataaacttcactggaatggggggtgtgggggggtaaccattagagagtcaaagataaaaaaaaaaaaagaaaaagaaaaagaaaatgaaaaaaaatccagacctatttttaaaagcaatgtttttttttttttccctacacaatcctatagccttccaaagaaattgttaggcttacatttttgaggttttcctccagggtgggggtggcgttcgtgcttactgggacgaacaccaagtaacattgggggggtggaagccgcggcgcttggcctcttggcagtgggtcacggaagaggacaggtttttaatgagtattttcattcgtcgcccgcggtttggcgggactacgctgtagcgggtggtgcggcgcgaagcttggggagggggcgcaccaggagaagtgtgtgtgtggaggggaaaggggcgccgagtggggcgcgggaaagcgctaagaaaaaagggaggtgtgaagggctcggctggaggaggtcggacctcggatgccggccgggcacactcggcgccagtcgagccctcgtaattactggacggcgctgctgttggaaacatctggggccagacttgagcgcggcggtggcggctgcagcaccgtgagaggggcgcgcgggcgaggggcgcagctccaagggttccggagagattggagcgaattacttgggtgctagaagcctcgggcggaatccgcagtgcgctgggatcgtgcgcctctcactccagcgacggaggcagcggcggcagcggcggcgcggacgagcgatctggaataatgacaaacacatttggcctcgagtgaagaagtcgtcctggcctcgcattccagcaactgggatttgaggaatttcaaactgcactccgaggggccctcattgtgctccgtagtccccacccccactcggctcacttgcgtctccagtggagtcttttctgcacggccgggggttgggggggcctggctcttgcttagtcctggccgcaggcagcaaagaggcaagatccctggctaggagctgacctcttgtgaagaagtcaggacatctctgaaaggacagacgtgggtgcaggtaagcagaaatgtaagaggccaaccaccctcgcctcctgcctacggaactctgggtgcttctctgccctgggatgatggatgcgaggcactggtcgcctgaacgcaacctttccagtgccccccccccccaactttcctcccaacgctcagtatcctgcaaaactcaggggcggtctccgcgcagccttccctccttcaccgttattcccttggaaatcagtttatacatgtgagattaacttccctcgagcagggccgggaaagcaggaagcgatctcttggctttgaagcttctgaggtcggcgattctttctgtttggaaggcgtgtggggcagtctgcagagtaaggcagtatgactcggccctggtctgcagcaggaccaagccagagcctcgcagccaggtgtgcaggagttgccagtgacttggcgaccagccttggcgagaaaggaagtgttggcctgtttgtctgctgtggggagtccttgcagaacccgcgcttagaaactcccaggtctgctaagacctctagaagacccggagggtgtgcatgggggaacccaagctggggagggggcgtgggtggcacttttaaaagtctgggctgcccagcgtcggacagagctgcccagaaaagccccaggctgggcggtgtgggaaacggctttttggcttcgtggcggaattgctcaatgttttggactgaattgcttctcctgaatggtttcggatcagtcttaggcagccttgaggagccggaggaggcctctagtgtaaacccacactgtggtctgcagctgtacagccccagatttaacacccaaagtctcagaagaggctcggggctcagggcgctcctcgggcgcacctcttctgccgtcgcactggagtttacataacctctcttaggctcggattttcccctgaccaaggctttccatctcatccttcctctcgtcctctttctttgcaaattcctcttgatgaggactccttcgatttcccaacaggagtgtgtgtgtgtgtgtgtgtgtgtgtgtgtgtgtgtgtgacacaccaattaatttgtcgccgtggtcagttcctgcttaggaacccttgcaaaagtcctgttttgggttgtctctagtacagctgggtttctaaagctcgcgggagagaaagaaagaaagagaacacagtccaactccactgtttattgccccggatcccttcttttgctggagtctgcagacccgcagggttcagactcagaacctggcctcccacttctgggcccaggggcttctactttcttcctgggcgcgggctggggagagatgcagggggaggggcttcaggctgcaaacgcgtcaggcgccgaagctggcgggcgggatttctgcctcctggggacaggacctaggctgcgcgggacctggggacgtggtgaccatccttctgcctggtgacctcgaggggtgggatccccctcgggccttcagtgagtagcatccaggttaaaggttgctgactggaaagctggataggtgactcaaaggtgagaggctcagcgacagtctggccgctgatggttgggttggccggaggcatcagcattgaggaggagaaggagaaggaggagaaggaagacgaggaggaggaggaggagggggagggggagggggaggaggaggaggaagaggaggagggggaggagggggaggaggaggaggagggtgggtcttgtaggagagtactcagtgtgggatgcagagtacgcagctttcgctgactgcattctgattcccgacctcatcggtgcctttttttttttttccctctgaagtagttcaatgtttttttcttttgttttaaactgaagggtggaccaccaatactagctgggaacttagacggtagtaaaaggggataaatgtaagccacggacttggagagtctctttcttctacttcagttcccttccttccggaaggtagagaagctagaggcatgaagtagagcaggggtgcccaggggcagggcaaacaaaggggcaaggtgggcactccagaccccgaatcacagagcttggtccagcctttggttctggcggctgcggtcggtgctggctggcctgcaggaggcgctgtggctcgcctgtaaccctaaacctggccccctccctccaccctgcccagtctcctctcaggtcgcagttgaaaacaatgcaaacgctgagcatagagcctggggcgcggcggcctccgcagtcctgagctggaaggaaagggacttgggcttgggcctgggatcgtcgggtagatccgtgtcgcctggtatctggtggcgatcttgtggcgcgggggttaagggagacagggagagagggtgttggggaggggggtgagagacacagatacacacacacacacacacacacacacacacacacacacacacacacggagagagtgagggagaggcagagagacggagacacacagagacaggcagagagacaggcagacacagagagacacccagagagaaggggtggtcgggatcccgagcgtgctagcgcggaacctcagagagaatcggccccagtgcgcgcagcgctgtaggggacccggagcctgagctttgagcgacgccggagccagcgggtaagatcagcggggttgccgcgccctctagtggctcccgcagcgcgacccttgtcccagtagccctgggcggtcgagcggtccccagccgggagcccagtgcgcctggaatttgggctcacctgggtcgctcttgagttttcctgcgggcactgcgttggcgcagaggcgttgggtggacaagagtgggctgagggtccgggtttgagctggagaattggggcgtcttaatttagcagaaggtgggtggaggcggtggaattccggatccagggagatcttgggggacagtagccggcgtgtgcgctccaggccggctcaagcttccttggcctgttgctgtcttagaccccgcgttaccgagcaatggaaatagtcctttctaaccaactgggctgcagggaccccgcggggggcgggtttacgagcagcgagaacagagtggcagggaaaggcgtcgtggtctctcttggcagggtctaggtagccttcatgcttggagaggtggaaagtcaaagggtgttgtttcccctaaacccaagtgaccagttctgcaacatctttgagacctggtccacagcgctatcttcctggctctcaaggcacggctgtgtcttggtccctctttgggcagtggtgatgataattatgctgatggtgacgatggcggtatgtttgttcctcagtgaagtctctggaggtccccaaagaaatttagcattttagataggagttttgtcatttcttcttccacgcctaggagctcaactacaagtcatcacaagacctaaaagtaaagattaacctacgatttttttttaaagttgggacattttaaaatcagaactggtttcaatggcgcctgcagctcagagacaacaggacactggttcttgaaccaacactgccatctgctgtctactctgaggaactgcatatgcctctgagagggcttggcaaattccaagcaaatattggtaggagggaagtttctctctctctctctctctctctctctctctctctctctctctctctctctctctctctctctctctctctctctctctctctctctctctctctctctctctctctctccccctccctctctctccctctctctccctctctctctccctccctccctttccctccctccctccctctctcccccctttctccctccctctctccccctcccccctctccctccttcctccttcccctctccctctcaaattttaaatttttatttcaagtgtatgtgggggggttcccccatatttatatatatgagtcttgtgcatgcctggtgtcttctaagatcaaaagagagtgtcaggttcctgagtctgagctgctgtgccggtatagagacttgaacccagagaccattcggtgaccttaaccactgtgctatcccttcatccccctttttgctcttgaggagcacaaagatgattttattaatttttctttcttgcgagtctgcaacaatctccagaggaacagattttatttttcagacatttgtgtagtttccaacgtgtgtgtgtgtgtgtgtgtgtgtgtgtgtgtgtgtgtgtgtgtgtggtcaagagatcaaattcaatccttccaaatgctcagtaagcccagtgtggctgagctacatcgagccctaattgctactctttcacacgtacataatgaacggggtttatgtgagcaggcctgaaaggaagggagcaggcttttttccttctgtaaacacagcgtgtgggcttggtgacttcaagacacctgatgacttttcttttcatttagtgacagtcgaaaggatgtgttattttattctttcagagttacacatctggtgcaaagagaccagaaaggtctatgaacccaggctgccccctaaaatgcatgtgtgtaaaagtgtcccagcccctgtctcttattgaacatttaatcttgtactttggcagatcaaaacaccgcagaccctggtggggtacaggtcctgggaaatacaatttgggctagaaaacgcagaagtggccaccattgcagacccatatttaagctgcctgggctgaagttctgagagcgaataaagagagaggagaaacaaaacaagaacctagatgtgctattttcatagttagaattaacttaggagaactgaaattaaccaaacctcagaaatctgaatcttgaaggacctcggtggctttggtggctgagagcctcctgtggtctttaattgggacagggtggggtggatttcattgtccagtggttgagcagcgaaatccatgttttttgctcttactgtcagggaagctgggagtaagcctcaggggagtggtagctcttctgggagcaagcttgcatcctgtttactttcaaatttgcctgtggtctctggtaggaggctcaccttaggagttttcacttctgcagtggaatgactagctctgatggtgtaccgctctgcagcaggagagcttgagttcaaggccaacctgggctacatcgtgtatatggaagaactagaaagagggggaaggaagaagggagggatgggaagggggtggttggagacagtggccgcagtcagattgacttctgtgttttaggactgtaggtgttagttaacgttgcagaatggtcacagcgataccagctcgatagagacttttcatcctctttcccactaggcagaaggaagagatgtggagtatccagggctccacttaattagtcaggaggagttcctagactggttaagagcactgactgcagccgagcttggtgacacacatctttaatcccagcacttgggaggcagaggcaggcagatttctgagtttgaggccagcctggtctacaaagtgagttccaggacagccagggctatacagagaaaccctgtctcgaaaaacaaaaaaaaaccaacaaaacaaaacaaaacaaaacaaaacaaaataaaacaaaacagagtactgactgctcttccagaagtctggcatcttaggattctgcagggcaagtctaagtgaacatcaggcactttgaaactgtgtatgctagtcccttaggactcagggaggcgagccggcaagccagtgatggttggtttcaagttagagacaggacctaagtttaaagggatagacagggtttcagagctggaatcagaatctaatctgagaaggaatgagagcaacaggttggagatgtcccatagcaccggagagtgagtggggcagcaatctcacaatctggcttgtctctcccactgtgacatggtttttgaaatgtgaacatggcagggcaggagactgatgtccaacatggaatcagtgtgggagcaagaaacaatatcttgtctatttatttatttgtgataaagtctctggggctggagagatggctcagcgattaagagcactgactgctcttccagaggtcctgagttcaattcccagcaaccacatggtggctcacaaccatctgtaatgggatctggtgccctcttctggtgtgtctgaagagagacagtatactcacacacacaaaataaataaatctttttttaaaaagtctcttagagcccccgccaggctagccttttgtctctacttcactatgcctgactaataagtgatttaatttaagaatacattcatgtatttattacctgtatgtgtgcatgtatgtatatgtgtggaggccagaggaccacatatgggagttagttttctcttcccaccatttgggtcttggggctctaactcaggtcatcgggcttgggagcaagcacctctacccaccagactgtctcaccagccccattaattttttattttaagtgaaatctgtccctcctccttgcaaagtgtttagtccccatcacaccaacttacagtgctacaagcctcagattttgtaatggcagctccctctgtctgtacgtctgacctgtggatattcatggctctgtctgtgtgtctgaggtgtggatgttccgagctgtgagcaactaactaaagcatggtccttgcaggttgggaaagcaccagccaaaccaagactcccttccggagctcttccatagagcaagcactgggagtctcttcctctccccttgggctctctttctcactgtgggacaggcatgctactgttattcatggccagattgtctgggtctccgatgagtaatggcatgcacctagccaggcaactgctgctatcagagtctggagttgggaatcttaagcaaacacatgtggacattcgcatcgttatcactctctcggaggctctgttttcgttgcccactttgagcgccagtaaatcatcacccctggcagtaagtgtaccatatctggacacacagaaggaaatttgctggagcctggctggggcaggccgttcttcagagcctgctcagtccctgtgctgagttctttctctccagcttagtggggcttgaaagatccatagctgctgaccctggctggggaggtaccagggtggggatgtgataaatccccagccagcacgctggctctgggagccgctttgtagctggccaagtggattatcggtgggaggttgatgttggtgtgtacaaacacacaggccctcactgctaattgtggtaaatcaggcaaccagcctggctctggggcctcccgtggctgtcaccacagccgtttggaagccctacatcctccagcacctgccaacatcctcagaggccattaagccagacagcatctttctaagtgcatttggtccacaaccctgcaattaggttttttaattgtggtgttcagagaaggagaggggtcaggggtaggttgtattgggaaagagtgggcacagaaaggctaacctttcccagatccctagggattgctaggctgcttgtcggtgagctccaggctcagacagagaccttgctttaaaaaaaatagtgtagaatgatgaggaaaacacctgatgtcaattacgccttccacatacacctgcgcacacatgcatacatgcatgtacacacagacagacagacagacagacagacagacacacacacacacacacacacacacacacacacacactcctggatctgcccatggctaagtgtttttggatcatttgctaaacttctgtaccccacagtaagaaactgtaaaggtggaggctcttcctgtatagagatttctaaaaaggaacctttctattccccagaatttggtctgcacagatcctgacaatgatgttttctgtgcctcccaatggatgaaatctaagtgtacatccaccatgctgggcctctcctcctttctctcaattgtccctttgtttgtgttcctgtcctgggctttccaagcttctagtagcctggccatatgtccaggtcccacaagaacacaggctggaagccaatgctcttgcaggcttccgtctcacagaggctgcctcaaagctagggctacctcgaaaccacacgctatggtcaaattgttccagccttttctgaaaggaagacgattcacactgccgatgagctgtgatgtgaagcaagggacagcccacgagaagcagagacttctccagcttagatggagaaccagtagtaacatttattcccccaatcccctttggagacagtaattgaggatcctggcttgactctcaggctccgccatgctctttgatgcttccctcttatctatctgactgtattagttgtcagccttaagctgggacatgcttccactgacggtaccagtaagaactcccatggcaggagaacctggcccaccagtggctttctgtttggctaatgctgtttatgtttggcttttgtcatttgcaggtctcaggagctatggggacctcccaccaggtctttctggtcctcagctgtctcctcacaggtatgtatccacacatgcgtccttgttctcctaactcacagttccagggagccaacgtccatgttctgtgggcctctcacctgcacctgggtccaaaggggggcgagatgaaaccaacaggaacttttgatgcctttcactaaatggcaccaattccatttcaaaacaagagctttctgtcagtggtccgaagggaggaataatctggatattgacatgtctgcacttgcccacttcttcctctctctgggatgggcttacagcaaggaaggagaagatggttttgagcatgttcaaatagagtaaagactcaggcatccttcatcaggtttagggactcaaacctgtaatcccagccacttgggaggctgtagcaggaagatcataaactcgcggtgtgccagggctacatagtgagaccctgtctttaaaaacaaaaagtaaaaagagggctggggagatgctcagtggtagagcgctggcctggcacttggtagatcctttccacgtgtttgtctgttgcagacattactccaaagttaggcaccgatggaaactagagaccattaattaataattaagtcagaacgtgtctcctcttcagacaagggaagctcggctgaaacgtgaagcttagggattagtttcaagcccccactccccgcctgtgttttatttattatttgtgaatttaaacccatgccttcctgctttggcttttggaaatcattaaggagagatggtgtgccagagggtggcagtgaggaaagacgtggggctcctgagtgagcccagatctgctgtgtgctttgttcgggcctctctccctgcctcttctcacatctcctgcccattttttttttaaaccaagggaaacttctgcagggcatatgcatgataaagaacccatatgtgcttgagcccagaccgcactgggatattttatggtcacacataagagtgtgaaatatggaattggaatcagacatcctttatccgtttgagtgtttggaggggtgagtatggggcgtttggtggggctgttgaggccgttggaacacttgctgccctcagcagatgcagtggctgttataatggggggcctttcatgggcatccagaggaacagagtttcacgtagaaatggccgttgttcatataagccgccactgtggctactctcagcgctctggagaagctgtcctttctggctcgccctattcaatggctgtccctttctacagggccgggcctcatctcctgccagctcttattaccctctatcctcccaaacgagaatgagaagattgtgcagctgaattcgtccttttctctgagatgcgttggggagagtgaagtgagctggcagcaccccatgtctgaagaagacgaccccaacgtggaaatcagaagtgaggagaacaacagtggcctctttgtcacagtgctggaagtggttaacgcctccgcagcccacaccggatggtacacttgctactacaaccacactcagacggatgagagtgagatcgaaggcaggcacatttacatctatgtaccaggtgagttgcagggccctcctagaccacgctgcgtcctgccctgcctgcctctgagtcaccgagttaaggggcataaaacacgagggattcataaatgtttattgcagagaaatttgcaaggtagaaaagtctttcccttctttcatctctgtctgtctgtctctgtctgtctctgactgtctctgtctgtctctgactgtctctaactgtctgtctctgtctgtctgtctgtctgtctgtctgtctgtctgtctgtctgtctgtctctcactggaactctcactgaggctggatctaggtggttagcctgccaacccaagctatcctcctgcttccaccttccacagagctaaggatatagatttttttctttttatgtgagtctttgtgattagaaccctggtactcatgcttttaaaacaagtgctcttactcactgggccactccttagctctctgtctgcctgtcagtctttggttcttgagactctcactgtcttagaacttgccattgtagtccaggctggcttctaacttatagcaatcctatggcttcagccttctgggtgctaggattaagggcatggggatgcttaacttgctggttttgtgtttgagataaggtctccttctgtagaccagactggctctgaatttaccattctctgacctcacctcccaagtcacagaattgtgtgcatgtggtacccgactccggtgttttgttttgtttgttgttgttgcttttgagatgagagcttggtatgttgcccaggctaccctcaaactgctacacttaactagtcctgctgtctcagcctcttaaatagcagagactacccacattatgaccagcaaaatacacaaattaaatacagatcatttgcacgttcaaaatcaagaaaaactcatgggaggcttggagatatggttcaggttttgggagcattcgcagctcttgcagaggacccaggtttggttcctaggactcacagagatacatccctctgttagacagttacaggagattagcgccctcttctgtcctccacctgaactgcatacatgtaatgtacctacatacatattcagccagaacacacacacacacacacacacacacacacacacaccaaaaaccaaataaacaaacatggaaattcccctaaatgttaacgaccaaggcaaaaagaattccttccactcttcaagagttaatgcacctttgtaggaaagctggaatggtggtatttaaaatgcatgttgttttaaaagagaaagacttgcagcttgggatctaactcagtgacagagcgctttcccagcaagaggaaggctgtcgattctacccagagaagtggttattgtcaacatgtcagggctttattaattttgaaaagtctttactgtcgaatgtcttttattcagatggtacaaaacaaaaaaagaaatcaaatgtagtcagtcagtgtggttcagtcagtgtgagcaggcacttacatgtgtatcaggtgccatgtcttgtgtgggaggcaggattaacaggcggcaggccttgctttggatactcacagttcactagggtagattccaaatagccactcagtttcagctttcatacaaatgtgcatttactcttgacgagtaggaaggaattctctttgcctttgtcattaacatttagaggagtttccgtggtaatgatatgaccttgtgtctgctgagaggcagatgccaagatgtaggttacatgccttggttttataaggggcaagacctaggaaaggggtgggagggtccccgcatgctcctgctggactccattagatgaatcggtactacactgccttcttgcccatgggcctcaggtgccctcagtcagtgacaggaagcattgctggtgagtgtgattttaggttcagagggctgcagagctaggctctagaccattaagccctctgtggttggagggatgcgctttctctggaatccaggcttagctgaaagctttcgatgcatttggtctgccacccacctcgcctccgctctgagcttttgccgagctggagctgttggtatctgtatgtagcgttggtgagcagctgtacaaagaaggaccctggtgttacctacacaccatacaggtagcattcggtagtcgagaagattagtcttggagagggaagcccaactgaagcatgggaacatgagtctatctgtctgaacctgacccggatgcatacctgtctaaactctgtgtggacagggttcaagtgttcggaactctgaacacaaattagaacggtggggctttatgttgctggggaatggaaaaagctttggagtacaggtgactgccgttcacactctgcctttactgcatgtacacgggtgctgggggtttgaactctggtcctcacacttgcctggcaagcattttcctcctctccagctccgaagtgtctcttttcttacaatagaacagtttgttgtgaaaagggcaggtgtttagaatgtcactttaatgctacacagtaacaatggtggtgaagctaacgatgataatgatactaacagaacactttttcccccctgtatatgtgtataaaaatgaaatgaaactctaatagattcttctctctctctttaaaatcacagacccagacatggcctttgtgcctctcgggatgaccgattccttagtcatcgtggaagaggatgactctgccatcataccttgccgcaccacagatccggagactcaagtaaccttgcacaataacgggaggctggtgcctgcctcctatgacagcaggcagggcttcaacggaaccttcagcgtggggccttacatctgtgaggccaccgtcaaagggaggacgttcaagaccagcgagtttaatgtttatgccttgaaaggtactttcacctctctaagtgagagcaacaggcaaacaagttttttttttaatttgggtgttgcctcttccttctctatacaacgtggctgacctctgtaactataataatacaggcttaaaaaaatactacaggctgaacttgcttctacgtgtaagacagcatgttccctgaaaaatacctcaaggaattctttcttgcataagcctcttactatttggttcctattcttgaatatgcagccctaagaagcaaacacaccccagggggttggaggtctagattaatttcagtaacttaagaatcaagtgatttcagttttgaaggaagactatagttaaagaggctaaaacttcttccctttgatgtgaggggttcgttagcctgacttgcaaagtctcggggaggggggtcctggtggccgaattttaggtggggactttacacggacatggagcagaagcaagaaattgtcacttgcctcttgttacaaacttattttgttctgagctctgggaggtgctacgaataactgggggagggctggagagatggctcagtgtttaagagcactgactgctcttccaaaggtcctgaattcaattcccagaaaccacatggtggctcacaaccatctgtaatgggatttgatgccctctcctggtgtgtctgaagacagcgacagtaacagtgtacttacatacataaaatagataaatcttaaaaaaaattaaaaagaataactgagaggcacagaaaagaagttacagccaggggcacggagactttcagtggcttgaaagagtgcagccacagtcatacagcccaggcatgtggtgttcaggttaaaagagactgagctttaccatcgttgttattttgtatttctgttatatcctaagttgtgtaagactcaaagtccaggctccgtagacggtccggcttttgcctccattacactggtttggacatgattttttcatcatttttaacggccctgattcagctacaggttttactttgagatcccgactgtactgtattttctttgtcatctcatcacagcaacgtcagaactgaatctggagatggacgcacgccagactgtgtataaggcaggagaaacgatcgtggtgacctgtgccgtctttaacaacgaggtcgttgacctgcagtggacttaccctggagaagtggtgggtaccccgggataaggagctcacggaacccccacaacaggacttgtaactctacacaccagaggtgtttctcttggatgggcacatccctgagcttctctgggcctcagcttcccatctgggcaatgggcacatttgactccaggacttttaatttttctcaatcaggcagagtttggcatgaccacaagggacatgctccccttgagaaggcagagacaagcaggaaggttctgtggctagaacacaagcattaaagcattagaaaggcaagaaatgcctggattgtaaatattagccgattgcacagtcatgtatcctcactgtcttgggtcacacgccttggggttgtgaggtgtctgatagtgttgctaagtgtgtgtgttattgtggcctgtagtcacccagctgcacaacagcacaccagacttattccttccatctgactggaactttatataaagccttattcactctgatagctgtagagagtatataggagctgtgtatgaagaatatgtaaatcgaatgcagaaatggtgtttaatactgtgcatgggggcctcatagggaacaaaacacatgtatacaattatgtatggggaacaaatccatgtgtcaattatatatatatatatatgtatatatatatcatgtatgtatttttctccttactattacaaaataacatatagcacacattacatatatttgtgtgtgtgtgtgtgtgtgtgtgtgtgtgtgcactttacttgcatgtgtgcctgaatgacagaacagggtatcagatcccattacagatggttgtgagccactatgtggttgatggggaattgaactcaggacctctggaagagcagccagtgctcttacctactgagactctgtactctggtcgctttgtcattggagaactttgcttctgcttgccatttctctcccacacttttgctggcttttttttttttttgctgcctggccgttcattcacacttttatttgataatggtggatgtgtgggacagcacctttgtcacaacatgctatggaggtcagaagagtactcttctggactcagctctctgcttccacctttaaatgggttccaggggttgaactcaggtctctaagtttgcatggcaggtgcccttgcccactgagccagcttgcagaagcaagtctggtgctctttcattaggcatgatcgttaggtgttgtcaattgactgcatgcatggtgggacactcacagtctagtgtattatattccttgcactatagtgtgacttggtggttttcttcatgctccattacttttaatccctaaaacacaatacttcatttatgaagtgtttttaatttttaatttttaagccgaaacatatgacatttgacccacaattacataaaatgctttaacactttttttccctcccataaaagtgctgaaaacttctctttgaaaatttgtaaactatggagaaacacagggaaaccttcttctcagagcagcacacatctcagattccagacagacaggcagaccctttagaattcttcattaaaagattgttttgcaatactgatggctgactcagagccttgcaggtgctgagcacgggatccatggctaagctactgccttagcccagcgctttaatttctgcttgccttttggtttatcggggctcactctgtagcccaggctggcctagaactcgctacatagctcaagctggcttcatccccaggggagtagtccctcatcagcctcccgtgtgctgggatttgagctgtgagccaccacacttaacgctagtatcgttttaaagcatggctttttaaaaggatctagatttagcgttattttcacttcttgttactgcatgtgaagcaaatataataatggattcattatggcatttacacacacacacacaccacacacacacacacacacacacacacacacacttgattatgttcatctgccactaactctgctctcttgcccccgcccccacccgtgttggcagagtcccttcttttaggctagtccccttctttccttcatgcctttttacgatttgtttgtggtccaattagcttaattaaagtgacttccaggaggatgggcaaagggttggcgggagcatgggtcacttaccagggtctacattactggagagaatgtctcccctagcaactgctggctactgacaaggcctccgagaggacaggggcctcgctggcttctcccccttctgccttcttatttatatttctattctttaggaggttttatgctttagcgcatctttaggctcacagcaaatgtacaaagcacaccaatttcctacgtgatcccggctcccacctatgcttagcctgccaagtgccaggtcttcctcggagcgcaccgtgcttaggacccgatgagcctcctacactcacaaaccctacaccagggctcactctggaaggacctttttttcacacgaccgttttcttgtgtgccactgcagagaaacaaaggtatcaccatgctggaggagatcaaactcccatccatcaaactggtgtacactttgaccgtccccaaggccacggtgaaggacagtggagagtatgaatgtgctgcccgtcaggccactaaagaggtcaaggaaatgaagagagtcaccatttctgtccacggtacccactgttctgttaaatggctgccgttcgagggacttggttgggaggcacaggctgtggttattatttactgggaactcttgctttcacagagaaaggcttcgtcgagattgagcccacctttggccagctggaagctgtcaacttgcacgaagtcagagagttcgtggtggaggtgcaggcctacccgacgcccaggatatcgtggctgaaggacaacttgactctgatagagaatctcaccgagatcaccactgatgtacagaagagtcaggaaacaaggtaaagggggccattcccaagtcactcccgtaacaccagccttctgagcgctgagggagtggcagtaccagagggaccagcacctgagctgagacgtgcttacggtcacattttaatcacagcttcctcacactttaagataacattgcagcctgacgaggtaatacatccatgagtgtttaacgtaaaatgagaagaaaggactaaaaggttctgtcctccagtggaggacagcatactgtttcaagctaaaggtgaaggtaagatgggatgggatgcgcttggaccttgatggtcattatacttcagcagacattatgaactgattccatgtgtgaggtaattcgaatgtaagtctacatgtcaccaaataccattgtttagagtgcgtctgccccaatccaagattccactgagataagactagggtctcgttagatctgactgcagtgatggtgttggtggctctcatctctaaccactgctgctgctttcctgccccctggtaccgttagtcaaccatgggtctcttgtgtcccttgcatactcagcagacactctgccattgggcaccacaatttcccttgaagtttttgagctatgaatagaaattgcgagtcagaagttgctttattttcttattttttatttttttatttttttgagatagggtctccttctgtagccaggctgaccttaaactctcaacaatccccctacctcatagcctctaggattatggctctgagccactgtaccaattaaagtcattattgacatgtttcttgagacagggtttctctgtagccctggctgtcctggaactcactttgtagaccaggctggtctcaaactcagaaatccacctgcctctccctcccaagtgctgggattaaaggcgtgcaccaccatgcctggctattgccatgtttcttgtttcattagtatcactattattgttgttgttattattgatatatcgttttctgggacaggatcttgctatgtagtcatgcctggccttagacttgtaccgctcctcacgcctcagcttgcgagtgctgggagacacagcgtcttcctggcacagctgacatttcacgggtgtctgagcaggagtacaggctgtaataagtagtgctggcaaggcatgcttttcaggggagtggtgtgggaaagctggtcattactgagtttcgagaacccttcagaccttggtctttccgttcgtgggtggatcaggcagcacaaggtgaaaggagaagtcgctttcatggagttaaaaccagtgaacctgaagactttctcggctaaacagatgtaggctatgaatggcctggatcgtttggccaccaacagccagaaacctggtcgtgaagccaatccaatagcaggcagagacaggcaagccagtgtagcctgcttttctacaggtcctgtgcttgtagggaatattgaagcccatgaaatgctttcccacatttaatatcatttgataaatctcagaaagagtgctctgtgtgtgcagttatcgtattttatatgcatggaagcggaggtgtggggatccaataatttctacaattttgttccatccaaaatacttttgtgtattgggatgttttataatgaaatgaaaagtcaaatgtgaaaatattgtatttatacataaacacacacatacatacagcacatgcaggcgcacatacatgtttgtcagaggataatgtgggggagtgagttgttgcattatagcttgttgaagcagggtttccattggcactgctgctgtgctgaacatttcaggctagctgtcccgagagctacgatgcattctcttgcatttcctctcatctcacgacaggagcgctggggttggagatggagatggagatgggtaccactgcatctgacttttttttttttttgcgggttctgggggttgaattcagcccaccagaaagcaccaagttaagtggtctcatttaaaaagtcttttcttattttcattcagaaatgaggtcttgcagggcaatggtaacacacaactttaatcccagcacttggggaggcagaggcaggaggagctctgtcagtttgtggccagcctgttctacagagggaggtccaaaatagccagagatacagtgaatccctgtctttacaaacaaaacaaaacaaacaaaacaccaaaaacaaaacaaaaatcaaacccagaaatgaggtcttgccagaattgttagctacttggttttctattgaggctatgagtgacaccttcaatgtgtggaaactagatcaaattttagaaaagacattgatattgacaagaaagattttttttaagaaataaaatttcaatcataaaatgaagctgcttaaataatcggtggttatttagtctctacttatggaaataaacttcttgtctcttaaggtatcagagcaaattaaagctgatccgggctaaggaagaagacagtggccattacaccattatagttcaaaatgaggatgacgtgaagagttacacgtttgagctgtcaaccctaggtatgtaaaggtcgtgctcgctcacgggtgactgtcccccagaggcacctcggctcttctcttcaaagccttggaggagaagccagaccttggggtagaggctgggtctgacgcatgtcaggaccgtgttgtcgtgcctgaaaattcaggtccatttggaacagtcctcatccaaaaactctgaaatggccccaaatcggaaactttgatttttatcaggggagatgttgagatagtttatgtatgtagcccaggctagcaatgctcttgtctcagctgtagcccaggctagcaatgcccctgcctcagcctcccaagtgctgagattctagacacttgtcaccacatctagttcaaaatctgaaacattttgaatgctcacacgatgttacaagtggaacatcctgacctgacatcttgtgacaggtcagaaaatattcaggcatataaaaatattgtgtaaaattaccgcttggttatgtgtatgaggtgtatgtgagatataaatgaattgcatacttaggctgagtcctttcctaagacacctatctcattaggatctaacttctgaaatctaaaacacttctggagaaaaatatgtgctgaggaaaaattttaaagtaaagtatgtattataaagtttaaattcttattttagtttttaaaatatttaatatttatttagttttgtgtagtttaaattatttactttaaatcaaagtatataaaggtaaactaaaacttgcatatttttcagcttattctttatttttattactattattattatcatcgtcatttggtacttgaatcccatgctttaaaaacaaatcaaggagctagagagagagctcaatggttaagagcacttgctgctcttgcagaggactggggtttggattctgacatccacatggtggtttacaaccatctttaactccagttgcaggggatctgataccctcttctggcctccgcaaacaccagacacgaatgtggtgcctattcatatacgcaagcaaaacacttgcctgcctctaacttatttgactacaaattggtgaaaagatctttaaagtctaatgatggcccccagacgcttgagtgaaggctgctttcatcagatccattagtcaaatcccgaatgcaaagatagctggaggatctcccttgccttccgaatggaaggaccccagcccaggcactcctcacctccctccgtccagatctgagtcatccaggcacaaagcccccaaacacgggcactgagggagctattaactgagtgggtctgtccaggctggagttgttctgttctgtcttccacaaccggtcccttgaggaccgttcctgaaccgacgggacccttccgcggagggatgtccctccacagccagagacaagagctgctctgccctgacttctcctttcctttcccagttcctgcatccattttggatctcgtagatgaccaccatggctctggcgggggacagactgtgaggtgtacagccgaaggcacccctcttccagaaatcgactggatgatctgcaagcatattaagaagtatggaaaccagatgttccctgttcttgtgtggtcgggatgtttcttccatgacataaagggcctcaagtgcagtttatttctttggttgacctctttttgtattcgcgattcttcctcggcccaaggctcatattactcacaaactatacaataggtttctgaaagtggattccatctcttgatgtgtgtgtgcgcgcacgcatgtgtgcatgtcctcaaagggcctttatttttatattttattctccattgtttttcttaaacatttcccattctctcttagaatgctctataatgtgaagacaaaaagaattgtaagaaccactcttgttcatggattttatctgtatatgtatgtatgtatgtatgtatgtatgtatgtatttagcttgcagtcctgttgtgacataatgtctcactcaccgtgtagccagtgctttggctgaagtcaaacgtaccattctcttgctttgctctcccaggcgctggggttgcaggagtgcaccaccagccctgcccagctcacatttctttctttctttctttttttttaaagatttatttatttatttatttatttatttatttacttatttattatatgtaagtacactgtagctgtcttcagacactccacaagagaacatcagatttcattacggatggttgtgagccaccatgtggttgctgggatttgaactcaggaccttcagaagagcagtcttaaccactgagctgtctcaccagctcccagctcacatttcttatttcttaccataaatgttgtctcggtggctagactggcagtgcaaacagagccgagagccgtgcccacgtgactcctcatacccacttgttctttggaagccaggagagggcactggatcccctgaaggtggagtaacaggtggttgtgagcattttagtaggaatgctgggaaccaaatgtgggccctccataagaacagtatgagcgcttcatggccggcccacctctctagcccctcctccaccttcataggcaggcccatgaactgtgcgcccacaccttgctccacggcaactacctgctttcagaaggccttgagtgcgtctctgctgaaagtgcagcttgctattgctctcctcactgagagctgtggagtgacctgggtcctgggatttctaggtgtaatgatttaacccagaagactactgcagccttagggaccccttagaagctcttcctggggttgaagatgaggagggaggatattttcaaaggagtgggagatttgcattgttgaacgtgtttgatgctatctcctgagtttgctcacaggtccaagatttgagataagtagttagattttgtggattttatctgcctcctccacaaaccattaactttggttatccacgtgagattactcctcttgagcaggtgcaaatggattttaatgtgaacaagcaccataaaacgagaactcccaaatctatgcaccataaaacaaggactgccccaccccccaaatatatgtaatgttagcaatgtggaagggtcgttgtgactcctggtaatcagatcttcatttgtgtcacattctctctagatgtaataatgacacttcgtggacagttttggccagcaatgtctcaaatattatcacagagctccctcgccgtggcaggagtaccgtggagggacgagtgtccttcgccaaagtggaagagaccatcgcagttcgatgcctggcaaagaacaacctcagcgttgtggcccgtgagctgaagctggtggctcccagtgagtttctcagtaggcagcacaactccagctcaccagccacgccctgtgttcctcaggtgggacgtggaatcccagacagggctcacagagtggcaaaggtcccaagacagttcagccctgtctggacttgaagcactggtcttcctgccaagccccctttgtttgccctgacccagctgcgtttgcagagctgcaggcagctttgcttgtcatgtagaggatgactaagcctctgtcatctgagcactggggtctagggatagaaagtgaggaaggggcttttgcctcacgatcctcagaacaggtgggtcaggtttgagtcagaaacaaagaaaggaaggaagccgagaaagagagagagagagagagagagacagagacagagacagagacagagacagaccgagagacagacagacagacagacagacagaaggcaaaattcacctttaccatgaaacttatgagatggatatttctacaaataaagttgctcctaacttattgttggtctccatcgtctttattcaaattgtccaaaaggagatccttggagtgtctttggaaagaaagtctttgtcccagggaagaatcacatttagttgcaagggtacaagtgattgagggatgatataggccacccctaaagtgacctgggatccccaacacttccccaccagcagggagataggccctagttcatttctttctgcctcccgtcttattctgccgtccacaaataactgacaaaattctctactgtctctgtcttgccttccagctctgcgatctgaactcacagtggcggccgcagtgttggtgctgttggtgattgtcattgtctctctcatcgtcctggtggtcatttggaagcaggtgagtctttggaaccattagaatgagaacaactgtatccttcggtgtttggttcagagaaggggtttggtaattccatgggtggtgggtcatgacagactttcctgggtccagtcactttggttctgtagtgaagctcagttgccttgaactctgggaattcaccagttacccaccctggtcattacagaaaccacggtatgaaattcgctggagggttatcgagtcaatcagccccgatggacatgagtatatctatgtggaccccatgcagttgccttacgactccagatgggaattcccgagagatggcctcgtgcttggtaagttcttgtgagggtaacctcccaggaccccaatgttacctacatagcttgctacgtacagatctgggacagaattagggacttgaacgccactcacagagctggatatggtagctcacactcttcatctcagcactggggagactgaagatggaggactgtgagttcaagactagcctgggctacatggacatcttcaacatgagctcattggggctgagaaggggaagtcaagggtcaagaagttgtttagcctttgtaaggccccagattctatcccccaaacgaacaaagttagtgcaccgggtatagtagcatacagttggagggcatcagcagacggatcctgagttcactctcatactgggtttcaggccagcctaggctacatgagaccctagagcaaaatgccaaaaggaaagagtcttttcttttttttaatgcacgtgagtacactgtagctcagacacaccagaagagggcatcagatcccattacagatggttgtgagccaccatgccgttgctgggaattgaactcaggacctctggaagagcaatcagtgctcttaacggctgagccatctgtctagcccatagaaagaaagtcttaattgtatcattggaatgattttggcctgacaaaaatattgcaatggaaaaaataaagttcatttttataaccgaagaggactagctgagaagtgagagaactcagtgggctacagtcagtccgttttgaggagtcataaaatacttctttaagtatatgtaatgtaggatggaaaaatatacgctggtgttgtactgcatgcctctaatctcagagacgtagtattgggagtccaaggtcattgttaactatatagagattttgagactagcctgagctatatgagatcctgtctcaaaaccccccaaacaactaccttccgtgtgtgtgtgtgtgtgaacacacacacacacacacacacacacacacacacacacacacactttaaagcaaaacataaaaaggaagggagccctctggggctatgtcacaatcaaggccctcgccaggtgcagtttttggctatcgtctgtctgtctgtctgtctgtctggttccaaagtacagcagagctaggcgcttaacagtcactcaagctgaacctgtgcttctttattgtattgtccaccactgtttcccacacagagcttagggaagttaaaaagcagtaaaataggcagggagggtgggtgggtgggtgtgcgcgagtgctcgctcagaggtggggatggagtagcagagcccctgctatccagcacgttgcctcgtcctcttggcaaggccacattactggaaaagcagcatctttctaggcatggatggcggaggtacatacagaccggaagagcgggcatgtccactctcagtgtctttctgtgcctgggctgccgtgatcagactggcttcctggaaatgcctcccttagaccacagtctctttaagagtggacaacagctttgatttctttgtctctacacacaaagaagggctgtgctggcacgtacacccccccatcccccccccccccaagtccagggaccttggtggcacgtacagcttctggtccaggaaccttcctttatgacaaagaagacgagtccaagtgttcagtagtgcactcctcagaatcagtggcatttggaatacagacgatttccagtggttaaggatttgttaatgcaaaggttgcctctgtgtgcatctgagagacagaagggtagagaaccagggggttgggtagaagccacggaggcaagtgcacaggagcccagggcctggcgggagcccatgttcacaccagggaggactgtgctttcccctctctcatccatgttttcctttccattgcaaatgccatttgacaaaagcaattacactaattcccttccctgtgggctcaattcttttttttggacatgatgacttggaggaataattaggcttactcaacacaggaaaaacacccacccagctgtacaccctcgtgcactggcctctgccagtgaggccgaggggccgggagctggcggtgatggctctgtttgcctacaggtcggattttgggatccggtgcatttgggaaagtggtcgaaggtacagcttatggattaagccggtcccaacctgtaatgaaggtggctgtgaagatgctcaaacgtaagtgtttcttcccagggatactttgaacatggacatactaagtaatttaagagtaaaatcgaatttaatattatattgagattctttggactgtgggttgagacttagccaccctccaaaattaggtttcttttgttcttatccctcattgttaaaaatcagatgctttcatttttggtaagagtttgtttttttgtttttttgtttttaatcttaaagaccagagactctggggctgggaaatggctcaatgggcaaagtgctttctgcgaaaacatggagatctgagctctgatccccccagcatccatctaggaaggcagaagtagtggcattcccctgtagccccaaccccacagggaggcaggatgagacaggtaaatcctggaagctcactggtcagctaggttactcaactcggcaagctctcaggttcactgagagaccctgactcaaaatataagatgtagaaacagttgaagaagatattctgatgtcagcctctggcttccatgtgtatttgtagacaagggcattcacacacacagacacacacacacacagacacacacacactcagcagtctagactgaggagaccatctagtgctcttcctttagactcttggtaaataaatactattgaatcacaaggttccatgtgttcttctgagaaccagaagtagggagttcagttgtactaaaatctggcttacttcaacagccacagccaggtctagtgaaaagcaggctctcatgtctgagctgaagataatgactcacctggggccacatttgaacattgtgaacttgctgggagcctgcaccaagtcaggtaggcgccttgttctggggttcctgggagtttctgggaatcctctttgttgtggaaactttttgttttgttttgttttggtttttcgagacagggtttctttgtgtagccctggctgtcctataactcactttgtagaccaggctggccttgaaccaagaaatccacctgcctctgcctcccgagtgctgggattaaaggcatgcaccaccacgcccggcttattgcaggaacttttgaaccagtctcaggcacagattgccctctctgcacccccaaacatgcctcctgaggataaagctcatacgtggagctcactgggtcccccgactttttggaagttcatgggttcagagaaagaatggcttctttctgttctccatttttatactggactgtttggtacccacaggtcccatttacatcatcacagaatactgcttctatggggatttggtcaactacttgcataagaacagagatagcttcatgagccaacacccagagaagccgaagaaagacctggacatctttggattgaatcctgcagacgagagcacaagaaggtaaacatgagaggagcacgtgtgtccttgtgtcggactcagacatggagaaaagcctgtcctgacaggttccaggcctgcagatcctaggccagcaccagaagccacgaggctgggagcctacctagccatccgcgtcagtgtggatgggtacacactgcaggtgtcttgggctaggtcatcacatggcaaggctgtactgattggtttgaatgacggggtgagggggggtgggatccttctgagagccattctcttctctgtatgtgctttctcaggacatgtcaaaggatgtcattagtgctcatccccaggacgagttgttggtccttgctgaacctgggccagggatattcgcttgtctctactgataaaacttccaggtgtccgtaaagacccctgagagtagacggacctcccatgctcttgagtcacttaatgggctccaaatgggtggtcagtttaatgagtcgcaggaactgtgtgtctgagccacatggccacatggccactgaaccttcaggggacagtgactgccttcctgtcatgaacttttcaacagtttagtgtagcagactaagaatgtttcttgtgtttatgggaatgtagcccccaccctgacttccctgtagctcctggggatgtctctgctccttgtgaggatgtgtagaagacagagaagtaaaacatgaagaatcgggctggagagatggctcagcgattaagagcactgaatgcccttccagaggtcctgagtgcaaatcccagcaactacatggtggctcacaaccatctgtaatgggatccgatgccctcttctcgtgtgtctgaagacagctacagtgtacttacatataataaataaataaataaataaataaataaaaccaggaagaatcatggagactaccttttggggaccccagctggccctaagatgtttcccttctatttagatggtatcgatgtacggactctttagaagtgcttgcttactcctggatagagttctgatgccttccatgtcaccagagtcatcctcccttcccatcacactgggtttgagatgacctgtgcgctcatgtctgattaatgttcatctgtctgtctggaccaccccatgcacagtgtgcccatggggattgtttatgctcatccccaagcccttgatacctctctcagttaatggcacactctaggtacccaaattagcatgtgtttagttctctactgagtgactgcattagaggccacccggggtgaaatttcttcttcttcttttttttttttttttacacagttatgtgattttgtcttttgaaaataacggcgactacatggacatgaagcaagctgataccacacagtatgtccccatgcttgaaaggaaagaggtttctaaatactctgacatccagagatcgctgtacgatcggccagcctcctacaagaagaaatccatgctaggtaaaagtgcccatgctcattctggcaaatatgatctttctgtggtttaacttgctgctcagagggagggaaaccgggatgacaggtagctctgccaagcagtgtgctccctaagtgcacggctgcgcagctgggccaagatagctttttgtagatttgtgctctatgtgtgagaagaataaagacgcagggttgctgatgtagccctatggtatattgcttgcccggtgtatacacagttccttctctggaactgaagaaaaagtatatactattgtaataataataataataataaagacagatataatgtaatcaatttctcagactttaaatgtagtggctttaaataaataattcattctgctatgatggtctttgcttgttaacatgtcttttgttaaaaaaaaaatggaagtggtgataattggtgttttctcaatggccaatctgaaagttggcaatcttacattgtttcctcacattttttgttttgttttgtttttcctgtgagcgccataatcctggcttttagctctcctaatgtacatgttgtgacactaactggagagcagacagtttgaggttgcagtatctgacaagtgttcctgttgacttttgtttgaaagcaaacccccctcctgttttgaaaactgtgctgggatgagttcatttgtaaactccggggtgccaccggtgatgccacaccagatgggccacctcatgccagctctggggtggcgactccagggctcttgcttaaccacacactcgaagtgagcagtatctaggcaggcctgagcttttcctgtgattctggttttggggggggaagggggggaattgaggctctcatcagctgctgcaataatattcagctgccatggagattgttttttgaaaaatcgctaacatgctctgaatgctttcagggttcttaagtgaaaggtacaagccattaaaaagtatgtgctggctttgcaaaacttaagcacgtaataatattttccagttctgtagctccgtccacttcccattgccaaatggttgaacttccaaaccttcttaaagtttacccagtgagagttgttggaacgctgttacctttccactcccaaatggttaaaaatagtttgcactgcttcccaggcagagctggtggacttggcaccagggagagggggcccgagtcatgcttgccctgggtcctgctggcaggcagaccacagttttctggccttcctatagctggctgaaaaaaaaatggctggagctgctcatcaccggcctgcaaatcatcaaaaagtactgagcaccactggcctagattgcctgcctcctgagtgtgtgtgtgcagggcagtggacaggttgcaaggggaggtccatgccccatcctgggcacggcccttgaggatggctgcctgctctgttcaggaggtgatttaactggcaaattagacacaaagcaaaataggaaagaaagcaaacctcagaatcatcatggatggtttcagtgtgtgtgtgtgtgtgtgtgtgtgtgtgtgtgtgtgtgtgtgtgtgtgtatgtgagagagagagagagagactccaagatggctgaggtgatgtgacaaggtcaaaagtgaaatccaaggtcaaccgacaatctgtctgtgagattccgtggagggagtaggtttgactaatcattgtgtgtataattctccccctgccccgcccagtctgtgtttgtgcctgccggatgaatatctcttatctgaaacgcttggaactgaatgtgttttgaatatatttttttcaaattttggaatatttgcatatacataatgagatatcttgggtttgggagccaagtctaagcacaaattcatgcctgtttcatgcacacctcagacacatagctgacagtaattttatacaatatttttttagtgtgcttgtgttttgactgtgatctgtcacatgaagtctggcatgaggatacttttaccagcgtgctggtgctaaataagttttggatgtttgaagcatttcggagtcaggattttgggtctgggatgctcaacctgtgtatatttcttttggaagaaagaactattattttgttcctttctatttttatagtactagggcatgaaacgtgtgcctcgtgcctcctgggaaaatgctctaccactgagccacacccacagcctcctttgtatacttttttgtacctagtaaagtctaaaaattatgacaaaaatgtgttcaaaagagatctttgggcaagcttctgcaacctgccagacaaggggatggctgggtactgggacgccccccccaccccacttttacctaacaccaacatatttggttccttcccacagactcagaagtcaaaaacctcctttcggacgatgactccgagggtctgactttgctggatctattgagcttcacctatcaagttgctcgaggaatggaatttttggcttcgaaaaatgtaagttcaaggcccagagacctcttcagacccagccatgccttcagagggaggggcatgggaggaaattggaggaggaaggtctaagagccagagtatcagctgctcagtttaacccgcctctctcacttcccctaataggctgggagtgtgactcactgggagtctgcctttctccaggaggagtcagggaggggagggaaagggcttcctgccagggcacttttaagtgcccatcatggactgggtggtcttgcaggagtgctgcaactgggccttggctggagccattctgaagtgatttcttttcttcccacgtagtgtgtccaccgggacctggctgcccgcaacgtcctcctggcgcaaggaaaaattgtgaagatctgtgattttggcctggccagagacatcatgcacgattccaactacgtgtcaaaaggcagtgtatgttcccgccgtcctcgatccttctttccccatccctttaatctcagaagttctgttatttcttaattcaggagccagttatcagctggttccagaggtctcatagggaaagcttaggtataacagtcagacagcctggtatcagctccaccctatactagggttgctgtttggtgaagtctcttgtctatttcatgcctcagtttctctgtttgtagcttcatccgtttcctaaattactacaagggaatgatttaggtaattcacacaaagtgccgtagacagtgctggacatatagaaacatctatcaggatctggatagatggctcactgtcacatgctggtcttccagaggatctgggtacaatttccagccctcataaggcagctcacaaccacctgtaactacaggtctagggatctgatgccatcttttggcttccgatccatgtagcatacagacattgcaggcaaaacacccatatgtgcaaaattaaaaattaaaaaaaaacaattagacacatgcagtgttatttcctagtaaatcaagtgtgtacatgaatatacaagtgttcatttccaggggagagctctagtttttaaacctctcaccagatttccaacagaccagtttaaccttgagaacatcaagactgcttgaatagatagaacatcaccgtttctttggtgatagtttcattgtctacttgatcctccctcttccatcccttcagcctgtaagcccaggagtcgctgaggacacatctgtcacccattggtgcaattatatgtccctctgttccactgatgtaagacagcttactgggctgcagcctctgcttagaggacagtaatctctgtccgtgctctgtgccccggactcgggctcaatgactgtagccgtggctcctcccaggcaccccgaacaagttgctaaacttgggtggagatgatttcttacctaaggttatgaatgtctactatttcttcgtagtctgggggaaggggtgtgtgtgtgtggaaggatgctaacatgaagggcgctgtgttatatatcttcccagacttagtatttcacctgctgtttggaccacctttgcaaaagagacgcgtttgagtgtcttgtctttcggtggtagaaaaccaaacttatttcttactgcttggaagctgacactggtttccaggatgctgtatctatctattcttagttttgttcctagggtggcctgaaaactggtctggtcgaaggccacactttattggtaaattgaaggttgaatatgcttagcatatcattcctttggaagctatgagaagtggcgttgaccactccttgtctgttattattaagaatctacacagtggggctaaagagagagctctgagagtgacgtgtttgctgtgtaagcaagggcacctgagtttgatgtccagaaagcccgacatagtggccagtgcttgtaacctctgtgctggggagtcagggacagacccctcgagctccttggctagatattctagctgaattggtgagtcccaggccaggagagagcctttgacctccacatgcacacacactcatgcaacaagtacttgcatacacacgggcatacacacacatacacacaacctacctagttgctggtgaacagtaaacccatgagagacagaatgctggcaagatctttaatgcattattcccagcccaaggagaacccctttctgtttctccagacatcagagcgtagcccgtgggttcatttcctctctcctttcccacagactttcctgcctgtgaagtggatggcacccgagagcatcttcgacaacctctacaccacgctgagtgacgtctggtcctatggcattctgctctgggaaatcttttcccttggtaagagctcaacggctactgtggctcattctgaatggcactagaagggacatgagtctgtcccagttccagggggacacatgcagtgtcaaccagtcacactgaagcctcactccacaggtttacccctaccatgtctgacataggctgagtagatccagtcagggtctctgtgggctgcttcctcacccctggctactggcactctggttatgcgggagtcacttgcccccgtgggaagtgtttcccatggcatctgccttttcattttgaccttgattagagagatcaccaatagttcctctcccttacttgatgatgaatgatgcccaggtgaaaggtgatgtggcagggaacccgaggggtgtatgtaactccacatctcaaagagaaaaaaaccgttcttaacattcggtcacttgtcattagggcctgagcaaatcaggtgcctgctgccaagggagggttgtaagggaatagtgaggtttgactggactttggggatatacagattacacacttagaggtaaaccctgtaagctgtagtgtgggttcagagacaagacaaaggagacttggagtcgttttggaaacttcagagagggaattgaacttgacttggccttggccatcccacacactgctaccccttcagttctcctttttctgaggccctgcatgcccttaaaacatcagactatggactgccaggtcctagctttgccttgggctgtgatttgtgaacacttctgaagatgatgttctttagtggcgtagaacacctctccgcctcgttcgtgtgtttgcatttagatgtggttgctagaaacagcattcagtgcgttagtgaattttgtgctaaagttgcccaagacgcttggatttagtcacccaagaccgctatggcaagtctgaaaagtcctctggagtcaaggagatgaaaatatacagattctttgaaagaatcaggccctcaggggttcaggatcaaaggtgtgtggtacaaggaaaaaccctctgtcatcgggttatctctggctcgtaggtggcacaccctatcctggcatgatggtcgattctactttctacaataagatcaagagtggataccggatggccaaacctgaccatgccaccagtgaagtgtgagcttcctcctcacccacgggcccatgtccacacttgggggggggtgtctgtggggtggctgccgtctacgggcaggcccacactcactctgagctctgcctctgcagctatgagatcatggtgcagtgctggaacagtgagcccgagaagagaccctccttctaccacctcagcgagatagtggagaacctgttgccgggacaatacaagaaggttggttcgagcctgtgacagtgggcaggaggaggcgggaaggaggagagactagtgagcagttatgccaacaagcagagctgctctgagctgtttgaaaggaacgctttcaaaggaggacacggattgtgtgatcttgtgaccagggctttggggagtgctctataggaccccagtagcactgatgaatgagagcccctccctgcctttccacagggctctctttcatcttaggtgtgagacacctgtaggcacttcattctccagacatctgagtatctgaagctaccaagcagttagaactctcaggacatctgaggccattaaattgctcatttgaatacacttaaatccatttgaaactggtttttaccagctgactggaggggacaatcccagctgttatctgtgactccagctggttttcagtggcacagaaagcattgttcaaagggacaaatgtaatttcacgggacctacgcaggagccgtaaatgaatgtgacaattttccgccgaggccttgagaggggaagccgcacactcccgtgtgatgaatctcatctcagactaggcaccgcagaccgactcggttctcttccctcttgagaggcaacatcagtgatttgccctagagcctctcatcatttgagctgaaagttcagtgtgtcagttttggtccctcagcaccggtttctcctcacattcgtgatgctgggatcgtgtaggggtaatttacctaggtcagtggaaggttctctgttggtgggaagaggaagacactactgctaaaactagttgtctgattctgtctgtttcggccggtgccgcatacacagacggcgaaaatctacgtggtgtgttgactagggtgtgtgcctcagaggggcatagctaggtaatttgtttttgtttgtttgtttgtttgtttgttttttgagacagggtttttctgtgtagccctggctgtcctggaactcacactgtagagcaggctggcctcaaactcatagatctagagatctgccagcctctgcctttgaagtgctgggattaaagatgttcatcatgatgcccaatttacgtttaggcttttttttttctttttgaatctagcctccatacagacttccggtatggatatatagcccccctccccccatcagcataacctcatcactattgattgatttattgattgatttgttgttgctttcttgctgatggccactttgactgggtgagtggcttttcttctttctccagtggctaaggatattgaatgctttttaaaggatttattgaatatttacatttattcttttgaaagctaaatagtcagtttattagccaatttattgactgagtatttgtgtgagtgtgtttgctgctctttatatagcctgcatactaatccattgtctgatgtatatttatatatgtggcagagctttccccccaattctttaccttctcttttcacttttgtgactgttcccaaaaaacaaaccacaaaagctttattatttctttcctcttttattattttattgttttgtcttgtgggtttttttttgttgttgttgttgttgtttgagtttttttgagacagggtctcactttgtgtctctggctgacctggaacttgctaggtagaactcatagagttcttccttcctcttcctccctagtattagaatccaccacacctggatatatatttactgttttacacaaggtctcactatgtaactgtggctggcctggaactctctaagtagacctagctgacctcagcaaggttctgcatgcctctacttcctggattgaaggcatgtgtcaccacacccagctttacattccatttgatcctatttgtcattattttatgtgtgtgagacaaggtctcactatgtagccctggctgtcttggaactcgcaaagatcctcctgtctttgagtgttgggattaatggcaaacatcacttgcccagacccacttgctagtccttgatcatttcctgtgcttttggagtctgactcagaaaggtcttgtctatgtctacatcttgaaatttttttctactaagtctcaaagctttaagtctttcattcaggactttgattcattttgaactgagttctgttcttctagttttccaagttgttaaataggctgtcttctctccagcgtcagcttggcctccctatgtcaaataggtggctatatctgtgtgcttatttctggatcgtctatcttgttccaattgatacatttatttatagttatatagttatagataaactagttatatatatgatatatatatataggctctattatatagtttgaggtcaggtattatgagtctggggattataatatttcaaacattgctctagctatttggggtctttttttatatgaattttagaattgcatttttagttctgtaaaaaaatgttgaaatttgttggggattgtgttgaagccaggcttagaaaggcaagaaccatgtttcttctaaatatagaaactaatttaaaattatgtgtgtatacatatatacacatgtgtgcacttatttatctaaatactaattttatttttaaattttaacttatgggtgtatgagcatatgactgcttgtatatatatatatatatatatatatatatatatatatatatatatatatcacgtgtgtgtgtgtgtgtgtgtgtgtgtctgtggaggccagaagtgggtgtggaaatttttagaactggaataatataaggttgtgagccacctaatgtggatgctgggaactgaacttgtgtcctctgcaagagcaacaaatgctcttaaccactgagccatctcaccagtctctatatgtaaatgtatacctgcacatgcgcacacctaaacatatgtgtatgcgtaggtcaggaagcaagaaaggggatcgtgagaagggaggaagagagcttaaaggttggggtggagagagtcatgaaatatatgtggcaaattacatgttctaaaagtctgcatttattttacagtttgtcagtaacatctgattaattgtgttaaatgaatactttcagagttatgaaaagattcacctggacttcctaaagagtgaccatccggccgtggcacgcatgcgggtggactctgataatgcgtacatcggtgtcacttacaaaaatgaagaggataagctgaaggactgggaaggtggcctggacgaacagagactgagcgctgacagtggctacatcatccccctgccagacattgaccctgttccagaggaggaagacctgggcaagaggaacagacacaggtaactacagccaccttcctcgtgctagcctgcaggggaggactcagggagactgaggccaccagggatgtaaactgtgcgtgggcaacaggtgcatcattccagggtaggtcacaaaggtttgaaaatacctcccatgtgattctgaggtgtcctcttactcctggtgagcgcttcgtttggtcaccaaagctggtgatgaaaagctccactctgagctcatttttttgatttatttatttattatatgtaagtacactgtagctgtcctctgacatcccagaagtgggcatcagacctcattatggatggttgtgagccatcatgtggttgctgggatttgaactcaagaccttcggaagagcagtcagcgctcttaaccactgagccatctctccagccccactctgagctctttttttttaaaaaattaggtattttcctcatttacatttccaatgctatcccaaaagtcccccataccccccccccactctgagctcttaaacagccatggagcaaggaaaaccttgagagaggcggggttgggatatgaggtgctccatcaacagcctttagccttgcatgcggtgcagaactagctggggaggactttcaaactgctgattcacaggcctctcaccctgtcagtctgtctgtccctccttcctctggtgggctgccttctacttctgttttgtgtgacgcatagggaagccacctcacaaaggggaaggagtcgggggttctacccacctgcagatgatcgtgaatttcaaagactcagatggacaaggcacatggtgacccaaggcagaatatggaaaagccagcaagaatctagagaagggaggagaggtggggattttgggcaggctggtgattttagggatagtaacactaacacctaacacttttgttttaaaaatgtttagtacacagtagcagtgagtacacctcccaattagtgggtacaggggttgacatttgccccattctctttatccagattggtgtcacataaatcatcatgactacagacacacacacacacacacacacacacacacacacacaccttatttctcacccagtgactgaaagctaagtagaaaacaccaagataattcattcctagtattctgcgacactctttcctaagaatacgatcattcatgctgtgtctatcatgaccacacggaagagagtgaactgttaaagaaaattagagttggaggtatagaattcatgttggccatatctgaggccataggttcacatccctgtactgaaagaaaaaagagaagaagaaaaggaagccaacaaccggtctcagattcatttcatacctgggctttattcaaattcagttgaataataactgctaatttattgagctctttatatgtttatagttatcagattattatcgtatttaatcatctcagagatctttatttttatttttattatgtatattttacttttgagattatatttatgtgtgtgtgtacagatctgtacacctaagtatgtgactgcaaccggcttagactgtatgatactcgtatgtgtacgttttcggggctgaccatttggtattggatagccaatttggtgtattcgtccctggggaaggccctttttctggttctcaaccttccttcgttatctgtcgctcttggtctagaaaagaggctgcctgagctccttgcttacccattaccgtgcctattggtgccgttctggtgcaggtcttgcgggcaaggcttctatgccttgtgtaaatggtaaactgaagacttttctcttctgggcctttagacccagaggggcggggtgaacaagaggcaggggcctggcaggaagtgaaggaagtgtgggatcccatccttctgcttcctaaggttttttttttcccttctctctcagtaccttttgattggctgttgcttgttctctcccctgataggctgaggagggaaagtagaaactcttactcttgttagccacgcccacaaaagacccctggcaggaaaggcagcaaactgacctgcgcagttggccctgttttggttttgtgttggctctgtgcagcaatggccagtgagtggctggctggctcagccgctcactggccatgctcggccactcatgcttcaacaggaaaggaccttgtgcatgaggaaagagtcccgctgcttcaggcagccaccctggaaatgcagccccgtaggcagtctgtccatgaccttagcctttgcttttcaatcccatcagctcacagacttcggaagagagtgccatcgagacaggttccagtagttccaccttcatcaagagagaggacgagaccatcgaggacatcgacatgatggatgacattggtatagattcctcggacctggtggaggacagcttcctgtaactgacacgctccgggtatcatcttctccgggagcctcctcgggataaccttaagaaaaccacttcattgcaatgcaaaagttgagaagaggacttgggtgatgtggagagagaaagttcccgaggccgagggccttggtaagcctgtgtggatgactgggatacttggattgaactttatccgtgttgcctcttgcaacgcgtcagtagcatctcagcggcgtgtgcggtttggaaatggatggacaagagagtgactggccacagaagacgggctttgtgtttccagggcatgggtgagagtcccacacgcgccaacttgtactgcagacaactccagcattgtaattatgtaaataactcttaaccgaggatgggtttagatctgtgttaactctcctctccggacctctgaagagaccactcagtccacccgtgtgcttccttccttcttggaatccggtaccagctgctgttgaattttctcatgaagtacatgcaaaaccactttgaactttggaaggtactggaaccgtcgtgttttactgtcttgtaagtgttaaagaggcaaaaagataaaaactaaccaaccgtgagtagtaggtttgggtcttttagggcacccaagaattcctctgtatcttgtaatctgtacttataacactactactgtttaacaagaatgctaaatatgtaatccgtaacatgatttctttacagagaaagcacaattaaaacaaaacccttactaagaaggtgacaagtttggcagtttttgacatttatattaagtaacacgtttctcaataaagtataataggtttagcggattaaagttagcaaacactagagagcagagtgtaagtagttatccagaaagtcaaacctttttgttttgttctaagcagtctccctaatccaaggcactaggaacagttaatgacctctgaagtactgggataagcaaagcagaaacccggtgggtgtcctaagtgttctcagtagaaaggcgtacgcctgagcccagtgtgactcctcacgctgtgtgcgaccttctggaagagactcattcacaaaaaggactcagatgggcagaatgtccatcagatgggactcagatgtctctcctgaccagtgatggcttggatggatcccgcccatacctacttttaaagtctgtgacttttaaggatgcttcaacatcagcaccttactttttctctcttgtctcagacgagaaagaactgcaaaccctgagaccacaatggtgctgttgaatgaaggctatgtgggcatcagcttggctcttcccttcccaccattaactacagctacagttactagcctcaatggtgtcagacctttgccccagagatttggaattacaaggtctgacgggagcaggaagctatatatatgaactgcctggtgctcttgaatagtcagtgttcagaaacactggcttgggttactgttgggggagggcaactttgaaatttggaacggggctagaagtcaaccatgcaggaaggctactgtttaagttcttggcttcatgtcaataacatgtcaatgccacgtatgcagctattcctacccttgatttaagtttccaggcttggctgaggctgagaaagcaaacatcttgacttgggaacatcttcccattctagtcaacgtgggtaccacttccccctggatgggagaacctgagcttgctcgcctcaaagtgtgtccgggaatgatgcaagtctgtgtgtcaggtctttgtgcaaccagctccatattcggtggagaagattaaaaaaaaagttttctgaatttggggcctttaggtggtaggctatcaggagcatccgaactgtcaaagtggttagtgtgagttcattggcattctctgccatgtgtctaattgctgactctgtatgaatgaaacatgggctatgattactgcaatcactgtattgcttctagcaggtgacgctttggaaggcacagaagcaataacaaggtacttgactacctactggcataatctcaatgcaaaccccaactttcccttttcacagtaagtgtgaagactgagccagattggccaattgaaaaacaaaaacctgactagagtctttcgagccaattagacttgaactacatccgtctttctagactcgtggctggagcagtctgtttaccactcatttgcacagcctctgtttgttgcttctttttattctgatgtcgctttgggccttgcatgacaccatgaagttggatgatacttctcagaccagcagtttcccatctttagctgtacccacctctgagattcaatgggaatacgttcacttttgttttttgagacagggtctttctacgcagccctggctgccctggaactcactgtgtaaaccaggctagccttgaactctcagagatccactgtctctgtacccccagtgctgggattacaggcatgcaccaccacactcagcagggatacatttttatttttaaacagtgttttgactgtatcctgatttgttttctttctggcctcctgcagagtccctggaagaaaatttaccaatctttcctgctttctatttttatgatgacaatcaaagcttgcccgaggaacacaatttgtgacttttaaaaaaatgatcaatgatgtccttaaaaaaatgtggtctgccaacctgtacaaaatggtcctatatttgtgaagagggacgtaagataaaacgatgttatacatcgatatgtatatatctgttgctatgtagacttggagaatactgccaaaatgtgtatgacaagctgtatcactgcctttgtttatattttttttaactgtgatattccccacaggcacgttaactgttgcacttttgaatgtccaaaatttatattttagaagtaataaagagaaaaatactgacatgttcccaacatggtggtgtggtaagtgtgtgagagcgacttactccataggaagggtcttccaatacaagatggcttccagatacccctgttcatgttttgttttaaaaagtgtaaatggagatctttatatttcaataaatgatttattatatatgacttaacgtta

SEQ ID NO: 17 - DNA, 2962 bp, Homo sapiens
gcagtgtcactaggccggctgggggccctgggtacgctgtagaccagaccgcgacaggccagaacacgggcggcggcttcgggccgggagacccgcgcagccctcggggcatctcagtgcctcactccccaccccctcccccgggtcgggggaggcggcgcgtccggcggagggttgaggggagcggggcaggcctggagcgccatgagcagcccggatgcgggatacgccagtgacgaccagagccagacccagagcgcgctgcccgcggtgatggccgggctgggcccctgcccctgggccgagtcgctgagccccatcggggacatgaaggtgaagggcgaggcgccggcgaacagcggagcaccggccggggccgcgggccgagccaagggcgagtcccgtatccggcggccgatgaacgctttcatggtgtgggctaaggacgagcgcaagcggctggcgcagcagaatccagacctgcacaacgccgagttgagcaagatgctgggtgagtccgagtcgcagacccaggcggccgggcgcgctggcgcgaatcgctaggccgatttcttaaaccccaaactgttctttgcgagcctgacgcccaaaaccaggggtgtgtagcggccacgtcctttcttaaggctctgggttcccttcccgcttcccgccctccgaccctccaaagcagctttccgccttgctctccggctcccggattccccaggtggccgggggcgcgggtccaacggctctgggaaggcgacttcccggcacctccgggcggcgcgagagcacccttggccctgaactgggccggttgtgtccatccctcgaccccttccctagttaggtgtccttttctgtttttcgaacgaccgggtgatgggtgagcggaaagccgcttccaggagaccaaaagaaaggggtgcctttagaggacgggtgttccccaagggctcggactcaggagtcccagatctccctctttaacttcaccccggttgcgcaattcaaagtctgaggggggaggtgcgtccaggtggggccaggtggggcctggagcgggagcgcagccgataagccctgcgcccctctcccccttccttccactgtgcaggcaagtcgtggaaggcgctgacgctggcggagaagcggcccttcgtggaggaggcagagcggctgcgcgtgcagcacatgcaggaccaccccaactacaagtaccggccgcggcggcgcaagcaggtgaagcggctgaagcgggtggagggcggcttcctgcacggcctggctgagccgcaggcggccgcgctgggccccgagggcggccgcgtggccatggacggcctgggcctccagttccccgagcagggcttccccgccggcccgccgctgctgcctccgcacatgggcggccactaccgcgactgccagagtctgggcgcgcctccgctcgacggctacccgttgcccacgcccgacacgtccccgctggacggcgtggaccccgacccggctttcttcgccgccccgatgcccggggactgcccggcggccggcacctacagctacgcgcaggtctcggactacgctggccccccggagcctcccgccggtcccatgcacccccgactcggcccagagcccgcgggtccctcgattccgggcctcctggcgccacccagcgcccttcacgtgtactacggcgcgatgggctcgcccggggcgggcggcgggcgcggcttccagatgcagccgcaacaccagcaccagcaccagcaccagcaccaccccccgggccccggacagccgtcgccccctccggaggcactgccctgccgggacggcacggaccccagtcagcccgccgagctcctcggggaggtggaccgcacggaatttgaacagtatctgcacttcgtgtgcaagcctgagatgggcctcccctaccaggggcatgactccggtgtgaatctccccgacagccacggggccatttcctcggtggtgtccgacgccagctccgcggtatattactgcaactatcctgacgtgtgacaggtccctgatccgccccagcctgcaggccagaagcagtgttacacacttcctggaggagctaaggaaatcctcagactcctgggtttttgttgttgctgttgttgttttttaaaaggtgtgttggcatataatttatggtaatttattttgtctgccacttgaacagtttgggggggtgaggtttcatttaaaatttgttcagagatttgtttcccatagttggattgtcaaaaccctatttccaagttcaagttaactagctttgaatgtgtcccaaaacagcttcctccatttcctgaaagtttattgatcaaagaaatgttgtcctgggtgtgttttttcaatcttctaaaaaataaaatctggaatcctgcttttttgctctactagtacctctgtcacactagtcttatcaaaaaccagttcttaagatcaatgttaagtttattagttaatgtaaatttctcatcctcgaaaagggtgaacataaatgcctttaaggagtatatctaaaaataaacattaggatatctaagtttgatgtaattgtttcaggaaggaaaaaagaaaagcattctggaatgagcctacttcaagtaatcttagtttctaaaactaacagttaatattttcaattccagtatatcactttaagtagaaggggatgtccaagtaattttggttttctaactgttgaatcataagcttgacctgcccccagaggctttttggatgtttttatctgtgttttgccatctctttacactcctcgacattcagtttaccttaatcttcacatttttacaccttgggaagtggcaagcatcgctgggtttaagataaaggagtcacaaaaactaatcaaaataaaatttgcattatgacaacttttaataca

SEQ ID NO: 18 - DNA, 3955 bp, Pan troglodytes
cacatctgtgcagaaaaggccccgcggcccaggggcgcccgcagtgtcactaggccggctgggggccctgggtacgctgtagaccagaccgcgacaggccagaacacgggcggcggcttcgggccgggagaccagcgcagccctcggggcatctcagtgcctcactccccaccccctcccccgggtcgggggaggcggcgcgtccggcggagggttgaggggagcggggcaggcctggagcgccatgagcagcccggatgcgggatacgccagtgacgaccagagccagacccagagcgcgctgcccgcggtgatggccgggctgggcccctgcccctgggccgagtcgctgagccccatcggggacatgaaggtgaagggcgaggcgccggcgaacagcggagcgccggccggggccgcgggccgagccaagggcgagtcccgtatccggcggccgatgaacgctttcatggtgtgggctaaggacgagcgcaagcggctggcgcagcagaatccagacctgcacaacgccgagttgagcaagatgctgggtgagtccgagtcggagacccaggcggccgggcgcgctggcgcgaatcgctaggccgatttcttaaatcccaaacagtgttctttgcgagcctgacgcccaagaccaggggtgtgtagcggccacgtcctttcttaaggctctgggttcccttcccgcttcccgctctccgaccctccaaagcagctttccgccttgctctcccgctcccggattccccaggtggccgggggcgcgggtccaacggctctgggaaggcgacttcctggcacctccgggcggcgcgagagtacccttggccctgaactgggccggttgtgtccatccctcgaccccttccctagctaggtgtccttatctgtttttcgaacgaccgggtgatgggtgagcggaaagccgcttccaggagaccaaaagaaaggggtgcctttagaggagtgttccccaagggctcggactcaggagtcccagacctccctctttaacttcaccccggttgcgcaattcaaggtctgaggggagaggtgcgtccgggtggggccaggtggggcctggagcgggagcgcagccgataagccctgcgcccctctcctccttccttccactgtgcaggcaaatcgtggaaggcgctgacgctggcggagaagcggcccttcgtggaggaggcagagcggctgcgcgtgcagcacatgcaggaccaccccaactacaagtaccggccgcggcggcgcaagcaggtgaagcggctgaagcgggtggagggcggcttcctgcacggcctggctgagccgcaggcggccgcgctgggccccgagggcggccgcgtggctatggacggcctgggcctccagttccccgagcagggtttccccgccggcccgccgctgctgcctccgcacatgggcggccactaccgcgactgccagagtctgggcgcgcctccgctcgacggctacccgttgcccacgcccgacacgtccccgctggacggcgtggaccccgacccggctttcttcgccgccccgatgcccggggactgcccggcggccggcacctacagctacgcgcaggtctcggactacgctggccccccggagcctcccgcgggtcccatgcacccccgactcggcccagagcccgcgggtccctcgattccgggcctcctggcgccacccagcgcccttcacatgtactacggcgcgatgggctcgcccggggcgggcggcgggcgcggcttccagatgcagccgcaacaccagcaccagcaccagcaccagcaccagcaccaccccccgggccccggacagccgtcgccccctccggaggcactgccctgccgggacggcacggaccccagtcagcccgccgagctcctcggggaggtggaccgcacggaatttgaacagtatctgcacttcgtgtgcaagcctgagatgggcctctcctaccaggggcatgactccggtgtgaatctccccgacagccacggggccatttcctcggtggtgtccgacgccagctccgcggtatattactgcaactatcctgacgtgtgacaggtccctgatccgccccagcctgcaggccagaagcagtgttacacacttcctggaggagctaaggaaatcctcagactcctgggtttttgttgttgctgttgttgttttttaaaaggtgtgttggcatataatttatggtaatttattttgtctgccacttgaacagtttggggggggtgaggtttcatataaaatttgttcagagatttgtttcccatagttggattgtcaaaaccctatttccaagttcaagttaactagctttgaatgtgtcccaaaacagcttcctccatttcctgaaagtttattgatcaaagaaatgttgtcctgggtgtgttttttcaatcttctaaaaaataaaatctggaatcctgcttttttactctactagtacctctgtcacactagtcacactagtctcaaaaaccagttcttaagatcaatgttaagtttattagttaatgtaaatttctcatcctcgaaaagggtgaacataaatgcctttaaggagtgtatctaaaaataaacattaggatatctaagtttgatgtaattgtttcaggaaggaaaaaagaaaagcattctggaatgagcctacttcaagtaatcttagtttctaaaactaacggctaatattttcaattccagtatatcactttaagtagaaggggatgtccaagtaattgtggttttctaactgttgaatcataagcttgacctgcccacagaggcttttcggatgttgttatctgtgttttgccatctctttacactcctcaacattcagtttaccttaatcttcacatttttacaccttgggaagtggcaagcgtcgcggggtttaagataaaggagtcacagaaactaatcaaaataaaatttgcattatgacaacttttaatacactttagcattttgattattatttttttttgcttttagatttaatacatatacggacgattgcacagacataggggagaatccatgaatggtttgtgtgtagtgtccctatctatcaccatcattactttatcaagaagaaacagttacagggttgtaagtaaaagatggggatcagcccctgtaatctgccatactaattgctgtggcacgtctcaccacatttgagattgagacaaatggaaacaggtgacttataatgggcatttcctgtgccagatgtttgttcaatgccattctaaacagtgtgagcctcaacaaacctgcaggtttaggtgctatttttcccattttgtgagaaaaggaggcaccaggccttcccctgctatgtatatgaaggcttgtattacaagttcttttgacatatttctcacctgttttcctctgggccagtatgttcatgggcactgggagaatttacattctgttaagaaaccatataattatccttagcagcaagtgctatagaaaaaggaaaggcttggaggatagcttccagcatttacatgggagagatgtctcagctgaaatgattggctggattctcttgaaaaagggcatggaatatgttttttagaagggattcctggaatgtgaaggatagacagtttcagtgaggaaaggtaagtttattctgttaggcataacaggctgcctttaaaaaggttaaattctttctcttagctcagatgggttgtttctgcttccagcctgagctccttctgcagggtgtcccaagagttcccagtagataaagtggacagaagggctacgagcccaagtccagggctgtgctcagattacacttggcattttcatcatagtcagcccaagaagactcagttacccttggctgccatctcttaacgatattaagataagt

SEQ ID NO: 19 - DNA, 6461 bp, Mus musculus
aagttaatcttggggtcagacgttctcagctctcacgggagaggctagcaaagcgaagattgcagggtctggcctgaatgttctgggccaccgtgggggccggtgatcactgtctttcttgccactctttcctctcaagttcccgaatttccatctccacctccgacccactggggactgaccagggactggaaagagcgcgaaaggtataaaggggagaagagactgcgccttttggtgcccgggtgaaaggtgccaatcgaccgcatcgctctgcgtggccctacctgggaggtgcggagcccggggcacgacgctcggtgttctcagaggcagactctgaggcacgtattttagaccgtccagtggtactattgtctctgttatcttagagtccgccgggggctgtctccgtgatgacagcccacgctcccttttccgccctcatgaacttgctctccacagaccacggatctgcttgagtgcccacggatcctgtgcaattggacttgaatgtcctttaacaggccttggccatcagaacaccaaaaccataaaaccttcgagaaatcaaccactcactctgaggctcgctgtagaagagtggcttagactctcccacttcggagtcccagttgatcaccaacccgcttgctacaggccccaaatggttacgggcacagcttctagttacattagacgcttccttgccccagcctttcgagcctcaggtctgctttggggatgtggcttaggcagtagccacctagaaatcctgcactgtttgagtgtgataccgctgcggactacagcagacaggcgtgccaggcttctagtccagatacccacccccaccccagtaaatctctagtgttgagggaagcaaggcttgcaggaagccgctccggatgtttgcttctttacttgtggcatttgtggctggctttgataacgtcgtgagctcggcttccaacacccatttagtgaagaaactgaaatatggcccactcacactgctggcgggtctgaagtgcggttggccccaacactcctcccaaagtatctatcaagagaatggtcagcagaagttagatctaggtaagaggacgggaagggggactagtcttgggaaagcgccacatttcctggtagatttgttaagtaaagtgctatctagggactccaggggaggctgttttaaggaacggggaagagcccaaaagtggtcgcttggactcctactgtgtttgtgctttccctcagaaagatcagttgttaatcttcagggatgcttgtaaataacgctgcctccccatccccgggctttctttctaaccactttctcagttccttttatggagctcgaacagaactaggtacccaggtaaaatggtgtaaatacattttctagacctacacctgaattatatttctgttgtctcttagtttttagagaaatcaaccaagacagggaagacagagaaaatgcattctggacccgctactgttttcaatcgtcatttcaaacaaaacccgtagtttatttaaaaaaaaaaaaaacacggaaagagaaaattaggccctgagatctttgaaaagatgcccattactagatacaaaagagaagagtcactgtggaggtgagggactgcgtccctgcttctgagaggcaggagagctacatggggagactgtctcaaaactaacaacagaagagatagaattttttttttcttaaagagcacctggctagagaatcgatttgtaaaattgctatttctacccttagagtttccttgattaaacatctgaaatgcattttttttgttttactttcaagctaatgtttttcagaaaaaaataaaaagctttgaggaaaagcacattatcagttagatttaagaccaattgcttttaaattaccaatttaaaatatcattttttttatttcttaaagcagatttaattttaccccctttgtatgaatcttacagacctggagttttaactactatcactgatctctacacacaacctccagctttaaatgggagggagggtcaccactgctttataacataacaaattagagaaaagctggcttctgtatgagttctttggagacaaagtagctccagaaactgcagaccagaagctatcaaaatctctgtgcttttttggaacctccagtaagccagatttggtctctgaaataatacaggaaaacctcagcatgtcacctcatggatacaagtaagtaatacttttcaatcagctattcacagtaaagaaagtctgttttggaaactgacatgttgagtccttccttccttccttccttccttccttccttccttccttccttccttcctccctctctccctccctcccttccttcctttcttcctttcttcctctccttcaagacagggttgcatgtagcccaggctggcctctaattccatatgtagctaaggacaatcatgaacgtatttttctgccccccacatctcaagtgctggaattatagaattacaggcactaggcatctcatagactgtctttcggaattgtactagatgaacattcaaactgagctcgatcaccattcctttgagttttcctaccttaaaactacgcaaggatgaccgttggatctggtagagaacaacacaaacatgcaaacaaactcaaatgtaacacagagcttttggagctccttgtctgaaggagggctgctaagtgtgtgtaacactctcccagtgtctgccttaacaggtgatgagtctccctttcctctcctagaatctataatgctgcccttgaaaaagactacgtctagaactaaatgagtttgctaatatttggagggtgctgagtggttgctgggataagcattgtaggaaggcatgttttgaagcccgtgggaaagtactttcaggtttaaaataaatttaagggtggtcagcttttcattccagtcttaagaaaacgttgtaaccgtctgtcaggctaacagtcttacacgctacggatttgctgcttaaatggactgatccttttcctccgaggaacagcacagtgctgctgtctttgcactttattttacattttaatctcgtggtgtttgcgatggaatcatggccttgcaagtctttagaaataaaaccagatcttgcctcttttgccgaacacacaaaaggagcttttgttttatatttttatgtttcacactgaaattcctcagggttgacttgagctcttattgagcagtgatatattagtgatatagcattttatgttaaactttgttttattacaacttgctatttaccttggatatttttattataatataagcatgatggatgagttcttgggagaagaacaggattttttttctctgaaaaatcatgctaagttaattaccttcggtaatatttttttaaaagaatggaataaatacctatacctagtatgttgatgtgaacaaccttggacttgttcttcaatcttccgttacagtgagcagcacctccagacatctgaatttcagccttcctatttccccaagaggtcttggcgccagcgcccggctccagccagttttccccaaggcaggtgtagccagaacactgccgggggaggggaaaggggcgggtgtgggacttgggactcggaccactggctgggcgggggcctaaggactagggtccggtccgcccccgcctcgccattggccgcgtccataaagaaaagggccccgcggcccggggggacacccgcagtgtcactgggtagatctccagcgcggattaggcgaagggttaggtctaccaggagagcagcgggagggtagcacccgctcagctttacgagttcctctgggcatctccaggctagcttccgatccctgcctcagggtcgggggaagcggcgtgtcccgtggccatagcagagctcggggtcggtctggagagccatgagcagcccggatgcgggatacgccagtgacgaccagagccagccccggagcgcgcagcccgcggtgatggcagggttgggcccctgtccctgggccgagtccctgagccccctcggggatgtaaaggtgaaaggcgaggtggtggcgagtagcggggcgccagccgggacgtcgggccgagccaaagcggagtctcgcatccggcggccgatgaacgcctttatggtgtgggccaaagacgaacgcaagcggttggcacagcagaacccagatctgcacaacgcagagctaagcaagatgctaggtgagtcggaccagggggatacagggcaccggcgcactccagagaatctccttgagccacttccttgagccaagaggtgtgctgtagactcaatcccttcttccagctccctctctcgccaaagtaacactttggtctttgggccataggagcgaatgtaagggtttctcagtatttcagagaggtaacccgcacagccctggctcgaccccttcccagatcaggggactttggcagtttttcgagttaaggggagaaaggtaagggaggaagccccttctaggcgtcctgtaaggacgcgatctaacactttcatccgaataggaccgggcttctcacctgctcgctcagtgagaggttgcaccagagaggggtcagggtgccggagctcactcgggtaaccctgcgcgcctctccacctttccctgcaggcaagtcttggaaggcgttgaccttggcagagaagcggcccttcgtggaagaggccgagcggctgcgcgtgcagcatatgcaggaccaccccaactacaagtaccggccgcggcggcgcaagcaggtgaagcgcatgaagcgggtggagggaggcttcctgcacgctctcgtcgagccccaggccggcgcgcttggtcccgagggcggccgcgtggccatggatggcctgggtctgcctttcccggagccgggctatccggccggtcctccgctgatgtctccgcacatgggcccccactatcgggactgccagggactgggcgctcccgcgctcgacggctaccctctgcccactccggacacatccccgctggatggcgtggagcaggacccggctttctttgcagccccgctgccaggggactgcccggcggccggcacctacacttacgctccagtctcggactatgcagtgtccgtagagccgcccgctggccccatgcgagtggggccggacccctcgggccctgcgatgccggggatcctggcgccccccagcgctctgcacctgtactacggcgcgatgggctcgcccgccgcaagtgcggggcgcggtttccacgcgcaaccccagcagccgctgcaaccgcaggcaccgccgccgccaccgcagcagcagcacccagcgcacggccccgggcaaccttcgccccctcccgaggctctgccctgccgggatggcacggaatccaaccagcccactgagctcctaggggaggtggaccgcacggaattcgaacagtatctgccctttgtgtataagcccgagatgggtcttccctaccagggacacgactgcggagtgaacctctcagacagccacggagccatttcctccgtggtgtccgacgctagctcagcggtctactattgcaactaccccgacatttgacggttgccgacccgacctgagggccagaagcagtgttacacacttcctggaagcgctaaggaaatccttagcgtcaagctgttttgtttttaagttgccttggcatataatttatggtaatttattttgtctgccacttgaacagttgaggggctacacgagatttttgttttaaatgccttgagggacttgctccccacaatcactgtccagttttagccagttttaaaatatctcactgacttattccatttcttgaaagtgtattgatctagagaaattttgtcatgcgtgttttctcaatcttaaataaatcctggaatctttttaaaatctctcgcatcgatttttatcaaattaaagatcaacagtaagtattatacaattagaagtgtatacttaattgtaaaattttcatttttcttacaatggtaagaaaatgcatctaagaaaccctaaacacaaacagcggggtgttcaaatgtgatataattgttctgagaaaaattctcaaaagatgaacttgttatgtacattccaaatattggtttctaaaaatgatactgtaaatgtttttaattctgtacactttaatgaggctgttcaaaaatttcggattttcagtcatctcgacacctgccaaaagagcttttcagatataactctttcctgtttgtcttttcttccaaaagtcttgatcccacttcccacaaaatttgcctttaattcctacaattttagagtcagagaaactaatcaaaataaagtttgtgttgtgactgttagtg

SEQ ID NO: 20 - DNA, 53560 bp, Homo sapiens
gtccttatttgcacccgccccccgcccgcgtcggtctggggcttttgacttctccccgaacacatttcccctcccgtcgctgggtccctgcgatcgcccccagctggtggggctcgcggagctcaggggagcggggtcctctgcgccgctgcagcgcgagttaataaacagttaagtttggaagactctgcagacacgttgagggggagttaccaagcccaggcagcaaaaacatcctggcacattcctggggagtcctcagctgccagcatctgattagaaccatatctctcgccgggagtggccgcgcggctccgaagctcccggccggcggctatttaagcgaggcccgccgcatccgctgcgctgtagcctggaggctccgggcgcggggaagtcatgctcgcttcacggaggcaatagctagccggtgagtagcttcgaaacccttcttccctctggctccattttttttttaaagatctccttctctcctttgctccccctctctcacccccccgccccccgctacccttctttgagtacagaccttgggctgtggggaatcttagaaatgagaccctgtgcttggggaaaccagcagttttgtggcctgacatctgaggaatgcttccgcggaatgtatttacctttcgaatccgactccagatgcccagcttgtgacatttaacaaacgcctccttttgtgtcgtgtgtgtgtgtgtgtgtgtgtgtgtgtgtgtgtgtgtgtgtgtgtgtgtgtaaaaggtctgcgggcagccctcctaggacactgaggtggctgctgaccgcctaattaactcctcgaagggtgtttatttttgctgtgtgacaaaggctggggacctggcttgtgcccataaggagctttttcctggtgactgacaacatatggcattaaaatgtgaacttttgtcttacaccggcattcctaaggaagtatctacccaagggacttaagaaacttgttttatatcccccggcgcagggagcatggtttatatggtgcttgcctgcctgttgtaagctggttaaaaagattaagtaagaattctaaaaaaggggggaaaaatgaatgggttaaaaccgtggagcctcagtcaacatagcggttttcatagcatagagctgactctgttatttgtttctgctgtctttccctcttgacttaattctgagcctggaattctggtccgcagacagtttcagcagggagctgagtccaaagggaaattcaactggattaaaaacacttaaggaatctgggtgttatctccaccccaaccaccccccaccttttcccctttctttttagtttttgtttggaaggaagagagccgctctgtaaaccgagaagagcagaaacaagcttccagacacatggaaagacttaaaaattatggaggggcgacttcacgaatagtaaatgttgctattgctctataaagtgacttcatgaaaaaatttctggccttagtcaggcaaagcaggggcatgggggagaaggaggtaagatataactaatgcaaacagaagtaatgggagtggaaagcaggcatctacaaaaaatgcctttgagatgtctgataagcctcttggaatggctttgatgagatgtatacttgattgtccttacagtcttgaggttggcttctcacacaaaagcacctactggctgttggggaggagggagcttgcagctaccaaatggcttgtcaccatgcttcttaccccagcagccagactttgggaggctacttttctctgagccaggtgccccgcccactccaggttctgtgtctcccctcttggaagggagatggccctcagtgacactgtaagaaagtttattgccttgagaattcgggagtatttgagtacaatgggaaagtcttctagagaaagcatgaagaagacctagtggtctttgccaatgtggatttctgggacagaccacttcttccaaatccttagtcagtttcctcctaaggccaactaaattctttttcctgttgttggtgaataacttcccccttcttttcccactcccagctggaaggatcccttctcatccaaatgactgacctagaaaccagtcatttttcagctatgccctcctatgctttaatgtataaccagaataagtagatggtagaggaatgtcttccaactttgagcccatacacgtatgtatttgccattctggggatctttgatcttgatggttgatctttacctgaggatgtaagtgagggaagaaagcacttgttacaaaccttgtctaatttgtgaagggcaaactccagagtttgtgtttctgctaaagacttttatagtttcagattaaactggaagtccaaattcctgtgcattaggcctgtttgttgtctttctccaaaggttgaatggatttcactggccttgtttgggttgaagggtacggcttttaaggcacttgttggcatgaaggtagtacagggacctctggcagctgctgaccagctgtttggggatgatatttactggcctgctcaaccaggcctcgattatctgaaggttaagggagcaggaagatatcttccttgctgagtgctcctggccaagcaggaggctttgctgtgacataggctcttatgctgcttcatttctaactctaccctcatatgtccataaacctaagtttgctaccactgatatttcatctggataattttgaaggctctgcgtgtttctcttcctcattcttttgacctgaggatttaattattgctcttcttaaagacaaagccaagatgctgaaatgcttgggaaagctgctgagagtgagccctcctggggtttgaagttgtcctaatgctcatcagaacatacctccccagctggaaagattcgaaagcttactggccaggaaggtttaggtaactaaccaaacacataaggttttttaccctttagacagaaccagaatgggaaccagattggcaatatgaaacacctgagtaacaggatgtggtattttaaaattctccctggcactgctatgtaattccaaagttgaagctgtgccgctgaattgcacaaaggttggccaaaatcatatttaggtgaaacagatttttgttttgttttgttttgttttgtttgagacagagtctccctctgttgcccatgctggagtacactggcatgaacttgacccactgcagcctctgcctcctgggttcaagagattctgtgacctcagtctcctgattagttgggattagaggtacccgccaccatacctggataatattttttttttttttttgtagtagtagtagagacggggtttcaccatgttggccaggctggtctcgaactcctgacctcaagtgatccacccacctcggcctcccaaagtgctggaattacaggcatgagcccaccacacccggccagatgaatcagatttaacaccagatatgtgtctttaaaggagacccaactcataatatcagcatatcctgactggattaactggtggaaatcagaaggaaagcagactcctcagtctttacttaaagacagaaaacaagcaaattcctggttaggggaacaaatgatgactggtacggacacagagggctaacattcaacactggctgcctccaacagggcacaattggatagtagttgagaactaccttctgaagtaccatttcctgggttcaaatcttagctacagggttgcaggttacatggccttgggcacattccataacctctctgtacttcagcttgcttatctggggagaataatagtacctaccccaggattgctgggaagacagctaatctaatatacttggaatactttttcccatctgattttgaaggttttgtttgtttgttattactcccccctgaacaactgaattaagtgtctttgtgaaaactgaaagcaaatggaaaatttcttcatgaaaattgaatacccttcacctacttgaaaaaggttaattattcaagcacttgattttaataaagccagtgcgtttgcttgtgctcatgctagaacagacagggagttactctctgttttcgtcctggaagcctgcactttggtttggtcaggctgacctcgctggtctcaattaagtcctccccacaccctctcagactcctgacagagaaggagcaatccttccccctgaagtcagcattgtcacagaaggaagtgggaagggagggaccacccggattaaactgaatgactaggctagaaataaaaattcttccgagtgtgtgcaggccccatactatccttgcccacatagctgggcaggttgccatggttactccccttcccgcatccttctaccctggaaggaagcctgcctctctaggggaagtagaatctgaacaaattgcttcctggtctaaaaatggaagttactaagtgaagtagaatctcctctctacttatatcaccccctccaaacttattttaatcccaatacttaattttctaaccttcctagttcttgcatcatctagatagcaaaacatgaaagcttatgaaatttctggaacctaaaagttactacctcaatatagaagcagcctggcaagttttccctactacatttgtactagctagctaggggcaagtgatttttaactaagtcaactggtaaaaattctaagtgaatggggcaggctgagtgagtgttacgttgaaggtaaacaatgtatgagggctgtcacttagattttcaggtaaccatagagtaaagggagcaggtaaataggaagtaacaatcctagaatgctggatttgaagcacctttcaacctagaagaaatctggatgagggaaatatggtttaatgttgtctcttggtaaaaaactaccctattgctacctagcaatatgatgcaaaatgttagtcccaaaaagactttgatctttatatgaaagatgagctgccatacacaagtttgcatttgacaaattaattcagtctttcaaaattggacatttagcttgatgtgtatttcacagcttgagggaactcatctaagacaatagttctcagagctgattcccaaaccagcagcatcaacatcagctggggacctgtcagaactgcaaactctggaagtagggcccatccagctgtatctaaactagctctccaccacgtgatccaagagtaactttcataattcagtggttttaggattcacttcttcagtggaaatcataacaaagtatttgaattccttcagtcatggagataataaagcaaaagcctttaaacacagtgcagtttaactgaatcttaggatgcagaaagattaaaaagcatgggatttggatatttttcccatataccaagtatgactttcttgatcctaggaaatccaatatacttttggtttgatattatcacctcacttccaaatcttttcccctctgctggggtttttaaagagtataattaatcttcatttattaggagactgtcccacttacttcttttaaaaaggattccagtaaactagatcattacccttgaaccagatggttttctctaacctataaaactttttattttgtttttatgccatgtctagaagtgcagatgaagtcctctccataaatgagtctacttcatttagtttttgtaaagtttaatggctaacgaagcactgctcctttctcccattcgactttcactttaagtaacttgaaatagaaaagatatctctatttattggctccaatatgatgagtatcttgcccaaggtgttatcattaagtggtagagccaggattcaattatgaatctttatgatttgcaccttggcgtttatctgaatacttagcaattacctactatgtgaagtctgatgctaggttagcaatggaaaatctcccagtgagcagaaatcaaaacaaaagtcttcctcatgtgtggcaaaggacataggatagagagttaaacagacttacatgtgaatggcagtgctaccatttcttgggcatgctattcaatgtctctggcccttagttgtctcacttaccttgcaaaaacagtcctaagaatgcctgatgtcaaacagagatcacatctcaaactgaaaaatacaagggtgtgatgtacaagtatataattggaactctgattttgaaaagccaacatagattcatggttaagagcttgggttctaagctgcaaatgactgtgcccacagcctagctttgccatgtaagacaagctatataaggcctgagcttcatttctccatcaggaaaatgagttgcctcgattttaaaattaaaaactcttcagaactcctgcggctgcttctgaaatttacctgtcctagaaatgcaattctcaatgcaataactaagctgatattttttaaatggtcttgttctcattgtttttgagtatcaggcaagctaaattctagagatgcacacattcaggctgaaaattagaagactgtctttcctatatatctttaaactattaaatgtgaataatcaaggaggagaatgtggcaatgcttcataaatcagtagaggcacacaaatactaactttaaggtaccacttaaacctcatctgagcagggcagttaagtcctcttaaggtctatagttaatccatacccaaagaactggaaagtgaataacttcatccctaattgtgtccatattgaacacagctgccctctcggttctaaatattgcatccaaatgatctcacttatttttttatattttaagtgtcctattagggggccaagacctggtctagttttctgtaatatgtaatacagatgctaacgtgctttttgttaccatttagtgcaacagaaataaaccaaatgtgtttgaacatatgtcagagggctgacataatcatatgaagaatgctataccagtttggctttgggacgaaatgtgaatctactagggcaacatacaactgccctctgagtcagaagatcagaagttgctgtggctacacatagtaggtgctcaaatatccatcctttaaagggaagggtcagctgtgctttagttatatcagcattaggttttgttgttgttgttacttgattttgttttgtgttgctccctgccccctttacctctaaaattaagcgacttaaatgcaattcatttttgaagtagaaaaaacaagtatgtagctgatagaacaggcttttccatcaattgttggttgctagtaaggagggtcaatattgatttctgcctgggctaaggttcaactatagctgaggcttttcagagagcatacatgtactagaattgaaatgatagacagttatatttaatgtccacgctgtcttctaaaggatagcttgatgcagaaatgcttgcttaactgcctgaaaacctgttctttgtgatttctgatttgtctaactggtctgaagttcccaatgactaaaagttgatagtaattgaaagttgggtgcaaatatttaccttagagggacacatatatgacaagagctgcctataagatagttagagaaaatagtaactactcaactaacatatgattttattgtagttaagtggtacagagtgttgtgtggatccagagggagaaaaaggccattggtgttaatggatttggcttttaaaggaacaatggaagtcaaataagcaaaggtaagaagagaaaatgcattttaggcagcagcgcatatgcaaatcatgcagttggatgaacttaggatatgcctaaagaactctgactggtcagtttggccaagaaacagtacaggtggcatagggctgagaagtgtctgagtttgaaaagtagggatgaattatactgagccatggatgtcaggataagaattttgattttttttttttatttttatactttagattctggggtacatgtggagaacatgcagttttgttacataggtatacatgtgccatggtggtttgctgcatccatcaacccatcacctacattaggtatttctcctaatgctatccctccccttaccccccaaccaggcgccggtgtgtgatgttcccctccctgtgttgatgtgttctcattattcaactcccacttacaaatgagaatatgcggtgtttgccaagcagatccgtcattaaagcaggaaaaccaaatgctgattgggataacttaacctggctctattggcagaatgtgtttgagtggagattgcttagtagttgaagaaaagcctatatttcttcaaaaatcatcaaagtagagaaaagggttgcttaacctaagattaaggtgcaaaaagaaatatttattacccctaatgttttaagcgcactgctcattaacagactgtgtcgagcctagaaaagtagggcaaataattttcggatcccaaaagctttattgaattgagagaagagctctacatgaatcagagggcaatgataggtcatggcaaatgtgaggaaatggctggtaagaggccggtaaagacttccctgagaccacacatcttgagtggccttggaatgaaggttttcacgaaattcaagaaggtgaaggcagtacatattacaggctagcagaccacataagaaggtctggtgtgtctatgtgtctgtttaggggaaacagaagacaacggcctcttcagagagcaggtggccatgtatatgtatagtccacagcctgattagaagggctttgaatctcagcttgaatgtgaatggaggaattgaacaccgatacctgattaattcaaaatcaggaaagctaggaggccagtaaacactcctacaaaaatttagccataaagggagatcagttacaaccagagtctcttacaccttagattctcactgaagccctttggagaaaatggaagaaagagctcatcccataaagagttgtttgtttgtttgtttttcacttcaagtgttttaaatatattaaggagtacttatgctatgtgtgtagaaaagatcaacaaacaccataatataagtccgctaatcatgagggacatgtatgatacaacgtggtatagctttttagggaggaggaactcagggtggcggtgaggcaaggttgaggaaaaatgctggaactaagtaaaaaaaaaaatatgatggggagggaggagaggtgtgaaaataaagggtaattatgaaaagtagactttcagaggtttgactcattcattaaacatgaacagtttaggataaaatcttagcttcattctaagctgcagacagtactgttgtggatcttttaggtatatctgcatacgaagtacattctgtaatgctgttcccacttagtgtatagtgatgcaaatgttcagttttctgcacaagaactctttcatagaaacagtgggcacaaccatgttctgtgttaggatctggactcttacacttcatgcggccaacatttgtggagggctcactacttgtattgatcatgaagtccatttccttgaagactgacattgaccaagtgctgcctggtagccccttgataatgctcttgtgacttggtagtgctctttaaataactaaagcaagctgtagggacccttggttacattttcataagattgtttcactgaaatctgaggttcaatgtttggcctgatctgaaagtgacacgttgtattcttagaaaatctggtaattaaaagtgccacagaacatgtctggttctagaatacagaagttccctgaattgcttgtacttcttaagtgaatgccagactgaatgccaaatgagcatagtgtttccttctggtgtttatgaagatagtgttgattcagaactttggatcttatgataactctgaaggaaacatcactgaaattcttcaataccctcaggtataacagaattgcttccttctgttactgccatacagatggtccttcagattgtaacgtggttataggagactcataaatattaaatgtaaatatcccctcaatttgtgtcataatttaaaaattgttgaagagggttattaacccttcagacaacatttgcatctttccataattgatatcaatacagcaatttatatataattccttgatgtaatactactttttcttccttttatgaagtattattaacagcaatgaagctttctaccctaatcagaaacaattcctccaaaacacatagcatcagttataactgtgacctgcttgttctttctcccctacctaacctctaagcccctttagagtagagaccatgtctattttgtcactctatacataggataatgcagtgcttggcaaatagtaggtgtttaataaacaataaccagatggccaggtgagtgagtaactcaagccactttcatttacaacatcaattgcaatttattatagagtgagcaaaatggaaaactttagcttgccttatcatctgttggtataagtaaaacaattctgaccacccccccccctttttttaactttaaggttatttataatgagcaatatccatatgttcttctagtttatatctgctcagggcctgaggaaggcagacaagctgttactgaaattctccagatggtgtggtctttccaagttgctagtttaacttctaccaatggagtattcatcattgctcatatatctgtctgacctgatggatgtaatcacctggctaataagaattgtggtgaatagatttcagcctgatactttatccacaaacaacttcttattctccttctgtttctccttttaaaagtgtccaccaaattgtttataaaattactaataaaatttgagaaaataggtaagacctttggcttagcactggataattaaggctattgctttgacttaacacaatttctgcccaaatcaaagaatcttgttttgttttgtttcttatttccctgtgcagctgtattgtgaattaagatatccattaggctctttaaaatgctaaaattaggtcacaaactcattactgtctgcacagaccccagcatttccaagaaccccaggctggaaaccaactataggccatccactgaccaactttgaaaatcctagcataagagttttttgacttctacttatcatttgactgaaaacttactgttgaatttttcatatgtcaggagctttccccaacaactctgcctagctatcatttaatgatgcctaagatgaaagtgttgacagctgactatgggcactgttctatgtgatttcagatatgcttatgttctatgtgtggtttcccttcacttttgagtttaattgaaagtgactgaaccctagagcatcttcatgattctgtctttagcccaagttagactgtagacttatgcctacattttaagctttgctgtctaccaaattagcacatctttaaggaatttaatttttaaaatacagaaagcgcatcgccccaatatcacttattctaaatgtataagaagcagaaatctgtcttttcctttcctactgcccttcttaatgagcattttcttggcactggtctttccagactttcaacagttttatggaaaaacatatataaattgggaaaaatcatgttaatacattctgcttcatacaagaggctataaatgcaggactatcttagtaaatagctgccatttacaaaagatgctctttttttgttttaaaggagctcacatttcaaaatgtcattccacttcatatacatttctataaagcagacattaggggggcccttttgtatgatgaaatcgatcttagaatgtagggtgtaagacataatggcctttgactttttaaaaagccacctttaagacattatatttatttgaagtttgagggtcactaagcatcagagcttggcaagatgggataaccttgaatctaatgtttgagattgttagtccttaacctttcaattaaaagcctttgtttccagaagattagccaaatatttgaaagaaaccggcaatgttgaatcactccaaagggcaagtctgtgcaactgtcatactgcagagctctctgactctttgatgccatgtccctgtactcggatttgtcaccaccccaacctccacaccatcactcaaaacctgaaagtcctcccagtcccatctagacaaaacagagtgctatcgcccaccctaatccagtttgacccaccttttaacttttcccctggtataacccagcacaggccctatattatagccaagcagacatgaatatcttttacgcattgctattagttcctctttcctgaaagtactttctggctatgcacgttgccccagtctttgaagaactaaattaattatctcttttgttgtaaagcaaagacattaaagcatatgtattaggctggtgtgacttgcaggttgttgcttcactcctgtgcttcagcctcctctcctgtcaaatagggatgatactgtccaggattaaatgataatgtcttagcatcacatctggtatacaataaacattaggtaaatttaacttttaaaaatctaatattctgtgtttctaaggaacatgtccaggacattctcagtcctggattcccaaatctattttcctctactctcctttctccccagagcatttttcatcttctgaaagtctatactccacttatgttttgctccctgttagatagtaaaccatataagggaacaaatctttattttgctcactggtatatcccaagctctagaagaatgcctggcacttagtagggatgcagttttgattacatgaattaacttgctggtaaagatcactggaattcaggggcaaacttggtttctagtctctaaattgcaatggctttaagttgggatcaatcaccagacccccatgtgctctaaacaacaacaacaaaaaaggctgtcagtgtctgcaggcttttcaagttttgtcataatcatggtttcacagcaaaatctagggtagctagtggcctaccatttgcgtcatctctctggccatgcacaatataagggaaatgacatactcttaagagtcaaagacatttgtttttttcccccttaagggaatgttttggacccaggtgcaaatataaaatagcatttagggtaggaaaccgccccagctctgagagcgaatgacagactcggagaagggaactttattcacatctcacctctgataattaactctaaaagtagaactttgcttattttggaggtactatgcaaacttggtagtgttgtttctctcactgttttccttgatggaactaattgttcatatgcttctgtagtatgttaattaaggaacacattgctagttaaaaaaacactgcaactgtaaatatttttctgatttcacattttgctttactaaaaggctcctgtggagaatggaagggcttggtcattacttttggaggatttgtcttaacttccttgtctgcaatattgagtctttttaataaagattggattaggaacttaatagtggctttcaaagaagacttgtctttgcacagggctatagcgttcagctaaggaaacaaatgatcgaattgcattctctgatgctaaaaatgcctacataggaggactagaaaatagcacatgttaccatggagtggatcctccaaggcttcaaggaccaaatcaagttacttttatttaatgaccatagtaagaagcatacagagaggctacaaatggagcccctatctaatcacttgtgtccatcccacatttcccttaagtattgaaatggcaattgctaataggtacagagttttgcagcaggtcattagtggttcagagaacagaggagactgctctgaaagaaaataaaagctaatgaaacatcttgcttaagtattatgttttttatgaaccaaggaaacttcctttattatgactcattgatgttgacattcccgggtagactaaccagaaacctttttttagttcaatataaatatgagtatttcataaagggccaagaggtctcagctgacactcagctaagtgtcatttgataaagaaccattcctattagttcacctcatgctagaactataaaccagagtggtacccccatgattagttaacttaaagactggtgtgcattcaacaggcctggagaaagaagaacccttatcccatctgcttactctgggaaagtctcccagtgttaagtcagattttttaaccaaccttttgcctaaagtcaaacctggaccattaatgtgatatgtgtgacactgagggctaggcaggtatgtaaatgataaattttagtgaaaaggaaaaatactcaatacaatttctagccaatactctgcaaactagaaaacaatataattcatagttttttttttaagcaggttagacaatacagtaatctcaacattaacataaaccaaactcatttaacatggaaggagtaaagagctggccagtactagatgcactgtaaaattatctacagctggagatgattttgaataacacatattaaaagatacacacatagatctaataaatgagtctttacagcttagaaaaccagaaaaactcaattgtcctagtatataaatttttcatgtcaaataagttaagcccttagggaagtagcagtttatttggtaccctatgatttaatgatttgtttaattaatgcattgccttttaaaatatcccaacagagttgtttatcaggctagtagtataaggtttataagaaacaacatcttgcatgggctattacttcatattaatataaagttaagatactaattacttcaatcttacagattatgtccagatcaaaagtaaaaagaatatgatgttgcctttgggaaagaaaactagatttttctacgatcctcaaaatttgttaataccaaaatggttaataccatctcaagagcttatcttaaaaaatgtaaatggagtagtcaagacttgagcctttgaaactgttagctgatgacataaccaggtagcttttctaggatatcttgtttttatgcaactcatacaaagtttattttttccccttccccagccctggattaattagagatgactaaaatagatgaccaaagaaaacaatccagtggagtgtacatattagaaaatcttcaaagtccctctataaatcctagaataaactttctgaaatctgtacagattaaggtgaaacttgagatctgtccttgtgttcttggagtattacaaccaagaaagaagatgtgtgagctatttaatatatattccttcctaagaagtcttagttctccgaaacactatcattcactttaatcttatctgtagaggtcatctaaatgacttgtgaaaagtggtatagaaattgaattcctgaggtcttctctggattaggaacaatgtttaatggttggggtcaccaaggggtggttcttttctgaaatctctactagacacaaggttccttgaattatgcttccaaacttgctgagtgtgcttcctgatcccaaagatagatgtctagccatgtttgtgaaagggtagaccagtcaatggtgattacttacatgatactaacaggtgtgattttaggtatgtaaacttggatttatataaagaattcatgaaacaaaacctgtctcacttacagactttataagcaaaattctgatattaagtcggtgttttattgtattaataagtgaacctttctatgctcatctatttctgcagttactgaactgtatacagatatttcaatacattagaacactttgttgttcaatgtaaatgctccaattgtgcaacaactaatctgtttacttcagtataaagtagaatactgtcatttggaatttttacatccctcagtttaaaagtgcatttatttattcccacaaaacatatttgttccaatactatttcccaacagatgagagaataatgacagatgtgaactttagctcaagaatacttgtgcatttctgccaattttgttcatcttgtactcaatctgcagcagctttttagagtttttttttttttaataatcataagcacaatttcaagcaggtaggctaactattgggaggccttcttttggatctggaattcgactcatgtggtattattatatgatcacaaaaagcaagacaccaatttgacagattcacctctctcccttgtatacaaaaaacgaaaattacccaggggtttcttatccattaacctatctaatttgtccagtaaccaagaaataagcaaataaggaatatattcttactcgtagaagaactctcctggacttttaggaagcacagtctgatgttgtatattctaggaaacaaactgccaagattctgaccttcagcctgcttgaacactggtatcaagaggagagatggctggttgtcaggctgctggttctctgcaaacctgaaatttgacaaataaatatcaagtcactttttgtttttaaatgactcctttttccttcatctaatttgaaagcaaccatgtcttgtctaaaggaaattaactaaatcatgaagaaccattttttaaatgataatattttgagcacaccagatgacagtaaatagtaagcagtttcaaatcaaaacaaacatagctattcatagccactgggattagcaaggccaccaatattcctggagatgaagcctaactgccatgttggttgtggatgtcttccccaactcgaatagatcatatcagatgtggaaatgtgacccagcggcaagtctctcatggaaggttaatgccaactctatgggtaggttgaatatcaaaacaaaggacatgccacctagaacctagagacaacatattcgaattagattagttaaactgatcttgttttgagtctgcataactgtaagaagtgttttcatggttttgctctctatacagaaatgcaacaaaaaatacgttccacctgtctgtatacaatcactatgtacaccctagtttgctctgtgctgatttacaaggcagctggattcttcttccttcaaactctttaaacagtgtgtccttgaaacatgagttgcaagaaagggtacagcaacactcaagcaatggctttgaggattatataaatatggggcttttcctggaaagggaaaccacattgggattttatataatttagccaggctattaaagaagaaaccaaatatcaggcagtatttcttgcactggttttcggaagaggagaagtttaagattacctgcttgttttaaagtgccctggtgtggtatatatcataaaataattctactagtgtacgtagcccttcatttatagcttaatgtttatagcacagatgcttctaaattacatgctttttaaaaactcttctaacatccgcatagagtttcaagctgactactgtcatggcacttgaatagaaagtgggaagtattcaataattaggatttatatgcatatgcgtcataggtgaagtcacagagggacgtggatgaagaaatgattgtatcctgaagtccacgagtgaggtatgctgcacatctatgttgacttaattcaggattatttcatacggggatgagaatgcacaacctaatgttgtatattctaggaacaaactgccaagattatttgtatcattcattttaaaactagcatggtgggccgggcatggtggctcacgcctgtaatcccagcactttgggaggctgaggcaggagtttgagaccagcctggccaaaatggtgaaaccctgtctctactaaaaatacaaaaattagccaggcagtgtggcaagcacctgtagtcccgacttctcaggaggctgaggcaggaaaatcgcttgaacctgggaggcggaggttgcagtgagctgagatcgcgcctctgcactccagcgtgggcaacagagcgagactccgtcacaaacagaacaaacaaacaaaaaacctagcatggaaataggaagaggagttatttttggtagaaatatctaacctagcttagaaaggacagacatgaaaacagtaaaacatttgctgggtcagtttgggtcagtatatgatgagggaggattgtagtaaaagctatgaatggtgtgagtgcgttgcctctgagtcttaactttttgactaccttttcctgccaggatcaagcataatacattgtatatttagatgccaaatttaaagtaaaactcatgcatttactgtgttttgtatcagttccagagtgcttctcttcaagtcactgccccaaagacactgcaatagaaaaattctagaggtttctatgtcagtagtagttttttttaatattaaaactctaatatttttcatgtaagttgttcgttctttagaaaattgtatgcccttggatttaggatgggagggaagcagaatgaaatataatatcctactttaccatctaatgatacaaaataaagttcttctaaattcaaattttaaaacgggtttattctattgacccattccagttgcctatgaacactttagctttctaaaatcttcttccaaaagtgctttcttggtatatgttctgattaatatcacttcaaaactagaaataccaagccttcctggtcttggggtctcctatgagggtcccttcctgctgttgtcaccatggtgtgaagtcttcagcctcatcacagtcacctagtgcaagtgactgggctaccaccaaaacctggtgggttttagccactgaagaaagtgctctggtgagcggggcaggtttggccatctctggtcctgcagtagtgtctccaggtatgggaagtgctcagtagagttccgccatgtccctacaggccctctggtcacacggctctttcagtgtgataatgcatgccacccaccagccactgcaccaaggcatgcccatgctgcccgagtctgcttggctgggtcagattggacacctaatgcttgtgccaggtctttagttaagactgcctaccttcctgttatgggaattcttcccttgggccctctccactgtgtcagaccacttcagcccattgatcatttcccagaagtgcctcagcttactctatagacttgttcaccagcttcccagatacctttgagctttaaagcctaaagtatatgggaaagagtagcctttgccaaactcttccaaccccataataaagccatattatcctttttcccagaacaatggtttcataatagcttttcctcagaagtaatgggaatcactcatggcttcttccataggtgacttgatatttctctaagtagaaagagaagcagctagtgaggtggttcgagatgacatttaatatcacaactctgggctcaaggttgtagtcattaccttgccaatctctcttccctacatcacttcccagggacaagtacaaaatggagaacagcacataaggaaagacataccatataaggaaagaattatgcatgggcataggtgcctagcaacctccaaatacagagctctgcaaaagctacgttgcagcatgctatgcgctagactgtaattccccattgtcttttccttgtcaagttgtgcccacaacattgtcctacccagcttgcttgagatatatgaaactcacgtaccaaatggtccctgatgtaaagcaggtcatagcccaaatgattcagtgccagcaatgtaaggcaatgacagaaatgtgatttttaacctctgtagtttccctgaagtttcaatgtcacttcctttcctttgtagaagtgagttaaaggagaaagttggattcctgttctgtgtagtctaagccagaggaggttatacttgagaactggggtggaatatgtttcttctcccacattaaagctgaaatgggtgtatactctctaatgccaattaattcaacctcaagcctcatatgtccatattcacaaaaattccacgtgatcaaaagaccaaaaggacattctgacactgctctctttcttagaagctgaataagtgtaaagagggattctagaatcaattgtctctgcatgtctgtgttcatacaagcatattaacttacacccagctttgccgagaggccagaacatgttctcactgtgaagactacactttctattttttccaactttagtgcagttaagtgttcaaactaatagcccttgtgctgaaacaacaaagcaaaaatacaattgcaaaattgatcataaccttaatacttctgttcagcttgtgaacactttcagacacttgccgtgaattgggtggcactgccccgtctaaaggccaagtgcagtggctcatgcctgtaatcccagcactttgggaggccgaggcgggtggattgcctaaggccaggagttcgagaccagcctggccaacatagtgagaccctgtctctactaaaaacgcaaaaattagctgggcctagtggtgggcacctgtagtcccagctacttgggaggttgaggcaggggaatcgcttgaacccgggaggtggaggttgcagtgagctgagatcatgccactgcactccatcctgggagacagagcaagactctgtctcaaaaaaaaaacccaaaaaccaaaatccaaaaacaaagaatgtgcccttatttggatgcataaagcttctttgaagtttaaactcttctaaacgttctttatagaggggactgtttctttcttttttttttttttttagataataatacatgcatttattttttatttatttatttttttaattttactttttctttttttttattatactttaagttttagggtacatgtgcacaatgtgcaggttagttacgtatgtatacatgtgccatgttggtgtgccgcacccatcaactcgtcatttaacattaggtatatctcctaatgctatccctcccccctccccccaccccacaacagaccctggtgtgtgatgttccccttcctgtgtccatgtgctctcattgttcaattcgcacctatgagtgagaacattgactcagcaatcccattactgggtatatacccaaaggattataaatcatgctgctataaagacacatgcacacgtatgtttattgtggcactattcacaatagcagagacttggaaccaagccaaatgtccaacaatgatagactggattaagaaaatgtggcacatacaccatggaatactatgcagccataaaaaatgatgagttaatgtcctttgtacggacatggatgaagctagcaaccatcattctcagcaaactatcgcaaggagaggactgtttcttatgctccaataagagacattcttaataacaagttattaaaaaaaacaaaatgggtagaggtgggtacaaaattaggatgggttataatgagtccagagtattgaaagttgccaattcaagagcttagacttcctatcatgctcaaaaaaaaaaaaaaaaattccaaaaaaactaaaactaaaaggccaaacactgaatagtagagaatgtaccgaaataaatttaaatgctttgatctgcaagtctcagacctaggcaaagcagccaaatcaatattaatgagacagtttgaccaagtaactcctgctacctaggcaaaaaggaatctagtgacaatgtataatgagaccatgtaagatcctttttctattttgattcagaaaacatctataaaataccatgttcaaattaccctgctaagctatcttcttgttcttttgcttggtatatctgctaaatggaaggcattcttggttcagtccccatgtaatgggctttgtacatcctgtttttaaaaaatggtttttaaaaacaaacacaggtaatctctaggaataaggcattacagtctcatgctagatctttcctggtgccagctttgtcccctccagctatttcacaattagacaagtcaaactctctttcttgccctcagttttctaatcattataataaaatgatgtggccaaattattctctatttttcttccagctcaagtctaacccacttggtatttctttaagcagataaagcgttgttaaagtaaaccatcgcacctcacataggtcagtatattgaaatgatttaggaatctttaaaatatattgatacctgggtctctatgcccagagactgtgatctaatttatctgggaatgccatgaatatcaatgttttaagaattccacagtaaaattttcccagatgatgtgaagcagagcttctaaactgtccgtgataatgacgtaggcatgaattttaactcaggattcattggaacaggcatctctgggtaacttagagtagattttgttcccagagtctgtttctatcagaacccaacttttgtaggctcagaaggcagagctgagcaggaggtggctcttacactggcaaaccatctcacttttccacctgggctttactagttaaaatactaggctgggtgcagtgggtcaagcctgtaattacaacattttgagaggccaaggcagatggatcacctgaggtcaggagttcaagatcagcctggacaacatggtgaaaccctgtctctactaaaaatacaaaaaattggccaggtgtggtggctgatgcctgtaatctcagctgtttgggagggtgaggcaggagaatcacttgaacccaggaggtggaggttttagtgagctgagattgcaccactgcactccagcctgggcaacaagagcaaaactctgtctcagaataaataaataaataaagtattacaccattccacctttccacttattagtcatttgagcataggttcttactgttctaaaagtgtttaaacacttactgtggaaatgcaatgttggaaagagcacaagactacacaacacatagcttctgtgacctagctttggtttaatagtagctactgatatggtttggctttgtctccacccaaatcttatcttgaactgtggctcccataattcccatgtattgtgggagggacctggtgggaggtaattgaatcatgggggcagtttcccccatactgttctcttggtagtgaataagtctcatgaggtctgatggttttaaaaggggtttcccttttcgattggctgtctttcttgtctgccaccatgtaagacgtgcctttcaccttccaccacgattgtgaggcctccccagctacgtggaactgtgagtccgttaaacctctttttctttataaattaccgagtctcaaaaatacaaaaaattagccaggcatgatggcaggcgcctgtagtcccagctacttgggaggctgaggcaggggaatggcgtgaacccggcaggcggagcttgcagtgagccgagatcgcaccactgcactccagcctgggcgacagagcaagactccgtctcaaaaataaataaataaataaataaataaataaataaataacccagtctcaggtatgtctttaacagcagtgtgagaacagactaatacagctaccatttgttaagcactttctaagccaggtgcagctgtcgctatgtaagttcttactgattttttttctaatagctcagcaaactatattctcattttaccaatgaagaaatgaacattagataaattgtctcaagccacagagccaggaaatgatgaatcctgggtgggtgggactcacaagcctgagctattagctgctatgctatcccacctctacccaaagttaactgtttgatagaatcttaactctggtctgacttggttccaaaaacagggaaagcatcttggttcaagatttactaagtcctctaagtcctgccatatcattttcaaagattaaaggcaatgatacctcctcgctgtaaatgcataacttgtggatagctcattgactcgggcttgttttgttagtgaggcccctacagtagtgtcagcatttacaagaaaatcttctaaggactccttttcagtatgcattagcatagtctcattcctcagtgaaacaggctgtaaaaatcttactgtctgctcagtttggtctttgcagagcagaagagccttcctaaaagcataagaatccaaaaaagcagttaaaggaaggatttgcataaagtatcagaaacagtctaactttgctacagcatcgctggtaatgacccctattcttaaagagctactttgaagatagcagtgaaggctgtttgctgccctcttggaccccgaggtctgtcttagaggttaatatttcacatgttgtcctaattccgcactttagctgaggcaggcagaaagttcaaagaaacaaggaagcacattctctgtccagtacaaagtactggacattctaaacaaatatgtttatgttgctttcttcttgagtctccttaattcctttccctgtgtctattatatgtggcttcttgctaaaaattaatggtgtgttaatgtcagtgggatgatgactttttgaaagtagcttataaaatccaggttaaaatcagtgggattcaagaaaagacaagagagacagtatatataagagaagagaaaacacagactatgctcactttgagcccaatggcttatggcggattgattttctgttgctgtgtccatttcattattcataaaatagagacacattcagccggatgcggtggctcacacctataatcccagcactctgggaggccgaggcaggacctgagggaggtcaggagctcgagaccagcctggccaacatggtgaaaccctgtctctactaaaaatacaaaaacttagccaggcatggtggtgggtggctgtaatcccagctactcgggaggctgaggaaggagaatggcttgaacctgggaggcagaggttgcagtaagccgagattgcgccactgcactccagcctgggcaacaagagtgaaactctatctcaagaaaaaaaaaaaaagagagacacattctgtttcataggcctttcggaataagtgttcttagtggttggtatactaggtgtttgtcccattccccttaatgttaaaaataaattccctaccatctgttgaatggggctaccactaagtccttaactcaagttattccttttaccagcattttgagactggcaaagcacttttcctgcctgctctgtataattagggtaagaaggtaggcttgggagtcacaggggaggatggttgacacttgtattatgatattgcttcaaaaccttggaatcattaagtagtaccattgctgatgccaacacattcctactggtagaaaggataaggatatataagaagtgccaaccaactttacccctataaagcctagactaatcattgtccaccatgctggcaattgaaggattcaaaacactagacattttatatgaatcactaaggactaagcaacagctgatttttattattgcaaagcccatagtcattctaagatgactcatgcagtcttccagaataaatttctcagagccttctcagaaaccaggagagatgttgcaagctccagaatctcttgcagtcatctgatgctagtcccacagaagggggaagtctctgcattctttcagggagatttgcattaagtccaaaatccaagttagagatcttcacttaaatggaagctaattttattcatatagcagagtttcctttacagctttctgttctatctgaggccttaaaaaggagtcaggactataagataactttagatcttcctttgtttttacatgtgtcatcttacttctcttttcaatcttctaatgaaggaaacagccagtccctgagaaccaggataacaaactagctatttttagatggggaactgtgcttgtgagcctttttatatgtttttgagctttcatttgtaatccttgccttgtgataacaccccttgggtgtatttcctgactaattttgcactttttgaactgaagggacctgagactacacccaacgagtgagaaaattgtatacttcctccttgtgctgcactcacttgcttccctttgtaagaaatttttaccatcctagagctttcaaacagaccccattgcttaacataagctagacactttcttcaacagagccccagtttggaaaggtaatcaaaggaattaactaggggacttttggtcctcagatcccttttctaggcccaatcccttttttaaattcaactcattaaaaaccctgctaaaagttttatggatgcaagtgacaatattcaaatgcattacatttgaatattgactattaagtttaaaccaattattctctacagatggatctaagtctgtaagtgagctgccttctacccactgcatgttaaatgataacttgcctatttgacaagtctatgatggggacgtgctctttaaaccttgggagaaatgtgaattatcactctggtgtatgcataactggatgtacacttttgttaaaatcttgcaataagtcttgaacattttttttgtaaaggggtttgtagtcttggggcctgtaagcagagtctaccttctgatcatttcaggaagtagagatagatatattttcaattgtatggcctacaatggagacttacccttggctattgcaactcaacatacacatccattttcttcagggaatttatattacagaaacttttcctccttatttttttcttccttgtcccttggaattgctcatacccaaatggcgaaaggatatagtcaaaggaaatcaattacctttaaagcaattccaatgctatgaaaagctgtatttaaatatctgaacagagaaatttttgctataaaaacttacagcaaggtaatgccactcaccttagaatccttccatttggcccagtctgccaacgctagattcgatacctggtcttcagctacgtcttgtgttacttttatgactaaacccagatgccaccgttccctcccccaaaacccctcaaagtgctttgtggcacttctcaaattcttttaaaatagtctcatgtaagaatacaaattgccaaatttaatgagctaagtcttttcatgtcagaaataataccttgcagtgaagtatgatatccggcttcaaagatgggcaacagactcttaagcccaggtcactttttcagccagtgattctaacccagttctgggccatcttgctgctgctatcaacacatgcattgatgaactcaacataatactgacctaagcaagacagatctgaaggtatagtcacacacacttcaattgcctcccatgaagaaaatagaatgtattctgttttggaatatattgttgcagttcttgttctgggcctagaaagttaaaagtagatatcgaagtatataaatatagccttgaaagccaaaataatatggtttttaaaagcatataaggattaatattcaagtgaaacacttgaatctgccacatttagggtacccttaaagaatagttttttgatctggaaaatcaaaacagattagccttaccattgtgtcagttggagttcagtccacaccagttattttaaaagattttaatgttaagcattaattcccactcgaatactaaccaggcctgaccctgcttagcttccaaaatcaggcttgttcatggttgtatggccgcagatattaagtgttaactaggtataagttgttagctagaaaactgagagagtaagaagagaagatcaagtcatcactgggtaagtaaactacagaaagcagctaccacctctagggctgaggggacaaagttaagacattggaaccatcaaagtttataaagcttgcaggagggggtctcatggtgctgatactgaggcctctgagaagggagtactgcttagctagtactggagtccctgtgctctgagggcctgggacctgttggcctggagagagtatgccagagggctgatgctgatgtctccaggacaggcatgatgagactagttctgcaagtgttaaaactggattcaggggctgttttaggaagaaactcttgctgctggagtgaagaagttctactagagtcacactcccaggagtctcaagtcataaggaagtccatgtggagcaagcagacatgtccgagtcccttcaccagcttggcagtttccctccagcgcaccttactggcagagccaacatgcagccagcaggcaaagcaggaatgtttgcacagtctagctctggcttcactaaccggagatagaggtggttctgaagctgagacaacttaaatggcacagatcacccctccagctactcagcatccacatacacccttccacacctttcaacttttcctctgacagccacacaagtgtttccatctaaaaaggtgcaactgtctttcattcagagaaagatgttctcaccctctccccaaactgggaagctgcaaagaccccataggcatcacattcatttctggaaaacggttactgtctttgggctacattaaccacccctagacttcagttgcagtcccatctgaataattcactgcctaaagacaaaattgtacatttaacttcaaaaatacttgcattaaaagagaagatagagagataagaaaataggtaatacataccagtgtatacacataacaagcaaggaagaaaatacgcatagctacaactgccctcattaccatctgcatgaatgccatctatatcccagacattgagaaatgagtctcctacattcaaggagattatagtccagtgtgtgggcagacaagcaaatagacttgtgtgtaaaccatgcaatggacatgtgtatttcaagaggactacgtgaagctgtgctggaatacagcttctcagctgagatttgtcactgcagtgttgaggaactctggtttggggccagacagtctgggttacaaacctggttctaccacttagcaggtatgtcgttttaaatatctttgccttcactttgggaggctgagtcaggcggatcacaaggtcaggagcttgagaccagcctgaccaacatggtgaaactccgtctctactgaaaatacaaaacttagccgggcgtagtgcccctcacctgtaatcccaatcccagctactcaggaagccgaggcaggagaatcgcttgaacccgggaggtggaggttgcagtgggccgaaatcgtgccactgcactccagcctgggcgacacagcaagactccgtctcaaaaaaaaaaaaaaaaaaaaaaagaatatctgtgtcttagccttccctctggaaaatgaaatatgatacagtaatactcacaggactactatgaatcttttaaagttatacaattaaaaggttaatagtgcctggttcccacctaagtcctgagttaagaatggctttgagtctcctactgtgtaagactttcatctgtaaacagactgtctccctggttgccaaccagccaggtgtctttgagcaaaattaactactaaatctccaaatgaagcaattcagataacattactcatacatagattgcatgaatgtatgtatttaaagactgttcagattataaagacttttaaaactcacagtgggagaaattaagtactgacccctatgaaaacatgttgacatctgtaaacaagctaagtgcaatttaaattgagtaaaaacttgagacttactttttatttagatattctttaagtatctaacaaacgacagttattcccatgtggtgggcttggtccttcagttacaatgttcacttaaatgggtggtataggcacggaatgaagagggcttttgttgaaggcagggttgtggaggggttagtgtgccagcccacaggttgtcttaacacgattacaaaacaatgaatagcttttctttgcctttggtcatcagtcaatgtagaaagttaatctactcgccctagctctctctacagcatatagaaacattggctcctgggaagtgagagaaccttttggaaagttagctcacttctgcgtggttacaatgactgcattttcctgtttctcctactatgatacattgtgggtagggcagaggttgtgagagcacatgacagactgtttggagtatggtgatgctgaataatagcataaaaatgtactagattaattgcacaattggaaccccctcaatccattatttccctgatacaaataagtgttaatggcaaaaaaggatgtgttttatagtgcttggataaccctggggatcatatgcagaatcctaatacttaaaacaaatttatcaatgtgaataagatacaggtcataactctactctagtcactgcctttatagttaagcaattttccgaagaactgaaatttataatgcccaatctcaaatggcatttgcagtcttaccaggcttaacattcaatttatttctgttttgcaataatgcctagcaagttttcgatccctatctttaatacttgctttttatgtgaaagttctaataaaaactgcttagctagataatcattaaatgttaccagatatcaagtgcttaaagaaaaaactaataggcacacatgttccattttggaaactacaaaggaaacactcctacccactcccctgctttcagtcttcagtctaatacagcaggagaaggaacaaaatgagtccaaagaactacaaaagaaagtcactagttgtaagcctattctggcataaagtctgggtctgctgtgttctgatctcaatatgcctctaaactctgcctacaggtgtctgtgggaggttatgtttatttgagacttctccatcgggatcgcctggtgtcaccaagtgtccactggtactgaggtttgctgcctgccttcttgccatgtctaacgaagtagaaacaagtgcaaccaatggtcagcccgaccaacaggccgcaccaaaagcaccctcaaagaaggaaaaaaagaaaggtatggagaaatccacttgaagccaaggaagggagctagagatggttacccctggagaaatgtgagattcagaataaagtaagggctggctctgatcttccttcaacctcagcttagtctcatgttctcctaataggaaagttgtaccttgggagaagagactggttcatctcacgtgtaataagacatctctggaaacctgcgattatacccacttaagtccagttgggaaacagtcatggcatcttgttcagttaataatgcagtcgttaattattatatggttatcattcagttatttatttaccatttgattttactgaactcattgggaatgggactacacagaccttgtaaaaggagcaaaagacattataaagatgggataattatcttaataattttcaagagaacttaggcataattcctttctgccttattgataatttaaaatgttggtaaattgcttggcagcttatttttcttacattaaaaatacatatattatcatccttatattcctttaaagacttaaaaaaaactatgatgaaaaatgtccccaactcccacctcccatattcccatacgtttcccataacgctgtcaattttgtacttctaacagtttattttctccccacctcaactccatacacagttgattgtggaacatgattttgctcaaaggaagtaagaataagacaggacagaatattacatacatgatcagttgtagtataatcaggatttatattacttaaattttggagagtctagagcatatttggtcataattagaactagcattcttcatcctgtattcctttcttttctcaggccctgaaaagacagatgaatatctcttagcaaggttcaaaggcgatggtgtaaaatataaggccaagctgattggcattgatgatgtgccagatgcaagaggggataaaatgagccaagactctatgatgaaactaaaggtaaaagggaaatgaatgctttatctgtatattaagcaaaagtccaagagagggaattatattagaagctcttgttgacctattgttcaattacttgaaaactgcttttaatcacattatccatcagtagtgccccattttctgagaaaccgtgagtgtttgcatatttggagggatgtcctagatacctaattttatcaagtataataggactctagatgccttttccttctggcaagctcaacattaggacgaaccaagcgtattcctatttctattcctataaaagctgtgtgcaaatatttgcattgcttgtcttactatatgtggagagcacggaatatcctgttttagacctgggaattgttctgataaaattgaggattctacttagacattggtgttccttagcgctagcctttctgttttttgaatttaaaaatttagtactatggcactatgtgaaactgactgaataaataatacttgttcaatagttcaaggcctagaagaaacatctctaaagatcttctagttgagctttaccagtgactattctgaggccaagagaattagagtgacttgtccgagttcgcacagctaactaagggatgccctggttcaacgtcttctatgccgtcttgctgtcccggatgaaaagtgccgaatcctctcatcgatggcagatcaagtcgaaaacaaagctgactgactttgaaaattttaatattaaaaccattgtaggatgtttttaaaaattcaacttctcttgtttttccaccctcatcagggaatggcggcagctggtcggtctcagggacaacacaaacaaaggatctgggtcaacatttccctttctgggataaaaataattgatgagaaaactggggtaagaattcacatttgctgatacctctctgaccacctgagtctgaccaacaatttgctacttgaatttcggctccccttcttcgttctcaaagttctgtggggaacaaatatatcatatattacatctccagaagtaacaggcagaaaacagaataggaggtaaaagtcaagatacttgattttgaatttgtgttctataataaatgtgaatctaagtctgttaagtctgttaataggcttagattcacattatgtctataatatataaatatatatatttttgaaattaaataaatatatataatttatataatatacaaatatacattaaaatataaatacatatataatttataaagtaaaacttctatatatatatatttttttttttttttttgacctcgggtatacagaactagattaattttaacccctagtttgtgacacttttatgtattgcttacatgtgaacttaccggctaacctaaagctagaacctcacccataacacatctacctctttttcatttcttttttccctgccttctcacctcacagatgtaaccttgtttttgttggttcctgttgttctattacttgtgaacagtcttacttattttgccttgtttttaagccttatcagaaagctatttatcatacatcaagtcttctgtgattttttttctgtactcaatgtaacatcataagactcatgttttttaaaatgttgtgtgtggctcattttcattgctataaaatactctctcgcatcacgatactgtgaggagacctccagttactattcatccctttctagagtgcccattatctaccatgcaaacctagggccctggcaccctagtggaccccactcagcctgctagtgctggggtcctcaggcaccactctctttatcagtcgcctttatctgtcaactcttattttcccaagcccatcagagaaaggtggcatgtttctctcacccttctgtgtctcctcaaactttctaagatactctaagatatcttagacattcaggacaaaaagccaagacacactctgccacctacaaatatccctaaagagttcaaccttgttaactgcttgaaaggatcaagaaaaaggagggaaaaatagaagaaaagacactaagccaatacagtccccaccccttataattcctggttactgatgtagtcattatgtcattaacatactgtagttattactacattatgttactatgtattaggctgtctaggtgaggctgagaaacacttgatgacagtatttggtatcctccagaatatactgggaatacggttccaataacacataggatggttcctcggccactctgagccatcgtcaatgaatccctgtgaacactcctctagcttagttatgctgttcttttaagtttgtctttgagttgggaaagtagacctatttggcttggcttaagggctaaatgtctcctcttcacttggtcttctaatcctcagtccttcctggctatgtggcatcatgtctttaaagcagggagagtaaagtatcaatattttaagaaggaacattcttcccacttacgttttctattcttctttcttttgagccctttctagaaagagtaatgctctagccttcaaccagaaatgaaaagtctatcttcaaatggtttaaacttttcatatatgccttcatatatgtgtctgaggcttcggtgtgctagcctgcaaatagattctagttttcttaataaattactctttatgttcttttttaaggtaatagagcatgaacatccagtaaataagatttctttcattgcccgtgatgtgacagacaaccgggcatttggttacgtgtgtggaggagaaggccagcatcagttttttgccataaaaaccgggcaacaggtgagctctaagtcttgacatagacctggggacttgtcctctgtggacattggagtgtctgtcactcaactaaaagatttactggaaataattggatgtaagagggctaaataataattccgagaatgactatttttattggcctatggaatcttttaaaaatgtcattgatagctatgcactgctgtgtgccacaggattgtgagaatggaccttcttataaagtgaatactgacttcacaacagtggtgaattattctcaggaaccttaaaggacttcaaatatgatcatgatacctcttgttttgtctaaatacttattaaccctgctgtcttttatatacctaagggtgaggattgggttggtggtgatcccctataagccagcagagggtagtaaggcgttttaagattaaaaaaaaaatcccagtatgaattataattgatagcagacaaaggaaataaaatactaaaattaaaatacggataacagtgctttcccttactgcaggctgaaccattagttgttgatcttaaagacctttttcaagttatctataatgtaaagaaaaaggaagaagaaaagaaaaaggcaagtactacctgattaaggctctattaaatttaaaactggctgggcatggtggctcacacctataatcccagcacttcgggaggcagaggtgggtggatcacctgaggtcaggagttcgagaccagcctggccaacatggcgaaacctcatcactactaaaactacaaaaattagccaggggtggtggtgggcacctgtaatcccagctacttgggcgtctgaagcaaggagaatcacttgaacccgggaggcagaggttgcagtcagccgagatggtgccactgcactccagcctgggcgacagaacgagactctgtctcaaacaaacaaacttaaaactgtactcaggactatgtttaatattatatataaatatggtctatctgaaaatttggcttctatatgtattgtctattcttcccaatagggcaatggatacatttttatggttaggcacttctaatctgcactccctggcttttattttttttctctctatgagattcatattaattctaggaaatatacaggacaaccaagtttaaatccagtaactctactcaaaccttatattgatatgaaaaggggaggggaacggagggcagaaataatatacaagacttattcttgccttatgcctgtgaaccataggcatacttgtttgtgtatttaactccctttcactatgaatatgaagatcactgaatatgtatctttctttttagatagaggaagccagcaaagcagttgaggtaaaattgcatctttacttcttgttaatcatgtgtgtgacatgcgtaagcccctgttttctacctgcccaaccactctcgccacctcgcttattactatgtgtttatgacttctctgatcatgaaagatgtttagttaaaagatgataccaaaaccattgctgcttagcagactaatagagtggacaaatacattttatagacaaagctcaactaaatccttaaatatttgctatcttttcagaatgggagtgaggccctaatgattctagatgaccaaactaacaaactgaaatcggtatgtattaatatgtgacgtttgacagttcttacttatctgaacatgggttctacttcctgtagatgttgctgataccaaatctgtattgaatctatatgaaaatccaattgagacaactgtttttcaaaatattagtgtaacatctatgtcaatatacaaaagtagtcaaaaaaagattagaaaagtaatctttttagtagccacacctgaatctaatctaatactttttaaggatgtggacaagatagatttgctttgagacatgtctacacttcctgacctaaacagcttaatatgaaatctattagttaaatggaaattaaattgtgacagctactttcctaaactttaggaaacaaatgattacaatatacgaagtaatcttttttagtagacacatctgaatctaatccaaatacttttttaagggtgttgaccagatggatttgtttggggacatgtctacacctcctgacctaaatagtccaacagtaagtgtttgtttttaaatttgcaatgtaataaaatgacatctataactcaaattggcaataaccagaaatcttaagcatctcattgaaacttggaaggtgactgttgatttttgcaaatgaagtgtcaatggtttttagaataaatgtgaatcttaagtcaccatgggaacctatccacactaattcagttatattaatattgcttacagattaaacctgaacaataagtcagcaatgtagtccttcttggtatcacttaggattagaaggaggaggtgaataatagtccttgaataagcctacttgaagaaagtatgactgttagatggttaatcataaagcctcctggcctcttcatttcttttgcattctgtctgttgcaatttagcagcataaatttggtgtgaagtaagatttaaaacaaacaagtggctcagttatattccaccaaagcttgtccttgttagaaagctgcccattctcataggattttataccatatccagtctgctcaatattgaatgatctgtaacaaccctgtaagaacagaacagtattttcctttataaattaaaaaaaaatggtggttcagggaaaaaaaagaagaaaaaaaaataaaaaggaaagaggtccagattcaagacttaggcccaagtcttcagaccttccaaaacatacctctaatgaaaatgtccatgacattttgaatgacttcttgcaacttcttttatttatgtaacagtttcctgagcacctgctatttgcaaggcatagcagtaagatgcacaacatcaatgacatcatggaatttactctccggcagggagaccaacattaaaactaatcacatcgttagtaattgatgttactacagggtatttatctagttcagattcaggtaatgcttctgcaggagtgagtttctagatttgaacataaaagatgagaaggcaataaacagacaaaaagagaattagtctagaataatggggggaaatgtctagaaaggactctcttgtatcaggaaattatcatggaagcctatgtgaccaaggttacaggagttgaagcaatggatcaaagattggataaaattctcccttcagacttctgcagagaatttgaggcctgtgaatccttactgcataaaactttcaggtcaaatgagatggagaggagcagggacttcatgcattcttctctgaccctaaccatatgagtatcacaatgcatggtagcattctaaaatgcctttaagagagaagcctgtttaatattcattttagcagtgagccctaactcacttgcctatagaacctttcattcttcataatttttgttatagttctgaggataaactttttaaagtactagactagattatcctgacaggtccatcctaactctgaggtccttttgatttgtagtcaactttgtgctctcctccattagtgatgttttctcaaataaatcagtatctgaacacttacttcccaagtataaatgacattcaaacaagtaatattcaaagagagcaaagcactcaagatatgaagtggaattccactggaataggcaaggaagtactgcctatataatctacttctgtagacttctagaatgttctaaaaaaggaaatggaaaacaacatggataatcttcagtctcatttttattagactttatgaagtctaagaattttttatttataggaattcaagttttagttaaactaacaataaagtaataaataccatcaaaatatatactctctgataaccaaaagaaggctaacagatctaattatgtgctggttaggctttgacatgttcttatctattgactctatagtcataggtcaaaaatagatttatctctacttggtaaagccagcatgtttaaaaatattcaactctttcaacaattgctctgaaatatgtaaagagagaaagaaatctaaattacctagactttattattggtcctagatggttgtcactcccctcaaatttatacagaaaagttttatgagtttcaaataatgctcatgttgcaaactatgtggtatcccctagaacagaatttttattggcaagccccttgagcattatccttccacactgcatctcaaaaaaggaaaagaaagaaaaacataaaaacccatgttctgcaactttaacaaccacttgaaagcacagttactatggaaagaatataagacatgatctgtgatcaaggagattaaatctggtacaagggatgggatcaggatacaaagcaggagtgtcacttatgtccttgtgtacatgccataagataacacgggtgggcacagggcaagtgcagacagaaaaatcgatgctaaaagctttgtaaagaatctgaatttgagttgggtctttgaagtgtgtaggaaaatagatcatagttgggctagaaacaacgtgggtcttattgtggatcatttggaaatttggcctaaggaggtttattttaatatagggagccagcagtaagccacttaaggctttgagtagagaagtcctcagtctgacaaactggaatggttaggtgagattagccacccagagaagagctaggctatggaactcaggatttatgtccgattactggagctccctacgagcaggttctgtaacgcactgccgtgtctccagtgcgtgcggctcaggtgctcaaacagtggccaactggaggcagtgttgacagttcgacaaagaatgaatgaggcgctgaccaagtgggtggatgaggagtctttgggctctcagttgtagtctgtgaactacacttttaatcttggattaataacaaacccagcctgaggagagccttatacattttacttatagggtgactattcagaagtctaacattgtggctcctgtttggtgtcctaagaacttcttctgaagtatttgaaaacgagaactctaccagctgtgaacactcaactgttctaacccagaggtggctcaaaacaaataaataaatattgaaatcacaagcttttgtaatacattttatcctaccttttgattgtataaagatccctagattaatagctcttccaatccatttctctgattaaatttttttttaattataagctctttcttgtgacaaattcttcttttataaagagaaagcctggctttggcttataaaaactgtatttttatgcctcacagtaaaggaatccaaaagatagattaccatttaggtctgattttgctgtctcttttgtggccatgaaataggacttaaactttctaaacaattgggtatttttttttcttttaaaagccaaggagttctatttgaacccttttgtatttactagtttgcaaattttatattcccttgaagttgtttattttccccaatgatcaaaatatttagtattctgctcagggtaatgcaagataactactataacttgcacttcagcaaggcattttttatcatttatattcttctctgggtagcatagttaagtatttaatggatcaaagtcaagcagaaggaagtgatgtcagtatgaaagttctgttctaggatgagttataattctgtcttttactggaataaagacatgtcggattcatcaaatttactgcttttaagctgagaattttttatcaaacagttgaaaatccaaaaaattaacacaccagagaaatgatagagaggggatagaattagtagagctacatatttgatatgtctttcaaattaactcttaaacccatgtctctaccttgtacaatagtccccctttatctgcagtttcactttctgaaattaagtctgtggtcaaccttggtctgaaaataagtgagtacggtacaatataatattttgagagaagagagacagagagaccacattcaaataacttttattacagcatattgttataatcattctattttattacttgttaatctcttattgtgcctaattgataaattaaactttatcatgtgtatgtatatgagaaaaatactgtatataggttttggcactatgtgccatttcagacatccactgtgggccttggaacatattccctgaggataaggagggactactgtatataaattaaagatcagttgttggttgactttaaccactaaatagatgagattactgtcacaacacaggcaactctaagcaatgttatgaaaagatgtacaaataggagatcttaatgtgtgattgactaaattagatcagtattgagtgtctctttcagaggacatagacaaaaagggtaagcccagaggagagactgggatgatgaggatgagatcctacttgactatcagcttcagcaagagccttaaatattaagagacatacctgaaggccgtgatataaaagaaaagcctctctcccacctctagaggaaagaactggaccgattttagggaaatgcatttgatcttaaatttcatcacagccagaactataaaatatgaatgtattagtcgatgaattttctcatttagagagatgatcctacatgactctgggggtacaatagagaggactgtatgtgtataggtaggaagctgagctaagcttctgaaatcacttactttcaagctcaacatactttgataatcatttatagtgactcacaatcaattccctttaagactttcaaagtcacaaattgaaacaatgctcataatgaattaagccagtctgtatgtgtgaaccagggtgagcagagacatgaagtaagcaacagtaagatttcacctaatgaggttgagacttaaataaaagggcatgatattggggaggaatagaaaggacctagtctatagctagggagtaatggactacgggggttgatggaaggaggtaatgatcaaccgatttatcaagaccaaattcaaatggaaattctgataatcctagtcatcttatgtaattttctcatttgaagtcacaacatggactaacactttctttttttttctttccaaatgtgataggaaagcaaagatatcctgttagtggatctaaactctgaaatcgacaccaatcagaattctttaagagaaaatccattcttaacaaacggcatcacctcctgttctcttcctcgaccaacgcctcaggcatccttcttgcctgaaaatgccttttctgccaatctcaacttctttcccacccctaatcctgatcctttccgtgacgatcctttcacacagccagaccaatcgacaccttcttcgtttgattctctcaaatctccagatcagaagaaagagaattcgagtagctcgtctactccgctgagtaatgggcccctgaatggtgatgttgactactttggtcagcaatttgaccagatctctaaccggactggcaaacaggaagctcaggcaggcccatggcccttttcaagttcgcaaacccagccagcagtgagaactcaaaatggggtatctgaaagagaacagaacggcttctctgtcaaatcctccccgaacccttttgtgggaagccctcccaaaggactgtccatacagaatggcgtaaagcaggacttggaaagctctgtccagtcctcaccacatgactccatagccattatcccacctccacaaagtaccaaaccaggaagaggcagaaggactgctaaggtgaattgtcttctccacatatccattagcagagtgcatgttcggtaccaaagggtggtgtgatgcaagctctctttcctgctgctctcgtagtttcctgtgttgctgtgaaatagaaggtgggataaggcactttggttctccaggagtactttcctctaactgccaccgtttttaagcttctcagcagtgtttttcacaccctgctttccgtgtgcatgtcttgtcacttatgattaaactaaacacaagtttttccatttttaatgctgctatgcttctatacctctggtaagtttgatcatcgtgttctgggttgggagggtgagagttcttgtgattccctttgtacttccctgacactaacacatgccctgcacacccatcatgttgcatcagtgtccatggtggtggtataaaattctcgagcttatctcctcttttaaatactgagtaaatacataagctttttctaagcttatgtatttactattaccactatgatctcagctttatttaagagcaatttaaaatgcagttcccataggtgtctttttttacctctcctaagaatatacaggcttgcctggattaagaccctatgatctctatgtagactgacttaaaatccaatggaatgaacaaaaatatttaggatgcttattggtagttgccccttttacacacttgctcccccaacttcaagcatttagcgatgagaccagaccaatgtgagtgtgtaaaggaatatagtagatttcactttgcaagtcctaggtagtgtcagacactaagactcagtagtccgtccgttgtaggaatctgtgtctttttttggaggactctttttctgtagtagtagttgttgttgttcatctgtcaagaaaaaagttttcctttttgtggctctcaaattggggtatagggtaggagacaaaatgaggctgtatttcactgttagtgagtaactaaggcttctccctccctccctgtcctgtcagtcttcagccaatgacttgcttgcatcagacatctttgctcctcccgtctcagaaccttcaggccaggcgtcacccacaggacaacctacagccctgcagcccaaccctctggatctcttcaaaacaagtgctcctgccccagtggggcccctggtgggtctaggtaggtgcctagagataaaattaagtatgactcttttgcttttgctcataaaatgatgatgcatcggaagagatttcatactcccagagggttttacagcataagatttgagcatcccagggagcccttctcccacttctactatacaaccccacatccatttgatattcttgacttgtaactcacatttggctcctcgaggcagcatgagacaagaaattcattttcagtattgtacttacttgaaccaactggtcatggtttcctgaaagacaattgtaagggattctaaactcagaccagcttcagtagcaaaacagggttgacataagagaggcttgtctgtcaacatgcatgtcttccatgtcttttgccataatagatcgaaggcctatgtcctttcaacacatagccctcttagaaggaatatatgcccaagaaggatgtaagttaagtctgaagcaagaataagtcatagagtgaaagtcctaggttctgggcccagctgtgttcctaggtgtatggtaagggtagatcaggcacacatcctgatcagtctctgagcacttctgccataggagctccttgccaatattttggctagcttgagtgttttactgaagctagaacataagtcctagaaagccaaagttgaaaaaagagagaaataagggaagagatggaattttatcagacagctagtatgcattgacgctcttaattcctaaatgtgtcattagcttgtgtgagccgctgatcactctgtggtaggacagtgggaaagtccacttgactgagggctggccttgctattcttagtccatagcctatagttcttttcagactccatggtacagttttcagaaaccctgacaatagtttttgctgtcctgctatggactctatttttcttctcttggcacctctacaaactccaaatggactctggcttgggaggtggaggactgtagacgaggaaggactctcctctccttcggtaaaatctgaccagggatcctggctttctctgcctcctgcagtcagtcatcaggatccttgttttgttttcctctctgtctctgttgttttcctacaaaggaaaatagtttggttcttttacaagaaatctgtttaatcatatctagaatagggtggccagaggaggactgttactcaactgctgagtggcagaaatccgtgagggtatgaaaagccagcttgtcccaggtctctgctcgcatttaccccatcaagaggctctctctaaagacttcatgtctcttgggggcttccccctttctgcgttgctcttttccttgcacccccaagtggagctggttggtacccttccctcacagaagaccagagtgcttgcaatgcaatgtctgcagcgagatcacatcacagagctttttatctgatatcaatgcccttaagaatttttgcagccaatatttaacaagtcagcctgaaaatacagctggaccctataactgtttatttattcagacgaagtgaagctttttggctaggtgcccctgttgagggcttggggtatacaactgcagaatactgatgattgttccaagtttggacatgggactcaaactgagctctacagtatagtccctgtccactagcagggatcctcagccaaaccatggaaggttgtaggtctggcttccgctagacccagctgggggactgtctcccctggagaactgggggggtggggagagggtattgtagaaagctgagccctcagattcaacttgcttgtattttaatctagcctcagaaggtaataaaattaatgttctatacccatgtcccctttttccttattccttgcccctactttgtcaatgtgttcaatgtgttcaatgtgttaaaacacaatgtggggatttggtgggtaggaatgaagactggtataagtatatactgggaaagccttgaattcctggcaaatgtaatatttttctctcctttttttttttttttttttttgagacagagtctcactctgtcacccaggctggagtgcagtggtgctgtctcagctcactgcaacctctgcctcccaagtttaagtgcctcagcctctctagtagctgggattacaggcatgcgccaccacacccagctaatttttgtatgttagtagagacagggtttcgccacgttggccaggttggttctgaactcctggcctcaagtggtcctcccactttggcttcccaaagtgctgggattacaggtgtaagccactgcgcccagccctaatatttttctcttttacaaataccattctcactaatatgatattttcctaaatgaagacaagttgtccaacatgaaagatgataaaattctaccctcctttttgcacagctaactggtggaaattattagcaagtgatctggcttctgttaatacaatttaattgaatgtgttttaaaatacaagcaacaactttgttcaaactaaacccatttttagagcctgtattgtagaatataacttttctcttgatttgttatgaaaggagtatattcttcagtgaaaatgaagtctaatttctgtatccgtgaaataagtatttgaattaacatagcatttgaaaattaaaattgccccatgccttgctgccaaggaagcagaacaggagaatggggtgccggatttagagccagtgtgcctgattttcagtttctaccatcccagactatgaccttcccaattttaatgaatattcttgcacccagtttcctcacctccaaaaagcatgctgattaagtgaaatggcctgttctgaaacccaccactctctgtgagtacaccatgtgtgcccatggccagatggccagcatgcatgatgagaatggagtcaggtaataccaatgtctcagactaagaagctcgaagatataatcttgtgctccatcactcctaaataccattttcaaagtattccctcttggaaacataaacgtccctaacccaggtctgaagaaaactttcataactaaagaatgccatgcaccaaagctcaaagcaagtagatttcaagagcgaagcatcacccactaatagatatgaggctgaatttaggtttccttcttagcggtgagtttaactgaatcattaatgcacttggaaagaggcaggaaagacagtgccctgtatattagaacaagatgcagggagcgagcctctcaagaatcagaggccatcattggagaggcctggattctggcgatttaacgaattcctgatgacatagcaaggtcgtaggagatggagccattcaccacaaagatcagatgccccaacacaggccattagttaccttgaaagatttttgtttcccattgtcctctctcctcttttaaattctctgttctaacttctggcaaggtttagcaaatggcacatggcaggaagcacttttatttgaaacagtcttcctaggataacatcctttcttccatttttatatataaacgtctaaaactatcttggcattggccaaactttatcttccctttatgtatatagctgtatcagtcttggcagcaataaaaagtgaagaaactttgaaatggtttcttcaggatgcaagcatgttgaggtcttgtgcacatgtgtgattgctggtttccataagactccagacgtgagccagttgccaaatgaaaagatcaaatctgtgactcagagagtccaatggattatcttaattaactacatcataatcagcatggttcatgcataaaaatatattcacttaaataagttcctgctattaacaggctctgttctagttgtttgagatgtatcagacaactagtgtctgtatgataagggcttatttttttgatgagtagatacttatggaccgtactacccttctaatcaggaaagttaaaaagacatggtaggaagaacatgggcctcaaaatgcaaccagcatttgaatgctcactatacagtgttagctggctaacttttacagtgattaatctgtcatattcttcccatatcagcctcagggctcaatggaggtgttagctgtggagaggctttccagagagttgtgctctctgaaattcaagaatcttcttcaagcttgactcctgataagtatttttcttcctcttacttcaggtggtgtaactgtcacactccctcaggcaggaccatggaacacagcatctttggtcttcaatcagtccccttcaatggctccgggagccatgatgggtggtcaaccttcaggttttagtcagcccgtcatttttggtacaagtccagctgtttcaggttggaaccagccttcaccctttgcagcctcaactccccctccagtgcctgttgtctggggcccttctgcatctgtggcacccaatgcttggtcaacaacaagccctttggggaatccttttcagagcaatatttttccagctcctgctgtgtccactcagcccccatccatgcactcctctctcctggtcactcctcctcagccacctcccagagctggccctcccaaggacatctccagtgatgccttcactgccttagacccacttggggataaagagatcaaggatgtgaaagaaatgtttaaggatttccaactgcggcagccacctgctgtgcccgcgcggaagggagagcagacttcttctgggactttgagtgcctttgccagttatttcaacagcaaggttggcattcctcaggagaatgcagaccatgatgactttgatgctaatcaactattgaacaagatcaatggtaagccactcaccactctgcctactgttccaacaactatctccactgccacatggacctaaatgagttccccaaatgaaccctctcccacccgccaacagctttgctcttgcttctgttggtaatcaagggttacggagacaacttaaccatttaccttttggtgataactatttaccttagtcatttctgaggactgacccaatgctgccctctagtgataaatcttaaaagggctgccatgagctattgaaatgtgatgactggtgactcttggagggctgtgtaataaggcgtcatccatgtcccatcagcttaaaatgaggggattctgaatctcttccacttcagataaatatgcatggctttctcttccgagaaggataataattattggggtacctagtatttggtgttgatttttgttccactgatgtaaatttcaaaagtatagaactaaacttcaaaaataagctgactcggggactggcctatatttggggaaagcttgtctactgattgcctggattttttaccttctagaaccaccaaagccagctcccagacaagtttccctgccagttaccaaatctactgacaatgcatttgagaaccctttctttaaagattcttttggttcatcacaagcctctgtaagtatgaactactagaagctcttctccaaagtacatgccacatagagctccagcctcctgaattaaccttgcttttataatagcttttatttatttatttatttttttaagacagagtcttgctctgtcggccaggctggagtgcagtggtgcaatctcagctcactgcaacctccacttcctgagttcaaaggattctcctgcctcagcctcctgagtaggtgggactataggcacgtgccaccacacctggctaatttttgtatttttttgtagagatggggtctcgccatgttggccagactggtctcaaactcctgaccttaagtgatccatctgccttggcctccctcagtgctgggattacagtcatgagccaccgcacctggctataatagctttttgatggtaaaacatgtttagctaagatttgtcaccaagaaccttcacagtataaacattcatttaaactggagaaagattatttgcacaagaactattatcttctgaatttgagaaataatatcacatagaaaacatccttcatatctcacttaacctgacccatgaaagcatttcgggagaaaattgagccaaaatactgtcttgaaaacctttcaaaaatttaagttcttaattttccaacaatatttctatagcctgtgaaaataatacttcccatttcggggaggcaaatgaaatgcatctgaaccttgattttcacataaataatatacactgccatctgcaagcagatgaaaacaaaacactgtaagccccatataatgtttgattggctgattggcctatgacctaagcgatttttaaaagaattttggaagtcttcattgcgatttttttcttatgactgtaactgtatttattgactagatgattttatcttcttaggtggcttcttctcaacctgtatcttctgagatgtatagggatccatttggaaatccttttgcctaaattctgtaagtagaagatcctaataagcctgtctcaggggtttttgtgagaaagggtgacatggaataaagagtgaaattttaattttagaattgggaagagggtaaatatctataatttaggagtaatcgacaggaaaatctctactgagatcattcaataatgactaggctgggcacttaagaatagaattcctaaacacatcaaaaaatagtaatatacccttggggatgtggatttttatcttattccatgttcttggtttttcagttctgtgtgggaagtaaaactcaaaacaacacatcacaggtttctaacctttttactttcatattgaagtggttgcaaaacaacctagtaataatttggtttcctataaagggttcagattccattgactttctgaagccaccaagtcagcaaaacagattatgatcattacttctctaccatttaactgtgagcaatctcaaagttagtctgaaagagtctgatggtattaaatctgaaagttttaacaactattaaagatctccttcataggcagtaggagctcaaaatgagtctgaaggttgattcttctgtctcatgaactttatcttagataagtgattaggtagaatcaccctcagctgaaatcctgggagggctcagtgtaactctttctctacagaaggtgacagcaactttattctgatctcaaaagactgaatttagtagggaaaggaacgctctccccattttagagcaggtaggccagctggtaggggtagaacaatagaaataatgaaaaacaacaacaacaacaacaaaaaccaagcccattttttttccaatcttgtctcatccaaacaggactactaaactgtgatttggctcatctagaatgtaattatttttaatagatagatatcttaaacgtggcgaaaacaataagattgagcttataggcatctggatcattttccctcaactccagttctacaatgactgtgtttcctgtagtacctttccataaactgcttcagagaactgggtaaatcattaaaaatgcaaattcctgggtcctactgcagccctaaggaatttctctttggtgccaaggaaatgcttccttttaacaagagtgcaggtgattctaaaggtaataaagcagtaagtagatatttaagagctagaagtcttaccagagatcattctcaccttccattcaaggggagatatacccaaaccaatagaaggagtaaactacactcagagtcaagatggattgtatggactaaattgaatgaactagacttctctttggaggtccttccttctttaggtcatgaaggaaggatagtttaggtcaacctgctacatcaatagattgggtaaggggaactctcatgggataaaataactaacattgttgagcacttgcgctaagcattttattagatgctctacatttatcatcttcatcaatcctcacatcagccctaggagatactattactgacatctttaataatgacttgatatttaatacattgatattcagttcaaaaattctaaccacaagtttctttcttctccatacctctctaggaacttggtctgcagaccatccagaggaataaaaaggttggccttagtagtcaaaaacaaagctgatagccagacacgttctgatttctgcccttgttccagctttgacgtattatctgttgccttatttctcattgcctcttctacttgtaaaatgcttttcactttctgtctaggttaaagctaaactgaatctatggctttaaataaattaagatcctaaactctctagcttaagtgtaaatgaagtacagtagtttccctactgaaccctgcctcttgtgtccctggaaccttctagaacacctgccttctaccctctggttgggagatgcagccaccacatcccttcatatcatactgttttgaataaattttcaaatccttattgttcagagttgtttgggggttctgtttcagagcataaaacctaaaggttatagtagaacaaggcaccttcttaaaagaaatcttgcttcagaccatcagttacagagaatttctaaagtaaaattgaagcaactacaacttctccttagacactttggaatctaaccacttaaggacctttttaaagagatagcttctcttctttctgaagatcaatttctcccaaggccaagattgtccttttctcccatttcttgctagctattgcaaatgagggaagaacattattcatctctcctccccttttttttctgattcttttttcagtcagttttgctcctgggttcaagtagtattaccaccctttcacaagcaacagactctcacagggcaaaaaaaaaaaaaaatctaatgattcacagacagatctggagcctctcttcattctcagtaattgctagtcccaagaactagaattgcaaatgggcacaacctatatccttcctgtggaagaggaggccactctcttgagctgaagttccagaagagcagttaatgttcaagagaaattgaactcaactcagcaacaaaggactctattttgaagagcaacatatcacaaagctaaatgtgattgtgccaaacacattaggtgcttatttggggtcatgctaggcctttatcaagtaactggaaaacttttcttgcagccacaatctcaatgtcgttagtaggaagataagaggggagaaaaagctgtagaacaaatgtttggggttaccattgaaaatctaatgtctgcaatatttttctcctcacaacttggaaacgttcccagttcattttcagtcctgttgtgagcacagttctgaagggtttattattgtcaaaataagttttgttttgttttgtttatgttgggtttttaatgttgtctcttgacccttaatgctcaggttcttgtgggagttaatcagccacatccaatgttaccttgagggggaagaagagggtgatgctcagaagctaaacaagacaggggccacatgaccctctattgattagccccaagtagaaagtcctgtggttttatgtttaatggtaatagttgatcatatatggcataattttctatcagcttcctactcagtcactataaacacagacttgaaatagtactttaaatgtccaaatacctaaatgtgctaaactggaggtaactatttctaggtagttgaatttttgaaagtcatgatcagccacacaactgttttgtacatacttattttctcatgcacttttctgtatgcaaataaagctataaatttactcatttcaataaactggagtggcagaatatca

SEQ ID NO: 21 - DNA, 54365 bp, Pan troglodytes
  misc_feature (43647)..(44233): n is a, c, g, or t
cctgtccttatttgcacccgccccccgcccgcgtcggtctggggcttttgacttcgccccgaacacatttcccctcccgtcgctgggtccctgcgatcgcccccagctggtggggctcgcggagctcagtggagccgggtcctctgcgccgctgcagcgcgagttaataaacagttaagtttggaagactctgcagacacgttgagggggagttaccaagcccaggcagcaaaaacatcctggcacattcctggggagtcctcagctgccagcatctgattagaaccatatctctcgccgggagtggccgcgcggctccgaagctcccggccggcggctatttaagcgaggcccgccgcatccgctgcgctgcagcctggaggctccgggcgcggggaagtcatgctcgcttcacggaggcaatagctagccggtgagtagcttcgaaacccttcttccctctggctctatttttttttttttttaaagatctccttctctcctttgctccccctctctcacccccccgccccccgctacccttctttgggtacagaccttgggctgtggggaatcttagaaatgagaccctgtgcttggggaaaccagcagttttgtggcctgacatctgaggaatgcttccatggaatgtatttacctttcgaatccgactccagatgcccagcttgtgacattgaacaaacgcctccttttgtgtcgtgtgtgtgtgtgtgtgtgtgtgtgtgtgtgtaaaaggtctgcgggcagccctcctaggacactgaggtggctgctgaccgcctaattaactcctcgaagggtgtttatttttgctgtgtgacaaaggctggggacctggcttgtgcccataaggagctttttcctggtgactgacaacatatggcattaaaatgtgaacttttgtcttacaccggcattcctaaggaagtatctacccgagggacttaagaaacttgttttatatcccccggcgcagggagcatggtttatatggtgcttgcctgcctgttgtaagctggttaaaaagattaagtaagaattctaaaaaaggggggaaaatgaatgggttaaaaccgtggagcctcagtcaacatagcggttttcatagcatagagctgactctgttatttgtttctgccgtctttccctcttgacttaattctgagcctggaattctggtccgcagacagtttcagcagggagctgagtccaaagggaaattcaactggattaaaaacacttaaggaatctggatgttatctccaccccaaccaccccccaccttttcccctttctttttagtttttgtttggaaggaagagagccgctctgtaaaccgagaagagcagaaacaagcttccagacacatggaaagacttaaaaattatggaggggcgacttcacgaatagtaaatgttgctattgctctataaagtgacttaatgaaaaaatttctggccttaggcaaagcaggggcatgggggagaaggaggtaagatataactaatgcaaacagaagtaatgggagtggaaagcaggcatctacaaaaaatgcctttgagatgtctgataagcctcttggaatggctttgatgagatgtatacttgattgtccttacagtcttgaggttggcttctcacacaaaagcacctactggctgttggggaggagggagcttgcagctaccaaatggcttgtcaccatgcttcttaccccagcagccagactttgggaggctacttttctctgagccaggtgccccgcccactccaggttctgtgtctcccctcctggaagggagatggccctcagtgacactgtaagaaagtttattgccttgagaattcgggagtatttgaggcttgagccctttgaaatctttggaaaaggacctttttggtggagtgctggacttgtggaaataatgccacacttaagacaacaaggagagtacaatgggaaagtcttctagagaaagcatgaagaagacctagtggtctttgccaatgtggatttctgggacagaccacttcttccaaatccttagtcagtttcctcctaaggccaactaaattcttttttcctgttgttggtgaataacttcccccttcttttcccactcccagctggaaggatcccttctcatccaaatgactgacctagaaaccagtcatttttcagctatgccctcctatgctttaatgtataaccagaataagtagatggtagaggaatgtcttccaactttgagcccatacacgtatgtatttgccattctggggatctttgatcttggtggttgatctttacctgaggatgtaagtgagggaagaaagcacttgttaaaaaccttgtctaatttgtgaagggcaaaatccagagtttgtgtttctgctaaagacttttatagtttcagattaaactggaagtccaaattcctgtgcattaggcctgtttgttgtctttctccaaaggttgaatggatttcactggccttgtttgggttgaagggtacggcttttaaggcatttgttggcatgaaggtagtacagggacccctggcggctgctgaccagctgtttggggatgatatttactggcctgctcaaccaggcctcgattacctgaaggttaagggagcaggaagatatcttccttgctgagtgctcctggccaagcaggaggctttgctgtgacatgggctcttatgctgcttcatttctaactctaccctcatatgtccataaacctaagtttgctaccactgatatttcatctggataattttgaaggctctgcgtgtttctcttcctcattctcttgacctgaggatttaattattgctcttcttaaagacaaagccaagatgctgaaatgcttgggaaagctgctgagagtgagccctcctggggtttgaagttgtcctaatgctcatcagaacatacctccccagctggaaagattcgaaagcttactggccaggaaggtttaggtaactaaccaaacacataaggttttttaccctttagacagaaccagaatgggaaccagattggcaatatgaaacacctgagtaacaggatgtggtattttaaaattctccctggcactgctatgtaattccaaagttgaagctgtgccgctgaattgcacaaaggttggccaaaatcatatttagatgaaaccgatttttgttttgttttgtttgagacagagtctccctctgttgcccatgctggagtacactggcgtgaacttgacccactgcagcctccgcctcctgggttcaagagattctgtgacctcagcctcctgagtagttgggattagaggtacccgccaccatacctggctaatattttttttttgtagtagtagtagtagagatggggtttcaccatgttggccaggctggtctcgaactcctgacctcaagtgatccacccacctcggcctcccaaagtgctggaattacaggcatgagcccaccacacccggccagatgaatcagatttaacaccagatatgtgtctttaaaggagacccaactcataatatcaacatatcctgactggattaactggtggaaatcagaaggaaagcagactcctcagtctttacttaaagacagaaaacaagcaaattcctggttaggggaacaaatgatgcctggtatggacacagagggctaacattcagcactggctgcctccaacagggcacaattggatagtagttgagaactaccttctgaagtaccatttcctgggttcaaatcttagctacagggttgcaggttacatggccttgggcacattccataacctctctgtacttcagcttgcttatctggggagaataatagtacctaccccaggattgctgggaagacagctaatctaatatacttggaatactttttcccatctgattttgaaggttttgtttgtttgttattactcccccctgaacaactgaattaagtgtctttgtgaaaactgaaagcaaatggaaaatttcttcatgaaaattgaatacccctcacctacttgaaaaaggttaattattcaagcacttgattttaataaagccagtgtgtttgcttgtgctcatgctagaacagacagggagttactctctgttctcatcctggaagcctgcactttggtttggtcaggctgacctcgctgttctcagttaagtcctccccacaccctctcagactcccgacagagaaggagcaatccttccccctgaagtcagcgttgtcacagaaggaagtgggaagggagggaccacccggattaaactgaatgactaggctagaaataaaaattcttccgagtgtgtgcaggccccatactatccttgcccacatagctgggcaggttgccatggttactccccttcccgcatccttctaccctggaaggaagcctgcctctctagggcaagtagaatctgaacaaattgcttcctggtctaaaaatggaagttactaagtgaagtagaatctcctctctacttatatcaccccctccaaactgattttaatcccaatacttaattttctaaccttcctagttcttgcataatctagatagcaaaacatgaaagcttatgaaatttctggaacctaaaagttactacctcaatatagaagcagcctggcaagttttccctacatatttgtactagctagctaggggcaagtgatttttaactaagtcaactggtaaaaattccaagtgaatggggcaggctgagtgagtgttacgttgaaggtaaacagaatgtatgagggctgtcacttagattttcaggtaaccatagagtaaagggagcaggtaaataggaagtaacgatcctagaatactggatttgaagcaccgttcaacctagaagaaatctggatgagggaaatatggtttaatgttgtctcttggtaaaaaactaccctattgctacctagcaatatgatgcaaaatgttagtcccaaaaagactttgatctttatgtgaaagatgagctgccatacacaagtttgcatttgacaaattaattcagtctttcaaaattggacatttagcttgctgtgtatttcacagcttgagggaactcatctaagacaatagttctcagagctgattcccaaaccagcagcatcaacatcagctggggacctgtcagaactgcaaactctggaagttgggcccatccagctgtatctaaactagctctccaccacgtgatctaagagtaactttcataattcagtggttttaggattcacttgttcagtggaaatcataacaaagtatttgaattccttcagtcatggagataataaagcaaaagcctttaaacacagtgcagtttaactgaatcttaggatgcagaaagattaaaaagcatgggctttggatatttttcccatataccaagtatggctttcttgatcctaggaaacccaatatacttttggtttgatattatcatctcacttccaaatcttttcccctctgctggggtttttaaagagtataattcatctccatttattaggagactgtcccacttacttcttttagaaaggattccagtaaactagatcattacccttgaaccagatggttttctctaacctatacaactttttattttgtttttatgccgtgtctagaagtgcagatgaagtcctctccataaatgaatctacttcatttagtttttgtaaagtttaatggctaatgaagcactgctcctttctcccattcgactttcactttaagtaaccggaaatagaaaagatatctctatttattggctccaatatgatgagtatcttgcccaaggtgttatcattaagtggtagagccaggattcaattatgaatctttatgatttgcaccttggcgtttatctgaatacttagcaattacctactatgtgaagtctgatgctaggttagcaatggaaaatctcccagtgagcagaaatcaaaacaaaagtcttcctcatgtgtggcaaaggacataggatagagagttaaacagacttacatgtgaatggcagtgctaccatttcttgggcatgctattcaacgtctctggcccttagttgtctcacttaccttgcaaaaacagtcctaagaatgcctgatgtcaaacagagatcacatctcaaactgaaaaatacaagggtgtgatgtacaagtatataattggaactctgattttgaaaagccaacatagattcatggttaagagcttgggttctaagctgcaaatgactgtgcccacagcctagctttgccatgtaagacaagccatgtaaggcctgagcttcatttctccatcaggaaaatgagttgcctcgattttaaaattaaaaactcctcagaactcctgcggctgcttctgaaatttacctgtcctagaaatgcaattctcaatgcaataactaagctgatattttttaaatggtcttgttctcattgtttttgagtatcaggcaagctaaattctagagatgcacacattcaggctgaaaattagaagactgtctttcctatatatctttaaactattaaatgtgaataatcaaggaggagaatgtggcaatgcttcataaatcagtagaggcacacaaatactaactttaaggtaccacttaaacctcatctgagcagggcagttaagtccttttaaggtctatagttaatccatacccaaagaactggaaagtgaataacttcatccctaattgtgtccatattgaacacagctgccctctcggttctaaatattgcatccaaatgatctcacttattttttttatattttaagtgtcctattagggggccaagacctggtctagttttctgtaatatgtaatacagatgctaacgtgctttttgttaccatttagtgcaacagaaataaaccaaatgtgttcgaacatatgtcagagggctgacataatcatatgaagaatgctataccagtttggctttgggacgaaatgtgaatctactagggaaacatacaactgccctctgagtcagaagatcagaagttgctgtggctacacatagtaggtgctcaaatatccatcctttaaagggaagggtcagctgtgctttggttatatcagcattaggttttgttgttgttgttacttgattttgttttgtgttgctccctgccccctttacctctaaaattaagcgacttaaatgcaattcatttttgaagtagaaaacaagtatgtagctgatagaacaggcttttccatcaatagttggttgctagtaaggagggtcaatattgatttctgcctgggctaaggttcaactatagctgaggcttttcagagagcatacatgtactagaattgaaatgatagacagttatatttaatgtccacgctgtcttctaaaggatagcttgatgcagaaatgcttgcttaactgcctgaaaacctgttctttgtgatttctgatttgtctaactggtctgaagttcccaatgactaaaagttgatagtaattgaaagttgggtgcaaatatttaccttagagggacacatatatgacaagagctgcctataagatagttagagaaaatagtaactactcaactaacatatgattttattgtagttaagtggtacagagtgttgtgtggatccagagggagaaaaaggccattggtgttaatggatttggcttttaaaggaacaatggaagtcaaataagcaaaggtaagaaaagaaaatgcattttaggcagcagcgcatatgcaaatcatgcagttggatggacttagggtatgcctaaagaactctgactggccagtttggccaagaaacagtacaggtggcatagggctgagaagtgtctgagtttgaaaagtagggatgaattatactgagccatggatatcaggataagaattttgattttttatttttatttttgtactttagattctggggtacatgtgcagaacatgcagttttgttacataggtatacacgtgccatggtggtttgctgcatccatcaacccatcacctacattaggtatttctcctaatgctatccctccccttaccccccaaccaggcgccggtgtgtgatgttcccctccctgtgttgatgtgttctcattattcaactcccacttacaaatgagaatatgcggtgtttgccaagcagatccgtcattaaagcaggaaaaccaaatgctgattgggataacttaacctggctctattggcagaatgtgtttgagtggagattgcttagtagttgaagaaaagcctatatttcttcaaaaatcatcaaagtagagaaaagggttgcttaacctaagattaaggtgcaaaaagaaatatttattacccctaatgttttaagcgcactgctcattaacagactgtgtcgagcctagaaaagtagggcaaataattttcggatcccaaaagctttattgaattgagagaagagctctacatgaatcagagggcaatgataggtcatggcaaatgtggggaaatggctggtaagaggccggtaaagacttccctgagaccacacatcttgagtggccttggaatgaaggttttcacgaaattcaagaaggtgaaggcagtacatattacaggctaccagaccacataagaaggtctggtgtgtctatgtgtctgtttaggggaaacagaagacaacggcctcttcagagagcaggtggccatatatatgtatagtccgcagcctgattagaagggctttgaatctcagcttgaatgtgaatggaggaattgaacaccgatacctgattaattcaaaatcaggaaagctaggaggccagtaaacactcctacaaaaatttagccataaagggagatcagttacaaccagagtctcttacaccttagattctcactgaagccctttggagaaaatggaagaaagagctcatcccataaagagttgtttgtttgtttgtttttcactttaagtgttttaaatatattaaggagtacttatgctatgtgtgtagaaaagatcaacaaacaccataatataagtccactaatcatgagggacatgtatgatacaacgtggtatagcttttcagggaggaggaactcagggtggcggtgaggcaaggttggggagaaatgctggaactaagtaaaaaaaatatatatatgatggggagggaggagaggtgtgaaaataaagggtaattatgaaaagtagactttcagaggtttgactcattcattaaacatgaacagtttaggataaaatcttagcttcattctaagctgcagacagtactgttgtggatcttttaggtatatctgcatacgaagtacattctgtaatgctgttcccacttagtgtatagtgatgcaaatgttcagctttctgcacaagaactctttcatagaaacagtgggcacaaccatgttctgtgtcaggatctggactcttacacttcatgcagccaacatttgtggagggctcactacttgtattgatcatgaagtccatttccttgaagaccgacgttgaccaagtgctgcctggtagccccttgataatgctcttgtgacttggtagtgctctttaaataactaaagccagctatagggacccttggttacattttcataagattgtttcactgaaatctgagattcaatgtttggcctgatctgaaaatgacacgttgtattcttagaaaatctggtaattaaaagtgccacagaacatgtctggttctagaatacagaagttccctgaattgcttgtacttcttaagtgaatgcccgactgaatgccaaatgagcatagtgtttccttctggtgtttatgaagatagtgttgattcagaactttggattttatgataactctgaaggaaacatcactgaaattcttcaataccctcaggtataacagaattgcttccttctgttactgccatacagatggtccttcagattgtaacgtggttataggagactcataaatattaaatgtaaatatcccctcaatttgtgtcataatttaaaaattgttgaagagggttattaacccttcagacaacatttgcatctttccataattgatatcaatacagcaatttatatataattccttgatgtaatactactttttcttccttttatgaagtattattaacagcaatgaagctttctaccctaatcagaaacaattcctccaaaacacatagcatcagttataactgtgacctgcttgttctttctcccctacctatcctctaagcccctttagagtagagaccatgtctattttgtcactctatacataggataatgcagtgcttggcaaatagtacgtgtttaataaacaataaccagatggccaggtgagtgagtaactcaagccactttcatttacaacatcaattgcaatttattatagagtgagcaaaatggaaaactttagcttgccttatcatctgttggtataagcaaaacagttctgacccccccccttttttaactttaaggttatttataatgagcaatatccatatgttcttctagtttatatctgctcagggcctgaggaaggcagacaagctgttactgaaattctccagatggtgtggtctttccaagttgctagtttaacttctaccaatggagtattcatcgttgctcatatatctgtctgacctgatggatgtaatcacctggctaataagaattgtggtgaatagatttcagcctgatattttatccacaaacaacttcttattctccttctgtttctccttttaaaagtgtccaccaaattgtttataaaattactaataaaatttgagaaaatagatgagacctttggcttagcactggataattaaggctattgttttgacttaacacaatttctgcccaaatcaaagaaacttgttttgttttgtttcttatttccctgtgcagctgtattgtgaattaagatatccattaggctctttaaaatgctaaaattaggtcacgaactcattaccgtctgcacagaccccagcatttccaagaaccccaggccggaaaccaactataggccatccactgaccaactttcaaaatcctagcataagagttttttgacttctacttatcatttgactgaaaacttactgttgaatttttcatatgtcaggagctttccccaacaactctgcctagctatcatttaatgatgcctaagatgaaagtgttgacagctgactatgggcactgttcaatgtgatttcagatatgctcatgttctatgtgtggtttcccttcacttttgagtttaattgaaagtgactgaaccctagagcatcttcatgattctgtctttagcccaagttagactgtagacttatgcctacattttaagctttcctgtctaccaaattagcacatctttaaggaatttaatttttaaaatacagaaagcacatcgccccaatatcacttattctaaatgtataagaagcagaaatctgtcttttcctttcctactgcccttcttaatgagcattttcttggcactggtctttccagactttcaacagttttatggaaaaacatatataaattgggaaaaatcatattaatactttctgcttcatacaagaggctataaatgcatgactatcttagtaaatagctgccatttacaaaagatgctctttttttgtttttaaggagctcacatttcaaaatgtcattccacttcatatacatttctataaagcagacattaggggggacccttttgtatgatgaaattgatcttagaatgtagggtgtaagacataatggcctttgactttttaaaaagccacctttaagacattatatttatttgaagtttgagggtcactaagcatcagagcttggcaagatgggataaccttgaatctaatgtttgagattgttagtccttaacctttcaattaaaagcctttgtttccagaagattagccaaatatttgaaagaaaccggcaatgttgagtcactccaaagggcaagtctgtgcaactgtcatactgcagagctctctgactctttgatgccgtgtccctgtactcggatttgtcaccaccccaacctccacaccatcactcaaaacctgaaagtcctcccagtcccatctagacaaaacagagtgttatcgcccaccctaatccagtttgacccaccttttaacctttcccctggtataacccagcacaggccctatattatagccaagcagacacgaatatcttttacacattgctattagttcctctttcctgaaagtactttctggctatgcacgttgccccagtctttgaagaactaaattaattatctcttttgttgtaaagcaaagacattaaagcatatgtattaggttggtgtgacttgcaggttgttgcttcactcctgtgcttcagcctcctctcctgtcaaatagggatgatactgtccaggattaaatgataatgtcttagcatcacatctggtatataataaacattaggtaaatttaacttttaaatatctaatattctgtgtttctaaggaacatgtccaggacattctcagtcctggattcccaaatctattttcctctactctcctttctcgccagagcatttttcatcttctgaaagtctatactccacttacgttttgctccctgttagatagtaaaccctataaaggaacaaatctttattttgctcactggtatatcccaagctctagaagaatgcctggcacttagtagggatgcagttttgattacattaattaacttgctggtaaagatcactggaattcaggggcaaacttggtttccagtctctaaattgcaatggctttaagttgggatcaatcaccagacccccatgtgctctaaacaacaacaacaaaaaaggctgtcagggtctgcaggcttttcaagttttgtcataatcatggtttcacagcaaaatctagggtagctagtggcctaccatttgcgtcatctctctggccatgcacagtataagggaaatgacatactcttaagagtcaaagacatttgtttttttcccccttaagggaatgttttggacccaggtgcaaatataaaatagcatttagggtaggaaaccaccccagctctgagagcgaatgacagactcggagaagggaactttattcacatctcacctctgataattaactctaaaagtagaactttgcttattttggaggtactatgcaaacttggtagtgttgtttctctcactgttttccttgatggaactaattgttcatatgcttctgtggtatgttaattaaggaacacattgctagttaaaaaaaacactgcaactgtaaatatttttctaatttcacattttgctttactaaaaggcttctgtggagaatggaagggcttggtcattacttttggaggatttgtcttaacttccttgtctgcaatattgagtctttttaataaagattggattaggaacttaatagtggctttcaaagaagacttgtctttgcacagggctatagagttcagctaaggaaacaaatgatcgaattgcattctctgatgctaaaaatgcctacataggaggactagaaaatagcatatgctaccatggagtggatcctctgaggcttcaaggaccaaatcaagttacttttatttaatgaccatagtaagaagcatacagagaggctacaaatggagcccctatctaatcacttgtgtccatcccacatttcccttaagtattgaaatggcaattgctaataggtacagagttttgcaacaggtcattagtggttcagagaacagaggagactgctctgaaagaaaataaaagctaatgaaacatcttgcttaagtattacgttttttatgaaccaaggaaacttcctttattatgactcattgatgttgacattcccgggtagactaaccagaaacctttttttagttcagtataaatatgagtatttcataaagggccaagaggtctcagctgacactcagctaagtgtcatttgataaagaaccattcctattagctcacctcatgctagaactataaaccagagtggtacccccatgattagttaagttaaagactggtgtgcattcaacaggcctggagaaagaagaaccctcatcccatctgcttactctgggaaagtctcccagtggtaagtcagattttttaaccaaccttttgcctaaagtcaaacctggaccattaatgtggtatgtgtgacactgagggctaggcagatatgtaaatgataaattttagtgaaaagggaaaatactcaatacaatttctagccaatactctgcaaactagaaaacaatataattcatagtgtattttttaagcaggttagacaatacagtaatctcaacattaacataaaccaaactcatttaacatggaaggagtaaagagctggccagtactagatgcactgtaaaattatctacagctggagatgattttgaataacacatattaaaagatacacacatagatctaataaatgagtctttacagcttagaaaaccagaaaaactcaattgtcctagtatataaatttttcatgtcaaataagttaagcccttagggaagtagcagtttatttggtaccctatgatttgatgatttgtttaattaatgcattgccttttaaaatatcccaacagagttgtttatcaggccagtagtataaggtttataagaaacaacatcttgcatgggctattacttcatattaatataaagttaagatactaattacttcaatcttacagattatgtccagatcaaaagtaaaaagaatatgatgttgcctttgggaaagaaaactagatttttctacgatcctcaaaatttgttaataccaaaatggttaataccatctcaagagcttatcttaaaaaatgtaaatggagtagtcaagacttgagcgtttgaaactgttacctgatgacataaccaggtagcttttctaggatatcttgtttttatgcaactcatacaaagtttattttttccccttccccagccctggattaattagagatgactaaaatagatgactaaagaaaacaatctagtggagtatacatattagaaaatcttcaaagtccctctataaatcctagaataaactttctgaaatctgtacagattaaggtgaaacttgagatctgtccttgtgttcttggagtattacaaccaagaaagaagatgtgtgagctatttaatatatattccttcctaagaagtcttagttctctgaaacactatcattcactttaatcttatctgtagaggtcatctaaatgacttgtgaaaagtggtatagaaattgaattcctgaggtcttctctggattaggaacaatgtttaatggttggggtcaccaaggggtggttcttttctgaaatctctactagacacaaggttccttgaattatgcttccaaacttgctgagtgtgcttcctgatcccaaagatagatgtctagccatgtttgtgaaagggtagaccagtcaatggtgattacttacatgatactaacaggtgtgattttaggtatgtaaacttggatttatataaagaattcatgaaacaaaacttgtctcacttacagactttataagcaaaattctgatattaagtcggtgttttattgtattaataagtgaacctttctatgctcatctatttctgcagttactgaactgtatacagatatttcaatacattagaacactttgttgttcaatgtaaattctccaattgtgcaacaactaatctgtttacttcagtataaactagaatactgtcatttggaatttttacatccctcagtttaaaagtgcatttatttattcccacaaaacatatttgttccaatactatttcccaacagatgagagaataatgacagatgtgaactttagctcaagaatacttgtgcatttctgccaattttgttcatcttgtactcaatctgcagcagcattttagaggtttttttttttaaataatcataagcacaatttcaagcaggtaggctaactattgggaggccttcttttggatctggaattcgactcatgtggtattattatatgatcacaaaaagcaagacaccaatttgacaaattcacctctctcccttgtatacaaaaaccgaaaattacccaggggtttcttatccattaacctatctaatttgtccagtaaccaagaaataagcaaataaggaatatattcttactcgtagaagaactctcctggacttttaggaagcccagtctgatgttgtatattctaggaaacaaactgccaagattctgaccttcagcctgcttgaacactggtatcaagaggagagatggctggttgtcaggctgctggttctctgcaaacctgaaatttgacaaataaatatcaagtcactttttgtttttaaatgactcctttttccttcatctaatttgaaagcaaccacgtcttgtctaaaggaaattaactaaatcatgaagaaccattttttaaatgataatattttgagcacaccagataacagtaaatagtaagcagtttcaaatcaaaacaaacatagctattcatagccactgggattagcaaggccaccaatattcctggagatgaagcctaactgccatgttggttgtggatgtcttccccaactcgaatagatcatatcagatgtggaaatgtgacccagcggcaagtctctcatggaaggttaatgccaactctatgggtaggttgaatatcaaaacaaaggacatgccacctagaacctagagacaacatattcgaattagattagttaaactgatcttgttttgagtctgcataactgtaagaagtgttttcatggttttgctctctatacagaaatgcaacaaaaaatacgttccacctgtctgtatacaatcactatgtacaccctagtttgctctgtgctgatttacaagtcagctggattcttcttccttcaaactctttaaacagtgtgtccttgaaacatgagttgcaagaaagggtacagcaacactcaagcaatggctttgaggattatataaatatggggcttttcctggaaagggaaaccacattgggattttatataatttagccaggctattaaagaagaaaccaaatatcaggcagtatttcttgcactggttttcggaagaggagaagtttaagattacctgcttgttttaaagtgccctggtgtggtatatatcataaaataattctactagtgtacgtagcccttcatttatagcttaatgtttatagcacagatgcttctaaattacatgctttttaaaaactcttctaacatctgcatagactttcaagctgactactgtcatggcacttgaatagaaagtgggaagtatttaataattaggatttatatgcatatgcgtcataggtgaagtcacagagggacgtggatgaagaaatgattgtatcctgaagtccacgagtgaggtatgctgcacatctatgttgacttaattcaggattatttcatacggggatgagaatgcacaacctaatgttgtatattctaggaacaaactgccaagattatttgtatcattcattttaaaactagcatggtgggccggacatggtggctcacgcctgtaatcccagcactttgggaggctgaggcaggagtttgagaccagcctggccaaaatggtgaaaccctgtctctactaaaaatacaaaaattagccaggcatggtggcaagcacctgtagtcccgacttctcaggaggctgaggcaggaaaatcgcttgaacctgggaggcggaggttgcagtgagctgagatcgcgcctctgcactccagcgtgggcaacagagcgagactccgtcacaaacagaacaaacaaacaaaaaacctagcatggaaataggaagaggagttatttttggtagaaatatctaacctagcttagaaaggacagacatgaaaacagtaaaacatttgctgggtcagtttgggtaagtatatgatgagggaggattgtagtaaaagctatgaatggtgtgagtgcgttgcctctgagtcttaactttttgactaccttttcctgccaggatcaagcataatacattgtatatttagatgccaaatttaaagtaaaactcatgcatttactgtgttttgtatcagttccagagtgcttctcttcaagtcactgccccaaagacactgcaatagaaaaattctagaggtttctatgtcagtagtagttttttttaacattaaaactctaatatttttcatgtaagttgttcgttctttagaaaattgtatgcccttggatttaggatgggagggaagcagaatgaaatataatatcctactttaccatctaatgatacaaaataaagttcttctaaattcaaattttaaaacgggtttattctattgacccattccagttgcctatgaacactttagctttctaaaatcttcttccaaaagtgctttcttggtatatgttctgattaatatcacttcaaaactagaaataccaagccttcctggtcttggggtctcctatgagggtcccttcctgctgttgtcaccatggtgtgaagtcttcagcctcatcacagtcacctagtgcaagtgactgggctaccaccaaaacctggtgggttttagccactgaagaaagtgctctggtgagcggggcaggtttggccatctctggtcctgcagtagtgtctccaggtatgggaagtgctcagtagagttccgccatgtccctacagccctctggtcacacggctctttcagtgtgataatgcatgccacccaccagccactgcaccaaggcatgcccatgctgcccgagtctgcttggctgggtcagattggacacctatgcttgtgccaggtctttagttaagactgcccaccttcctgttatgggaattcttcccttgggccctccccactgtgtcagaccacttcagcccattgatcatttcccagaagtgcctcagcttactctatagacttgttcaccagcttcccagatacctttgagctttaaagcctaaagtatatgggaaagagtagcctttgccaaactcctccaaccccataataaagccatattatcctttttcccagaacaatggtttcataatagcttttcctcagaagtaatgggaatcactcatggcttcttccataggtgacttgatatttctctaagtagaaagagaagcagctagtgaggtggttcgagatgacatttaatatcacaactctgggctcaaggatgtagtcattaccttgccaacctctcttccctacatcacttcccagggacaagtacaaaatggagaacagcatataaggaaagacataccatataaggaaagaattatgcatgggcataggtgcctagcaacctccaaatacagagctctgcaaaagctatgttgcagcatgctatgcactagactgtaattccccattgtcttttccttgtcaagttgtgcccacaacattgtcctacccagcttgcttgagatatacgaaactcacgtaccaaatggaccctgatgtaaagcaggtcatagcccaaatgattcagtgccagcaatgtaaggcaatgacagaaatgtgatttttaacctctgtagtttccctgaagtttcagtgtcacttcctttcctttgtagaagtgagttaaaggagaaagttggattcctgttctgtgtagtctaagccagaggaggttatacttgagaactggggtggaatatgtttcttctcccacattaaagctgaaatgggtgtatactctctaatgccaattaattcaacctcaagcctcatatgtccatattcacaaaaattccacgtgatcaaaagaccaaaaggacattctgacactgctctctttcttagaagctgaataagtgtaaagagggattctagaatcaatcgtctctgcatgtctgtgttcatacaagcatattaacttacacccagctttgccgagaggccagaacatgttctcactgtgaagactacactttctattttttccaactttagtgcagttaagtgttcaaacagcccttgtgctgaaacaacaaagcaaaaatacaattgcaaaattgatcataaccttaatacttctgttcaacttgtgaacactttcagacacttgccgtgaattgagtggcactgccccgtctaaaggccaagtgtggtggctcatgcctgtaatcccagcactttgggaggccgaggcgggtggattgcctgaggccaggagttcgagaccagcctggccaacatagtgagaccctgtctctactaaaaacgcaaaaattagctgggcctagtggtgggcgcctgtagtcccagctacttgggaggttgaggcaggggaatcacttgaacccgggaggtggaggttgcagtgagctgagatcatgccactgcactccatcctgggagacagagcaagactctgtctcaaaaaaaaaacccaaaaaccaaaatccaaaaacaaagaatgtgcccttatttggatgcataaagcttctttgaagtttaaactcttctaaacgttctttatagaggggactgtttctttctttctttctttttttttttagataataaaacgtgcatttattttttatttatttttttaattttactttttctttttttttattatactttaaattttagggtacatgtgcacaatgtgcaggttagttacatatgtatacatgtgccatgttggtgtgccgcacccatcaactcgtcatttaacattaggtatatcctaatgctatccctcccccctccccccaccccacaacagaccctggtgtgtgatgttctccttcctgtgtccatgtgttctcattgttcaattcccaccgatgagtgagaacattgacccagcaatcccattactgggtatatacccaaaggattataaatcatgctgctataaagacacatgcacacgtatgtttattgtggcactattcacaatagcaaagacttggaaccaagccaaatgtccaacaatgatagactggattaagaaaatgtggcacatacaccatggaatactatgcagccataaaaaacgatgagttaatgtcctttgtacggacatggatgaagctagaaaccatcattctcagcaaactatcacaaggagaggactgtttcttatgctccaataagagacattcttaataacaagttattaaaaaaaacaaaatgggtagaggtgggtacaaaattaggatgggttataatgagtccagagtattgaaagttgccaattcaagagcttagacttcctatcatgctcaaaaaaaaaaaaaaaaatccaaaaaaactaaaactaaaaggccaaacactgaatagtagagaatgtaccgaaataaatttaaatgctttgatctgcaagtctcagacctaggcaaagcagccaaatcaatattaatgagacagtttgaccaagtaactcctgctacctaggcaaaaaggaatctagtgacaatgtataatgagagcatgtaagatcctttttctattttgattcagaaaacatctataaaataccatgttcaaattaccctgctaagctatcttcttgttcttttgcttggtatatctgctaaatggaaggcattcttggttcagtccccatgtaatgggctttgtacatcctgtttttaaaaaatggtttttaaaaacaaacacatgtaatctctagaaataaggcattacagtctcatgctagatctttcctggtgccagctttgtcccctccagctatttcacaattagacaagtcaaactctctttcttgccctcagttttctaatcattataataaaatgatgtggccaaattattctctatttttctttcagctcaagtcttggtatttctttaagcagataaagcgttgttaaagtaaaccatcgcacctcacataggtcagtatattgaaatgatttaggaatctttaaaatatattgatacctgggtctctatgcccagagactgtgatctaatttatctgggaatgccatgaatatcaatgttttaagaattccacagtaaaattttcccagatgatgtgaagcagagcttctaaactgtccgtgataatgatgtaggcatgaattttaactcaggattcattggaacaggcatctctgggtaacttagagtagattttgttcccagagtctgtttctatcagaacccaacttttgtaggctcagaaggcagagctgagcaggaggtggctcttacactggcaaaccatctcacttttccacctgggctttactagttaaaatactaggctgggtgcagtgggtcaagcctgtaattacaacattttgagaggccaaggcagatggatcacctgaggtcaggagttcaagaccagcctggacaacatggtgaaaccctgtctctactaaaaatacaaaaaattggccaggtgtggtggctgatgcctgtaatctcagctatttgggagggtgaggcaggagaatcacttgaacccaggaggtggaggttgtagtgagctgagattgcaccactgcactccagcctgggcaacaagagcaaaactctgtctcagaataaataaataaataaagtattacaccattccacctttccacttattagtcatttgagcataggttcttactgttctaaaagtgtttaaacacttactgtggaaatgcaatgttggaaagagcacaagactacacaacacatagcttctgtgacctagctttggtttaatagtagctactgatatggtttggctttgtctccacccaaatctcatcttgaactgtggctcccataattcccatgtattgtgggagggacctggtgggaggtaattgaatcatgggggcagtttcccccatactgttctcttggtagtgaataagtctcatgaggtctgatggttttaaaaggggtttcccttttcgattggctgtctttcttgtctgccaccatgtaagatgtgcctttcaccttccaccacgattgtgaggcctccccagctacgtggaactgtgagtccattaaacctctttttctttataaattaccgagtctcaaaaatacaaaaaattagccaggcatggtggcaggcgcctgtagtcccagctacttgggaggctgaggcaggggaatgacgtgaacccaggaggcggagcttgcagtgagccgagatcgcaccactgcactccaccctgggcgacagagcaagactccgtctcaaaaataaataaataaataaataaataacccagtctcaggtatgtctttaacagcagtgtgagaacagactaatacagctaccatttgttaagcactttctaagccaggtgcagctgtcgctatgtaagttcttactgattttttttctaatagctcagcaaactatattctcattttaccaatgaagaaatgaacattagataaattgcctcaagccacagagccaggaaatgatgaatcctaggtgggtggcactcacaagcctgagctattagctgctatgctatcccacctctacccaaagttaactgtttgatagaatcttaactctggtctgacttggttccaaaacagggaaagcatcttggttcaagatttactaagtcctctaagtcctgccatatcattttcaaagattaaaggcagtgatacctcctcgctgtaaatgcataacttgtggatagctcattgactcgggcttgttctgttagtgaggcctctacagcagtgtcagcatttacaagaaaatcttctaaggactccttttcagtatgcattagcatagtctcattcctcagtgaaacaggctgtaaaaatcttactgtctgctcagtttggtctttgcagagcagaagagccttcctaaaagcataagaatccaaacaagcagttaaaggaaggatttgcataaagtatcagaaacagtctaactttgctacagcatcgctggtaatgacccctattcttaaagagctactttgaagatagcagtgaaggctgtttgctgccctcttggaccccgaggtctgtcttagaggttaatatttcacatgttgtcctaattctgcactttagctgaggcaggcagaaagttcaaagaaacaaggaagcacattctctgtccagtacaaagtactggacattctaaacaaatatgtttatgttgctttcttcttgagtctccttaattcctttccctgtgtctattatatgtggcttcttgctaaaaattaatggtgtgttaatgtcagtgggatgatgactttctgaaagtagcttataaaatccaggttaaaatcagtgggattcaagaaaagacaagagagacagtatatataagagaagaggaaacacagactacgctcactttgagcctaatggcttatgacggattgattttctgttgctgtgtccatttcattattcataaaatagagacacattcagccgggtgcggtggctcacacctataatcccagcactctgggaggccgaggcagtggatcacctgaggtcaggagctcgagaccagcctggccaacatggtgaaaccctgtctctactaaaaatacaaaaacttagccaggcatgatggtgggtggctgtaatcccagctactcgggaggctgaggaaggagaatggcttgaacctgggaggcagaggttgcagtaagccgagattgcgccactgcactccagcctgggcaacaagagtgaaactctgtctcaagaaaaaaaaaaaaaagagagagagacattctgtttcatagacctttcggaataagtgttcttagtggttggtatactaggtgtttgtcccattccccttaatgttaaaaataaattccctaccatctgttgaatggggctaccactaagtccttaactcaaattattccttttaccagcattttgagactggcaaagcacttttcctgcctgctctgtataattagggtaagaaggtaggcttgggagtcacaggggaggatggttgacacttgtattatgatattgcttcaaaaccttggaatcattaagtagtaccattgctgatgccaacacattcctactggtagaaaggataaggatatataagaagtgccaaccaactttacccctacaaagcctagactaatcattgtccaccaggctggcaattgaaggattcaaaacactagacattttatatgaatcactaaggactaagcaatagctgatttttattattgcaaagcccatagtcattctaagatgactcatgcagtcttccagaataaatttctcagagccttctcagaaaccaggagagatgttgcaagctccagaatctcttgcagtcatctgatgctagtcccacagaagggggaagtctctgcattctttcagggagatttgtattaagtccaaaatccaagttagagatcttcgcttaaatggaagctaattttattaatatagcagagtttcctttacagctttctgttctatctgaggccttaaaaaggagtcaggactataagataactttagatcctcctttgtttttacatgtgtcatcttctcttttcaatcttctaatgaaggaaacagccagtccctgagaaccaggataacaaactagttatttttagatggggaactgtgcttgtgagcctttttatatgtttttgatctttcatttgtaatccttgccttgtgataacaccccttgggtgtatttcctgactaattttgcactttttgaactgaagggacctgagactacacccaacgagtgagaaaattgtatacttcctccttgtgctgcactcacttgcttccctttgtaagaaatttttaccatcctagagctttcaaacagaccccattgcttaacataagctagacactttcttcaacagagccccagtttggaaaggtaatcaaaggaattaactaggggacttttggtcctcagatcccttttccaggcccaatccctttttaaaattcaactcattaaaaaccctgctaaaagttttatggatgcaagtgacaatattcaaatgcattacatttgaatattgactattaagtttaaaccaattattctctacagatggatctaagtctgtaagtgagctgccttctacccactgcatgttaaatgataacttgcctatttgacaagtctatgatggggacgtgctctttaaaccttgggagaaatgtgaattatcactctggtgtatgcataactggatatacacttttgttaaaatcttgcaataagtcttgaacattttttttgtaaaggggtttgtagtcttgaggcctgtaagcagagtctaccttctgatcatttcaggaagtagagatagatgcattttcaattgtatggcctacaatggagacttacccttggctattgcaactcaacatacacatccattttcttcagggaatttatattacagaaacttttcctccttatttttttcttccttgtcccttggaattgctcatacccaaatggcgaaaggatatagtcaaaggaaatcaaatacctttaaagcaattccaatgctatgaaaagctgtatttaaatatctgaacagagaaatttttgctataaaaacttacagcaaggtaatgccactcaccttagaatccttccatttggcccagtctgccaacgctagattcgatacctggtcttgagctacatcttgtgttacttttatgactaaacccagatgccactgttccctcccccaaaacccctcaaagtgttttgtggcacttctcaaattcttttaaaatagtctcatgtaagaatacaaattgccaaatttaatgagctaagtcttttcatgtcagaaataataccttgcagtgaagtatgatatccggcttcaaagatgggcaacaaactcttaagcccaggtcactttttcagccagtgattctaacccagttctgggccatcttgctgctgctatcaacacatgcattgatgaactcaacataatactgacctaagcaagacagatctgaaggtatagtcacacacacttcaattgcctcccatgaagaaaatagaatgtattctgttttggaatatattgttgcagttcttgttctgggcctagaaagttaaaagtagatatcgaagtatataaatatagccttgaaagccaaaataatatggtttttaaaagcatataaggattaatattcaagtgaaacacttgaatctgccacatttagggtacccttaaagaatagttttttgatctggaaaatcaaaacagattagccttaccattgtgtcagttggagttcagtccacaccagttattttaaaatattttaatgttaagcattaattcccattcgaatactaaccaggcctgaccctgcttagcttccaaaatcaggcttgttcatggttgtatggccgcagatattaagtgttaactaggtataagttgttagctagaaaactgagagagtaagaagagaagatcaagtcatcactgggtaagtaaactacagaaagcagctaccacctctagggctgaggggacaaagttaagacattggaaccatcaaagtttataaagcttgcaggagggggtctcatggtgctgatactgaggcctctgagaagggagtactgcttagctagtactggagtccctgtgctctgagggcctgggacctgttggcctggagagagtatgccagagggctgatgctgatgtctccaggacaggcatgatgagactagttctgcaagtgttaaaactggattcaggggctgttttaggaagaaactcttgctgctggagtgaagaagttctactagagtcacactcccaggagtctcaagtcataaggaagtccatgtggagcaagcagacatgtccgagtcccttcaccagcttggcagtttccctccagcgcaccttactggcagagccaatatgcagccagcaggcaaagcaggaatgtttgcacagtctagccctggcttcactaaccggagatagaggtggttctgaagctgagacaacttaaatggcaccgatcacccctccagctactcagcatccacatacacccttccacacctttcaacttttcctccgacagccacacaagtgtttccatctacaaaggtgcaactgtctttcattcagagaaagatgttctcaccctctccccaaactgggaagctgcaaagaccccataggcatcacattcatttctggaaaacggttactgtctttgggctacattaaccacccctagacttcagttgcagtcccatctgaatatttcactgcctaaagacaaaattgtacatttaacttcaaaaatacttgcattaaaagagaagatagagagatagaaaataggtaatacataccagtgtatacacataacaagcaaggaagaaaatacgcatagctacaactgccctcattaccatctacatgaatgccatctatatcccagacattgagaaatgagtctcctaccttcaaggagattatagtccagtgtgtgggcagacaagcaaatagacttgtgtgtaaaccatgcaatggacatgtgtatttcaagaggactacgtgaagctgtgctggaatacagcttctcagctgagatttgtcactgcagtgttgaggaactctggtttggggccagacagtctgggttacaaacctggttctactacttagcaggtatgtcgttttaaatatctttgccttcactttgggaggctgagtgaggcggatcacgaggtcaggagcttgagaccagcctgaccaacatggtgaaactccgtctctactgaaaatacaaaacttagccgggcgtagtgcccctcacctgtaatcccaatcccagctactcaggaagccgaggcaggagaatcgcttgaacccgggaggtggaggttgcagtgggccgaaatcgtgccactgcactccagcctgggcgacagagcaagactccgtctcaaaaaaaaaaagaatatctgtgtcttagccttccctctggaaaatgaaatatgatacagtaatactcacaggactactatgaatcttttaaagttatacaattaaaaggttaatagtgcctggttcccacctaagtcctgagttaagaatggctttgagtctcctactgtgtaagactttcatctgtaaacagactgtctccctggttgccaaccagccaggtgtctttgagcaaaattaactactaaatctccaaatgaagcaattcagataacattactcatacatagattgcatgaatgtatgtatttaaagactgttcagattataaagacttttaaaactcacagtgggagaaattaagtactgacccctatgaaaacatgttgacatttgtaaacaagctaagtgcaatttaaattgagtaaaaacttgagacttactttttatttagatattatttaagtatctaacaaacgacagttattctcatgtggtgggcttggtccttcagttaaaatgttcacttaaatgggtggtataggcacggaatgaagagggcttttgttgaaggcagggttgtggaggggttagcgtgccagcccacaggttgtcttaatatgattacaaaacaatgaatagcttttctttacctttggtcatcagtcaatgtagaaagttaatctactcgccctagctctctctacagctatatagaaacattggctcctgggaagtgagagaaccttttggaaagttagctcacttctgcctggttacaatgactgcattttcctgtttctcctactatgatacattgtgggtagggcagaggttgtgagagcacatgacagactgtttggagtatggtgatgctgaataatagcataaaaatgtactagattaattgcacaattggacccccctcaatccattatttccctgatacaaataagtgttaatggcaaaaaaggatgtgttttatagtgcttggataaccctggggatcatatgcagaatcctaatacttaaaacaaatttatcaatgtgaataagatacagttcataactctactctagtcactgcctttatagttaagcaattttctgaagaactgaaatttataatgcccaatctcaaatggcatttgcagtcttaccaggcttaacattcaatttatttctgttttgcaataatgcctagcaagttttcgatccctatctttaatacttgatttttatgtgaaagttctaataaaaactgcttagctagataatcactaaatgttactagatatcaagtgcttaaagaaaaaactaataggcacacatgttccattttggaaactacaaaggaaacactcctacccactcccctgctttcagtcttcagtctaatacagcaggagaaggaacaaaatgagtccaaagaactacaaaagaaagtcactacttgtaagcctattctggcataaagtctgggtctgctgtgttctgatctcaatatgcctctaaactctgcctacaggtgtctgtgggaggttatgtttatttgagacttctccatcgggatcgcctggtgtcaccaagtgtccactggtactgaggtttgctgcctgccttcttgccatgtctaacgaagtggaaacaagtgcaaccaatggtcagcccgaccaacaggccgcaccaaaagcaccctcaaagaaggaaaaaaagaaaggtatggagaaatccacttgaagccaaggaagggagctagagatggttacccctggagaaatgtgagattcagaataaagtaagggctggctcttatcttccttcaacctcagcttagtctcatgttctcctaataggaaagttgtaccttgggagaagagactggttcatctcacgtgtaagaagacatctctggaaacctgcgattatacccacttaagtccagttgggaaacagtcatggcatcttgttcagttaataatgcagtcgttaattattatatggttatcattcagttatttatttaccatttgattttactgaactcattgggaatgggactacacagaccttgtaaaaggagcaaaagacattataaagatgggataattatcttaataattttcaagagaacttaggcataattcctttctgccttattgataatttaaaatgttggtaaattgcttggcagcttatttttcttacattaaaaatacgtatattatcatccttatattcctttaaagacttaaaaaaaactatgatgaaaaatgtccccaactcccacctcccatattcccatacgtttcccataacgctgtcaattttgtacttctaacagtttattttctccccaccccaactccatacacagttgattgtggaacatgattttgctcaaaggaagtaagaataagacaggatagaatattacatacatgatcagttgtagtataatcaggatttatactacttaaattttggagagtctagagcatatttggtcataattagaactagcattctttatcctgtattcctttcttttctcaggccctgaaaagacagatgaatatctcttagcaaggttcaaaggcgatggtgtaaaatataaggccaagctgattggcattgatgatgtgccagatgcaagaggggataaaatgagccaagactctatgatgaaactaaaggtaaaagggaaatgaatgctttatctgtatattaagcaaaagtccaagagagggaattatattagaagctcttgttgacctattgttcaattacttgaaaaccgcttttaatcacattatccatcagtagtgccccattttctgagaaaccgtgagtgtttgcatatttggagggatgtcctagatacctaattttatcaaatataataggactctagatgccttttccttctggcaaactcaacattaggacgaaccaagcgtattcctatttctattcctataaaagctatgtgcaaatatttgcattgtttgtcttactgtatgtggagagcacggaatatcctgttttagacctgagaattgttctgataaaatttaggattctacttaggcattggtgttccttagcgctagcctttctgttttttgaatttaaaaatttagtactatggcactatgtgaaactgacttaataaataatacttgttcaatagttcaaggcctagaagaaacatctctaaagatcttctagttgagctttaccagtgactattctgaggccaagagaattagagtgacttgtccgagttcgcacagctaactaagggatgccctggttcaacgtcttctatgcggtcttgctgtccctgatgaaaagtgccgaatcctctcatcaatggcagatcaagtcgaaaacaaagctgactgactttgaaaattttaatattaaaaccattgtaggatgtttttaaaaattcaacttctcttgtttttccaccctcatcagggaatggcggcagctggtcggtctcagggacaacacaaacaaaggatctgggtcaacatttccctttctgggataaaaataattgatgagaaaactggggtaagaattcacatttgctgatacctctctgaccacctgagtctgaccaacaatttgctactttaatttcggctccccttcttcgttctcaaagttctgtagggaacaaatatagcatatattacatctccagaagtaacaggcagaaaacagaataggaggtaaaagtcaagatactttattttgaatttgtgttctataataaatgtgaatctaagtctgttaagtctgttaataggcttagattcacattatgtctataatatataaatatacatatttttgaaattaaataaatatatataatttatataatatataaatatttaaatatatattaaaatataaatacatatataatttataaagcaaaactcctatatatatatatatatatttttgacctcaggtatacagaactagattaattttaacccctagtttgtgacacttttatgtattgcttacatgtgaacttaccggctaacctaaagctagaacctcacccataacacatctacctctttttcatttcttttttccctgccttctcacctcacagatgtaaccttgtttttgttggttcctgttgttctattacttgtgaacaatcttacttattttgccttgtttttaagccttatcagaaagctatttatcatacatcaagtcttctgtgattttttttctgtactcaatgtaacatcataagactcacgttttttaaaatgttgtgtgtggctcattttcattgctataaaatactctctcgcatcacgatactgtggggagacctccagttactattcatccctttctagagtgcccattatctaccatgcaaacctagggccctggcaccctagtggaccccactcagcctgctagtgctggggtcctcaggcaccactctctttatcagttgcctttatctgtcaactcttattttcccaagcccatcagagaaaggtggcatgtttctctcacccttctgtgtctcctcaaactttctaagatactctaagatatcttagacattcaggacaaaaagccaagacacactctgccacctacaaatatccctaaagagttcaaccttgttaactgcttgaaaggatcaagaaaaaggagggaaaaatagaagaaaagacactaagccaatacagtccccaccccttataattcctggttactgatgtagtcattatgtcattaacatagtgtagttattactacattatgttactatgtattaggctgtctaggtgaggctgagaaacacttgatgacagtatttggtatcctccagaatatactgggaatacggttccaataacacataggatggttcctcggccactctgagccatcgtcaatgaatccctgtgaacactcctctagcttagttatgctgttcttttaagtttgtctttgagttgggaaagtagacctatttggcttggcttaagggctaaatgtctcctcttcacttggtcttctaatcctcagtccttcctggctatgtggcatcatgtctttaaagcagggagagtaaagtatcaatattttaagaaggaacattcttcccacttatgttttctattcttctttcttttgagccctttctagaaagagtaatgctctagccttcaatcagaaatgaaaagtctttcttcaaatggtttaaacttctcatatatgccttcatatatgtgtctgaggcttcggtgtgctagcctgcaaatagattctagttttcttaataaattactctttatgttcttttttaaggtaatagagcatgaacatccagtaaataagatttctttcattgcccgtgatgtgacagacaaccgggcatttggttatgtgtgtggaggagaaggccagcatcagttttttgccataaaaaccgggcaacaggtgagctctaagtcttgacatagacctggggacttgtcctctgtggacattggagtgtctgtcactcaactaaaagatttactggaaataattggatgtaagagggctaaataataattccgagaatgactatttttattggcctatggaatcttttaaaaatgtcattgatagctatgcactgctgtgtgccacaggattgtgagaatggaccttcttataaagtgaatactgacttcacaacagtggtgaattattctcaggaaccttaaaggacttcaaatatgatcatgatacctcttgttttgtctaaatacttattaaccctgctgtcttttatatacctaagggtgaggattgggttagtggtgatcccctataagccagcagagggtagtaaggcgttttaagattaaaaaaaaatcccagtatgaattataattgataggagacaaaggaaataaaatactaaaatttaaatactgataacagtgctttcccttactgcaggctgaaccattagttgttgatcttaaagacctttttcaagttatctataatgtaaagaaaaaggaagaagaaaagaaaaaggcaagtactacctgattaaggctctattaaatttaaaactggctgggcatggtggctcacacctataatcccagcacttcgggaggcagaggtgggtggatcacctgaggtcaggagttcgagaccagcctggccaacatggcgaaacctcatcactactaaaactacaaaaattagccaggggtggtggtgggcacctgtaatcccagctacttgggcgtctgaagcaaggagaatcacttgaacccgggaggcagaggttgcaatcagccgagatggtgccactgcactccagcctgggcgacagaacgagactctgtctcaaacaaacaaacttaaaactgtactcaggactatgtttaatattatacataaatatggtctatctgaaaatttggcttctatatgtattgtctgttcttcccaatagggcaatgcatacatttttatggttaggcacttctaatctgcactccctggcttttattttttttctctctatgagattcatattaattctaggaaatatacaggacaaccaagtttaaatccagtaactctactcaaaccttatattgatatgaaaaggggaggggaacagagggcagaaataatatacaagacttattcttgccttatgcctgtgaaccataggcatacttgtttgtgtatttaactccctttcactatgaatatgaagatcactgaatatgtatctttctttttagatagaggaagccagcaaagcagttgaggtaaaattgcatctttacttcttgttaatcatgtgtgtgacatgcgtaagcccctgttttctacctgcccaaccactctcgccacctcgcttattactatgtgtttatgacttctctgatcatgaaagatgtttagttaaaagatgataccaaaaccattgcttcttagcagactaatagagtggacaaatacattttatagacaaagctcaactaaatccttaaatatttgctatcttttcagaatgggagtgaggccctaatgattctagatgaccaaactaacaaactgaaatcggtatgtattaatatgtgacgtttgacagttcttacttatctgaacatgggttctacttcctgtagatgttgctgttaccaaatctgtattgaatctatatgaaaatccaattgagacaactgtttttcaaaatattagtgtaacatctatgtcaatatacaaaagtagtcaaaaaaagattagaaaagtaatctttatagtagccacacctgaatctaatctaatacttttaaaggatgtggacaagatagatttgctttgagacatgtctacacttcctgacctaaacagcttaatatgaaatctattagttaaatggaaattaaattgtgacagctactttcctaaactttaggaaacaagtgattacaatatacgaagtaatcttttttagtagacacatctgaatctaatccaaatacttttttaagggtgttgaccagatggatttgtttggggacatgtctacacctcctgacctaaatagtccaacagtaagtgtttgtttttaaatttgcaatgtaataaaatgacatctataactcaaattggcaataaccagaaatcttaagcatctcattgaaacttggaaggtgactgttgatttttgcaaatgaagtgtcaatggtttttagaataaatgtgaatcttaagtcaccatgggaacctatccacactaattcagttatattaatattgcttacagattaaacctgaacaataagtcagcaatgtagtccttcttggtatcacttaggattagaaggaggaggtgaataatagtccttgaataagcctacttgaagaaagtatgactgttagatggttaatcataaagcctcctggcctcttcatttcttttgcattctgtctgttgcaatttagcagcataaatttggtgtgaagtaagatttaaaacaaacaagtggctcagttatattccaccaaagcttgtccttgttagaaagctgcccattctcataggattttataccatatccagtctgctcaatattgaatgatctgtaacaaccctgtaagaacagaacagtattttcctttataaatttaaaaaaaaaaaatggtggttcagggaaaaaaaagaagaaaaaaaaaataaaaaggaaagaggtccagattcaagacttaggcccaagtcttcagaccttccaaaacatacctctaatgaaaatgtccatgacattttgaatgacttcttgcaacttcttttatttatgtaacagtttcctgagcacctgctatttgcaaggcatagcagtaagatgcacaacatcaatgacatcatggaatttactctccggcagggagaccaacattaaaactaatcacatcgttagtaattgatgttactacagggtatttatctagttcagattcaggtaatgcttctgcaggaatgagtttctagatttgaacataaaagatgagaaggcaataaacagacaaaaagagaattagtctagaataatggggggaaatgtctagaaaggactctcttgtatcaggaaattatcatggaagcctatgtgaccaaggttacaggagttgaagcaacggatcaaagattgggtaaaattctccctttagacttctgcagagaatttgaggcctgtgaatcctcactgcataaaactttcaggtcaaatgagatggagaggagcagggacttcatgcattcttctctgaccctaaccatatgagtatcacaatgcatggtagcattctaaaatgcctttaagagagaagcctgtttaatattcattttagcagtgagccctaactcacttgcctatagaacctttcattcttcataatttttgttatagttctgaggataaactttttaaaatactagactagattatcctgacaggtccatcctaactctgaggtccttttgatttgtagtcaactttgcgctctcctccattagtgatgttttctcaaataaatcagtatctgaacacttacttcccaagtataaatgacattcaaacaagtaatattcaaagagagcaaagcactcaagatatgaagtggaattccactggaataggcaaggaagtactgcctatataatctacttctgtagacttctagaatgttctaaaaaaggaaatggaagacaacatggataatcttcagtctcatttttattagactttatgaagtctaagaattttttatttataggaattcaagttttagttaaactaacaataaagtaataaataccatcaaaatatatactctctgataaccaaaagaaggctaacagatctaattatgtgctggttaggctttgacatgttcttatctattgactctatagtcataggtcaaaaatagatttatctctacttggtaaagccagcatgtttaaaaatattcaactctttcaacaattgctctgaaatatgtaaagagagaaagaaatctaaattacctagactttattattggtcctagatggttgtcactcccctcaaatttatacagaaaagttttatgaatttcaaataatactcatgttgcaaactacgtggtatcccctagaacagcatttttattggcaagccccttgagcattatccttccacactgcatctcaaaaaaggaaaagaaagaaaaacataaaaacccatgttctgcaactttaacaaccacttgaaagcacagttactatggaaagaatataagacatgatctgtgatcaaggagattaaatatggtacaagggatgggatcaggatacaaagcaggagtgtcacttatgtccttgtgtacatgccataagataacacgggtgggcacagggcaagtgtagacagaaaaatcgatgctaaaagctttgtaaagaatctgaatttgagttgggtctttgaagtgtgtaggaaaatagatcatagttgggctagaaacaacgtgggtcttattgtggaccatttggaaatttggcctaaggaggcttattttaatatagggagccagcagtaagccccttaaggctttgagtagagaagtcctcagtctgacaaactggaatggttaggtgagattagccacccagagaagagctaggctatggaactcaggatttatgtccgcttactggagctccctacgagcaggttctgtaacgcactgccgtgtctccagtgcctgcggctcaggtgctcaaacagtggccaactggatgcagtattgacagttcgacaaagaatgaatgaggcactgaccaagtgggtggatgaggagtctttgggctctcagttgtagtctgtgaactacacttttaatcttggattaataacaaacccagcctgaggagagccttatacattttacttatagggtgactattcagaagtctaacattgtggctcctgtttggtgtcctaagaacttcttctgaagtatttgaaaacgagaactctaccagctgtgaacactcaactgttctaacccagaggtggctcaaaacaaataaataaatattgaaatcacaagcttttgtaatacattttatcctaccttttgattgtataaagatccctagattaatagctcttccaatccatttctctgattaaatttttttttaattataagctctttcttgtgacaaattcttcttttataaagagaaagcctggctttggcttataaaaactgtatttttatgcctcacagtaaaggaatccaaaagatagattaccatttaggtctgattttgctgtctcttttgtggccatgaactaggacttaaactttctaaacaattgggtattttttttttcttttaaaagcctgtttgaacccttttgtatttactagtttgcaaattttatattcccttgaagttgtttattttccccaatgatcaaaatatttagtattctgctcagggtaatgcaagataactactataacttgcacttcagcaaggcattttttatcatttatattcttctctgggtagcatagttaagtatttaatggatcaaagtcaagcagaaggaagtgatgtcagtatgaaagttctgttctaggatgagttataattctgtcttttactggaataaagacatgtcggattcatcaaatttactgcttttaagctgagaattttttatcaaacagttgaaaatccaaaaaattaacacaacagagaaatgatagagaggggatagaattagtagagctatatatttgatatgtctttcaaattaactcttaaacccatgtctctaccttgtacaatagtccccctttatctgcagtttcactttctgaaattaagtctgcggtcaaccttggtctgaaaataagtgagtacggtacaatataatattttgagagaagagagacagagagaccacattcaaataacttttattacagcatattgttataatcattctattttattacttgttaatctcttattgtgcctaattgataaattaaactttatcatgtgtatgtatatgagaaaaatactgtatataggttttggcactatgtgccatttcagacatccactgtgggccttggaacatattccctgaggataaggagggactactgtatataaattaaagatcagttgttggttgactttaaccactaaatagatgagattactatcacaacacaggcaactctaagcaatgttatgaaaagatgtacaaataggagatcttaatgtgtgattgactaaattagatcagtattgagtgtctctttcagaggacatagacaaaaagggtaagcccagaggagagactgggatgatgaggatgagatcctacttgactatcagcttcagcaagagccttaaatattaagagacatacctgaaggccgtgatataaaagaaaagcctctctcccacctctagaggaaagaactggaccgattttagggaaatgcatttgatcttaaatttcatcacagccagaactataaaatatgaatgtattagtcgatgaattttctcatttagagagatgatcctacacgactctgggggtacaatagagaggactgtatgtgtataggtaggaagctgagctaagcttctgaaatcacttactttcaagctcaacatactttgataatcatttgtagtgactcacaatcaattccctttaagactttcaaagtcacaaattgaaacaatgctcataatgaattaagccagtctgtatgtgtgaaacagggtgagcagagacatgaagtaagcaacagtaagatttcacctaatgaggttgagacttaaataaaagggcatgatattggggaggaatagaaaggacctagtctatagcaagggagtaatggactacgggggttgatggaaggaggtaatgatcaaccgatttatcaagaccaaattcaaatggaaattctgataatcctagtcatcttatgtaattttctcatttgaagtcacaacatgaactaacactttctttttttttctttccaaatgtgataggaaagcaaagatatcctgttagtggatctaaactctgaaatcgacaccaatcagaattctttaagagaaaatccattcttaacaaacggcatcacctcctgttctcttcctcgaccaaagcctcaggcatccttcttgcctgaaaatgccttttctgccaatctcaacttctttcccacccctaatcctgatcctttccgtgacgatcctttcacacagccagaccaatcgacaccttcttcgtttgattctctcaaatctccagatcagaagaaagagaattcgagtagctcgtctactccgctgagtaatgggcccctgaatggtgatgttgactactttggtcagcaatttgaccagatctctaaccggactggcaaacaggaagctcaggcaggcccatggcccttttcaagttcgcaaacccagccagcagtgagaactcaaaatggggtatctgaaagagaacagaacggcttctctgtcaaatcctccccgaacccttttgtgggaagccctcccaaaggactgtccatacagaatggcgtaaagcaggacttggaaagctctgtccagtcctcaccacatgactccatagccattatcccacctccacaaagtaccaaaccaggaagaggcagaaggactgctaaggtgaattgtcttctccacatatccattagcagagtgcatgttcggtaccaaagggtggtgtgatgcaagctctctttgctgctgctctcgtagtttcctgtgttgctgtgaaatagaaggtgggataaggcactttggttctccaggagtactttcctctaactgccaccgtttttaagcttctcagcagtgtttgtcacaccctgctttccgtgtgcatgtcttgtcacttatgattaaactaaacacaagtttttccatttttaatgctgctatgcttctatacctctggtaagtttgatcatcatgttctgggttgggagggtgagagttcttgtgattccctttgtacttccctgacactaacacgccctgcacacccatcatattgcatcagtgtccatggtggtggtgtaaaattctcaagcttatctccgcttttaaatactgagtaaatacataagctttttctaagcttatgtatttactattaccactatgatctcagctttatttaagagcaatttaaaatgcagttcccataggggtctttttttacctctcctaagaatatacaggcttgcctggattaagaccctatgatctctatgtagactgacttaaaatccaatggaatgaacaaaaatatttaggatgcttattggtagttgccccttttacacacttgctcccccaacttcaaacatttagctgatgagaccagaccaatgtgagtgtgtaaatgaatatagtagatttcactttgcaagtcctaggtagtgtcagacactaagactcagtagtccgtccgttgtaggaatctgtgtctttttttggaggactctttttctgtagtagtagtagttgttgttgttcatctgtcaagaaaaaagttttcctttttgtggctctcaaattggggtatagggtaggagacaaaatgaggctgtatttcactgttagagagtaactaaggcttctccctccctccctgtccgtcagtctcagcgaatnnnnnnnnnnnnnnnnnnnnnnnnnnnnnnnnnnnnnnnnnnnnnnnnnnnnnnnnnnnnnnnnnnnnnnnnnnnnnnnnnnnnnnnnnnnnnnnnnnnnnnnnnnnnnnnnnnnnnnnnnnnnnnnnnnnnnnnnnnnnnnnnnnnnnnnnnnnnnnnnnnnnnnnnnnnnnnnnnnnnnnnnnnnnnnnnnnnnnnnnnnnnnnnnnnnnnnnnnnnnnnnnnnnnnnnnnnnnnnnnnnnnnnnnnnnnnnnnnnnnnnnnnnnnnnnnnnnnnnnnnnnnnnnnnnnnnnnnnnnnnnnnnnnnnnnnnnnnnnnnnnnnnnnnnnnnnnnnnnnnnnnnnnnnnnnnnnnnnnnnnnnnnnnnnnnnnnnnnnnnnnnnnnnnnnnnnnnnnnnnnnnnnnnnnnnnnnnnnnnnnnnnnnnnnnnnnnnnnnnnnnnnnnnnnnnnnnnnnnnnnnnnnnnnnnnnnnnnnnnnnnnnnnnnnnnnnnnnnnnnnnnnnnnnnnnnnnnnnnnnnnnnnnnnnnnnnnnnnnnnnnnnnnnnnnnnnnnnnnnnnnnnnnnnnnnnnnnnnnnnnnnnnnntattttttttggaggacttttttttctttgtggtggtagtggtgttgttcttctgtcaagaaaaaattttcctttttgtggctttcaaaattggggtatagggtagggagacaaatgagggctgtatttcactgcaggtgagtaactaagggttctccctccctcccctgtcctgtcagtttcagccaatgacttgcttgcatcagacatctttgctcctcccgtctcagaaccttcaggccaggcgtcacccacaggacaacctacagccctgcagcccaaccctctggatctcttcaaaacaagtgctcctgccccagtggggcccctggtgggtctaggtaggtgcctagagataaaattaagtatgactcttttgcttttgctcataaaataatgatgcatcagaagagatttcatactcccagagggttttacagcataagatttgagcatcccaggagcccttctcccacttctactatacaaccccacatccatttgatattcttgacttgtaactcacatttggctcctcgaggcagcatgagacaagaaattcattttcagtgttgtacttacttgaaccaactggtcacggtttcctgaaagacaattgtaagggattctaaactcagaccagcttcagtagcaaaacagggttgacataagagaggcttgtctgtcaacatgcatgtcttccatgtcttttgccataatagatcgaaggcctatgtcctttcaacacatagccctcttggaagtaatatatgcccaagaaggatataagttaagtctgaagcaagaataagtcatagagtgaaagtcctaggttctgggcccagctgtgttcctaggtgtatggtaagggtagatcaggcacacatcctgatcagtctctgagcactgccataggagctccttgccaatattttggctagcttgagtgttttactgaagctagaacataagtcctagaaagccaaagttgaaaaaagagagaaataagggaagagatggaattttatcagacagctaggatgcattgatgctcttaattcctaaatgtgtcattagcttgtgtgagccgctgatcactctgtggtaggacagtgggaaagtccacttgactgagggctggccttgctattcttagtccatagcctatagttcttttcagactccatggtacagttttcagaaaccctgacaatagtttttgctgtcctgctgtggactctatttttctgctcttggcacctctacaaactccaaatggactctggcttgggaggtggaggactgtagacgaggaaggactctcctctccttcggtaaaatctgaccagggatcctggctttctctgcctcctgcagtcagtcatcaggatccttgttttgttttcctctctgtctctgttgttttcctacaaaggaaaatagtttggttcttttacaagaaatctgtttaatcatatctagaatagggtggccagaggaggactgttactcaactgctgagtggcagaaatccgtgagggtatgaaaagccagcttgtcccaggtctctgctcgcatttaccccatcaagaggctctctctaaagacttcatgtctcttgggggcttccacctttctgcattgctcttttccttgcacccccaagtggagctgtttggtacccttccctcacagaagaccagagtgcttgcaatgcaatgtctgcagcgagatcacatcacagagctttgtatctgatatcaatgcccttaagaatttttgcagccaatatttaacaagtcagcctgaaaatacagctggaccctataactgtttatttattcagacgaagtgaagctttttggctaggtgcccctgttgaggccttggggtatacaactgcagaatactgatgattgttccaagtttggacatgggactcaaactgagctctacagtatagtccctgtccactagcagggatcctcagccaaaccatggaaggttgtaggtctggcttccgctagacccagctgggggactgtctcccctggagaactgggggggtggggagagggtattgtagaaagctgagccctcagattcaacttgcttgtattttaatctagcctcagaaggtaataaaattaatgttctatacccatgtcccctttttccttattccttgcccctactttgtcaatgtgttcaatgtgttcaatgtgttaaaacacaatgtggggatttggtgggtaggaatgaagactggtataagtatatactgggaaagccttgaattcctggcaaatgtaatatttttctctccttttttttttttttttttttttttttgagacagagtctcactctgtcacccatgctggagtgcagcggtgctgtctcagctcactgcaacctctgcctcccaagtttaagtgcctcagcctctctagtagctgggattacaggcatgcgccaccacacccagctaatttctgtatgttagtagagacagggtttcgccacgttggccaggttggttctgaactcctggcctcaagtggtcctcccactttggcttcccaaagtgctgggattacaggtgtaagccactgcgcccagccctaatatttttctcttttacaaataccattctcactaatatgatattttcctaaatgaagacaagttgtccaacatgaaagatgataaaattctaccctcctttttgcacagctaactggtggaaattattagcaagtgatctggcttctgttaatacaatttaattgaatgtgttttaaaatacgagcaacaactttgttcaaactaaacccatttttagagcctgtattgtagaatataactattctcttgatttgttatgaaaggagtatattcttcagtgaaaatgaagtctaatttctgtatccgtgaaataagtatttgaattaacatagcatttgaaaattaaaattgccccatgccttgctgccaaggaagcagaacaggagaatggggtgccggatttagagccagtgtgcctgattttcagtttctaccatcccagactacgaccttcccaattttaatgaatattcttgcacccagtttcctcacctccaaaaagcatgctgattaagtgaaatggcctgttctgaaacccaccactctctgtgagtacaccatgtgtgcccatggccagatggccagcatgcatgatgagaatggagtcaggtaataccaatgtctcagactaagaagctcgaagatataatcttgtgctccatcactcctaaataccattttcaaagtattccctcttggaaacataaacgtccctaacccaggtctgaagaaaactttcataactaaagaatgccatgcaccaaagctcaaagcaagtagatttcaagagcgaagcatcacccactaatagatatgaggctgaatttaggtttccttcttagcggtgagtttaactgaatcattaatgcacttggcaagaggcaggaaagacagtgccctgtatattagaacaagatgcagggagcgagcctctcaagaatcagaggccatcattggagaggcctggattctggcgatttaacgaattcctgatgacatagcaaggtcgtaggagatggagccattcaccacaaagatcagatgccccaacacaggccattagttaccttgaaagatttttgtttcccattgtcctctctcctcttttaaattctctgttctaacttctggcaaggtttagcgaatggcacatggcaggaagcacttttatttgaaacagtcttcctaggataacatcctttcttccatttttatatataaacgtctaaaactatcttggcattggccaaactttatcttccctttatgtatatagctgtatcagtcttggcagcaataaaaagtgaagaaactttgaaatggtgtcttcaggatgcaagcatgttgaggtcttgtgcacatgtgtgattgctggtttccataagactccagacgtgagccagttgccaaatgaaaagatcaaatctgtgactcagagagtccaatggattatcttaattaactacatcataatcagcatggttcgtgtataaaaatatattcacttaaataagttcctgctattaacagactctgttctagttgtttgagatgtatcagacaactagtgtctgtatgataagggcttatttttttgatgagtagatacttatggactgtactacccttctaatgaggaaagttaaaaagacatggtaggaagaacatgggcctcaaaatgcaaccagcatttgaatgctcactatacagtgttagctggctaacttttacagtgattaatctgtcagagtctttattcttcccatatcagcctcagggctcaatggaggtgttagctgtggagaggctttccagagagttgtgctctctgaaattcaagaatcttcttcaagcttgactcctgataagtatttttcttcctcttactttaggtggtgtaactgtcacactccctcaggcaggaccatggaacacagcacctttggtcttcaatcagtccccttcaatggctccgggagccatgatgggtggtcaaccttcaggttttagtcagcccgtcatttttggtacaagtccagctgtttcaggttggaaccagccttcaccttttgcagcctcaactccccctccagtgcctgttgtctggggcccttctgcatctgtggcacccaatgcttggtcaacaacaagccctttggggaatccttttcagagcaatatttttccagctcctgctgtgtccactcagcccccatccatgcactcctctctcctggttactcctccccagccacctcccagagctggccctcccaaggacatctccagtgatgccttcactgccttagacccacttggggataaagagatcaaggatgtgaaagaaatgtttaaggatttccaactgcggcagccacctgctgtgctcgcgcggaagggagagcagacttcttctgggactttgagtgcctttgccagttatttcaacagcaaggttggcattcctcaggagaatgcagaccatgatgactttgatgctaatcaactattgaacaagatcaatggtaagccactcaccactctgcctactgttccaacaactatctccgctgccacatggacctaaatgagttccccaaatgaaccctctcccacctgccaacagctttgctcttgcttctgttggtaatcaagggttatggagacaacttaaccatttaccttttggtgataactatttaccttagtcatttctgaggactgacccaatgctgccctctagtgataaatcttaaaagggctgccatgagctattgaaatgtgatgactggtgactcttggagggctgtgtaataaggcgtcatccatgtcccatcagcttaaaatgaggggattctgaatctcttccacttcagataaatatgcatggctttctcttccgagaaggataataattattggggtacttagtatttggtgttgatttttgttccactgatgtaaatttcaaaagtatagaactaaaattcaaaaataagctgacgcggggactggcctatatttggggaaagcttgtctactgattgcctggattttttaccttctagaaccaccaaagccagctcccagacaagtttccctgccagttaccaaatctactgacaatgcatttgagaaccctttctttaaagattcttttggttcatcacaagcctctgtaagtatgaactactagaagctcttctccaaagtacatgccacatagagctccagcctcctgaattaaccttgcttttataatagcttttatttatttatttatttttttaagacagagtcttgctctgtcggccaggctggagtgcagtggtgcaatctcagctcactgcaacctccacttcctgagttcaagggattctcctgcctcagcctcctgagtaggtgggactataggcacgtgccaccacacctggctaatttttgtatttttttgtagagatggggtctcgccatgttggccagactgttctcaaactcctgaccttaagtaatccatctgccttggcctccctcagtgctgggattacagtcatgagccaccgcacctggctataatagctttatgatggtaaaacatgtttagctaagatttgtcaccaagaaccttcacagtataaacattcatttaaactggagaaagattatttgcacaagaactattatcttctgaatttgagaaataatatcacatagaaaacatccttcatatctcacttaacctgacccatgaaagcatttcgggagaaaattgagccaaaatactgtcttgaaaacctttcaaaaatttaaattcttaattttccaacaatatttctatagcctgtgaaaataatacttcccatttcggggaggcaaatgaaatgcatctgaaccttgattttcacgtaaataatatacactgccatctgcaagcagatgaaaacaaaacactgtaagccccatataatgtttgattggctgattggcctatgacccaagcgatttttaaaagaatttaggaagtcttcactgcaattttttttcttatgactgtaactgtatttattgactagatgattttatcttcttaggtggcttcttctcaacctgtatcttctgagatgtatagggatccatttggaaatccttttgcctaaattctgtaagtagaagatcctaataagcctgtctcaggggtttttgtgagaaagggtgacatggaataaagagtgaaattttaattttagaattgggaagagggtaaatatctataatttaggagtaatcgacaggaaaatctctactgagatcattcaataatgactaggctgggcacttaagaatagaattcctaaacacatcaaaaaatagtaatatacccttggggatgtggatttttatcttattccatgtttttggtttttcagttctgtgtgggaagtaaaactcaaaacaagacatcacaggtttctaacctttttactttcatattgaagtggttgcaaaaccacctagtaataattttggtttcctataaagggttcagattccattggccttctgaagccaccaagtcagcaaaacagattatgatcattacttctctaccatttattactctgtgagcaatctcaaagttagtctgaaagagtctgatggtattaaatctgaaagttttaacaactattaaagatctccttcataggcagtaggagctcaaaatgagtctgaaggttgattcttctgtctcatgaactttatcttagataagtgattaggtagaatcaccctcagctgaaatcctgggagggctcagtgtaactgtttctcaacagaaggtgacagcaactttattctgatctcaaaagactgaatttagtagggaaaggaatgctctccccattttagagcaggtaggccagctggtaggggtagaacaatagaaataatgaaaaacaacaacaacaacaaaaaaaaaccaagcccattttttttccaatcttgtccatccaaacaggactactaaactgtgatttggctcatctagaatataattatttttaatagatagatatcttaaatgtggtgaaaacagtaagactgagcttataggcatctggatcattttccctcaactccagttctgcaatgactgtgtttcctatagtacctttccataaactgcttcagagaactgggtaaatcattaaaaatgcaaattcctgggtcctaccgcagccctaaggaatttctctttggtgccaaggaaatgcttccttttaacaagagtgcaggtgattctaaatgtaataaagcagtaagtagatatttaagagctagaagtcttaccagagatcattctcaccttccattcaaggggagatatacccaaaccaatagaaggagtaaactacactcagagtcaagatggattgtatggactaaattgaatgaactagacttctctttggaggtccttccttctttaggtcatgaaggaagtatagtttaggtcaacctgctacatcaatagattgggtaaggggaactctcatgggataaaataactaacattgttgagcacttgcgctaatcattttattagatgctctacatttatcatcttcatcaatcctcacattagccctaggagatactattactgacatctttaataatgacttgatatttaatacattgatattcagttcaacaattctaaccacaagtttctttcttctccatacctctctaggaacttggtctgcagaccatccagaggaataaaaaggttggccttagtagtcaaaaacaaagctgatagccagacacgttctgatttctgcccttgttccagctttgacatattatctgttgccttatttctcattgcctcttctacttgtaaaatgcttttcactttctgtctaggttaaagctaaactgaatctatggctttaaataaattaagatcctaaactctctagcttaagtgtaaatgaagtacagtagtttccctactgaaccctgcctattgtgtacctggaaacttctagaacacctgccttctaccctctggttgggagatgcagccaccacgtcccttcatatcatactgttttgaataaattttcaaatccttattgttcagagttgttcgggggttctgtttcagagcataaaacctaaaggttatagtagaacaaggcaccttcttaaaagaaatcttgcttcagaccatcagttacagagaatttctaaagtaaaatggaagcaactacaacttctccttagacactttggaatctaaccacttaaggacctttttaaagagatagcttctcttctttctgaagatcaatttctcccaaggccaagattgtccttttctcccatctcttgctagctattgcaaatgagggaagaacattattcatctctcctccccttttttttctgattcttttttcagtcagttttgctcctgggttcaagtagcattaccaccctttcacaagcaacagactctcacagggcaaaaaaaaaaaaaaaaatctaatgattcacagacagatctggagcctctcttcattctcagtaattgctagtcccaagaactagaattgcaaatgggcacaacctatatccttcctgtggaagaggaggccattctcttgagctgaagttccagaagagcagttaatgttcaagagaaattgaactcaactcagcaacaaaggactctattttgaagagcaacatatcacaaagctaaatgtgattgtgccaaacacattaggtgcttatttggggtcatgctaggccttaacaagtaactggaaaactttcttgcagccacaatctcaatgtcgttagtaggaagataagaggggagaaaaagctgtagaacaaatgtttggggttaccattgaaaatctaatgtctgcaatatttttctcctcacaacttggaaatgttcccagttcattttcagtcctgttgtgagcacagttctgaagggtttattattgtcaaaataagttttgttttgttttgtttatgttgggtttttaatgttgtctcttgacccttaatgctcaggttcttgtgggagttaatcagccacatccaatgttaccttgagggggaagaagagggtgatgctcagaagctaaacaagacaggggccacataaccctctattgattagccccaagtagaaagtcctgtggttttacgtttaatggtaatagttgatcatatatggcataattttctatcagcttcctactcagtcactataaacacagacttgaaatagtactttaaatgtccaaatacctaaatgtgctaaactggaggtaactatttctaggtagttgaatttttgaaagtcatgatcagccacacaactgttttgtacatacttattttctcatgcacttttctgtatgcaaataaagctataaatttactcatttcaataaactggagtggcagaata

SEQ ID NO: 22 - DNA, 140928 bp, Mus musculus
gtgattctctttggcttatctgctgtgcattttcatgtggcagagctcttattagccagcacagagatagaatcaagcttgcaagagatttgttgaagagagaaaagtcaaggtaagaaaattccttaatatggtgatgagcatctagtgccatggaaaaagaacgggaagggagggactgggtagaagagtcttcaatgggagcagaattccaagaaaccttggctagctcaggagaaacttcttggtccttttggaaagtctgatttctcccagaaattggtctgtaccttcacccacagtggacatatgatgctcagtccctgtgttggagtagatctcagagagtaggcctcaaatgaacatggatctagagccagatggatagcatctgcagcttcagccaggagtactcccaatagtgttcagccgggggtgctccctacagcatttgtcatataaaaacactcctcactggccaccactctgtaaacacaagtatcatcaagaccagtgtgttggatgcatttaatcattcatttataatggagttcctacaacatgacaagcatcatgttcagtgttataaactctatgtgggcattaaggtctctgccctcacagactatgttatacacgtcattaattcccttgaaaatattggcttataactgagaattccctcagctagaagtatgcgtcccacctatgattgttaataaaagtactatttctatggtaatccataatatctatctccaaatcaaatttaaattagttttctattcttttattagggaggccatcaagacaggatttcctgtgtgcctttggctgtcctagaactagctctataggctagctctgtaggctgcctcaaacttagagatctggcttcctctagctcacaagcacatctataactgctttgtatggttgccattaacttctgctcagattcttttgttgttgctgaaacggtatctcattctgagccccatattggtttttcctacacaagtacaccaccatgctcagtgtctgtgtatattctaatgagaatatgaagcccagcagtatgactcacacttttaatcccagcacttgtaaggcatagagtatgtaaatactcagacttatgtaaatgttagggaatgcctgcttcttaccaggctacccgtaaacctttagcattaggttctgtctggttcatagctttaacctgaacgacccattgctctcaaggagttcctgatctatctgggtgccttataatacctcagcatcttgccctccaggtttgtgtatctccatctctgcaaaatccctcagtgaaatctgtatttaacttctctctttgcaaaatggtgaaggtttaactttttgaaaataaataaaaaatgatggtgactcatacggaggcagtggttgcatccaaattgcctgggatgcctaagatgcagatttcccagactaatcatagagttaccccagtgtccgaggtggggcctgagaatctgcatttcaggtgagttcccaggatggcgaatgatctctacctgatcctcttgtttcgttcatattcaaacaaatgagatcagtctgcaggaagaaccagttgtgcattttcaaatctggataaagactgtcttattgtatgtgtggttggctactatggatgataatccattcatttaatacatgcatatttattgcctactctgtgccaaggattatgcaagactctggagatatcgaaagcaaaagaaaaatgttttgtggcttcaccgacctttggcgtggaatcctgatacccaaaatgggtcacaaatacacatattccttgagctcttataaaccagcgctttatatagattggttctatttaaagaaaactccatgggctctgaaaggcatgtgggctctgttttgtagataattgttgtttgggcttagaaaggctgatgcactggttaatgctgtgtagctaagaaagatgaaagctgggacacaaaccacccacttccatctaggaaggtgttcttcccattattcttttaaagtaagagcttcccggtacacttgctccccctctccttccctccctccaccgctccctccccactctcataaatactcattaaataatctgactcatgtcctaaagaaacaacttctttattcttcatatatattaatatagaagtggtcacaaaaactgtgctttcacaaaatgacttaaatgatccaaacaccacctgaatgctacaaagacatccgtagaaaaaatagaaaataaatgtctttattgaatgaatgttgcactctaattttacattctctcaacttcacaattaagatgaattattatcgctcttgtaacctaagtgtgtatacaggcaaagctgcctccttccacatatgtgacattttcagtaacgattggagttgcctttggcttctcataaggcaaacctcagctttctggaaaacactgctggcacgtatgatttagttgaaaaccaacttgactcagctggtgcgaaaattaaagctctgcccatttcaatataacataataaaaagaaaacacataactatgcataaaacaattaacaccatgtctggcactagaattgctgaataagttggaagttgaacatttccactttgcctggcatagtttcagtgtacactgtaagaataacagctttcatgtttgattaatacaagtattattaattaaccagcccagttgccaagccagaagagacctatctgaaatacagtgattttgttgaactataaacagaaccgactaaactttgctttgatgactaaaacaatacctacttggtttaagcaggagtgaaacaattccgaagtgcctgtgtctaatccatattctctgtgtgtcactgacaactctacagaacatgttaaaagccagtcttcagaatgttggatcagggaacctagagtttgtggctctttttaaccctggagggcctgtgagttccagttaattcagtggtcttagaaaacaaaatcaagattggttttgaggggaataaggaacatatatattaaagatggtctgaactggtggttgccattttcagacattgagcagtcagtatttgcatgtactgtgtacttctctttgtaggttaatcaggctcagagaccatgccactgacattggtgtgcacaatctctgtatttgagaggcaggttggcgtggctagttactcactgaaggttccagtagcctaagcctccagcacagagcttctcaaaacatgggccctagaatagcagccacgggcttacctgggaactcacctgaaatgcagattcttaggccccacctcggacactggggtaactctatgattagtctgggaaatctgcatcttaggcatcccaggcaatttggatgcaaccactgcctccgtatgagtcaccatcattttttatttattttcaaaaagttaaaccttcaccatttagctgaggtgccacagaatagaaagtttagccacaaacagaaaagcccccgttgatggcagattgactcgctccgtggaatcgctgcaagccgtttcaaaatatggaaaattgggctctgaaacattgcgatgttggtgttggcaagcagtcctgctgatctgcagagaaatacagggtcttcctgctgtttcctttctcctgaattctttcctggcctcttagaaactttcctttgaggcaggcctgaaaatatcaacccctccatgaaaatgagttgtttaccctcccgatcattcgttagaaagcattgaattttgctgaatcaggggtaattgcttttgacaagcatacacatctaacagtaagtgataccgaaaacacttggtgcaaggctcaaaacttggaacattctagattcttaataacgggtcatgccatttggcacatctttgcatgtaatcttaaacagagtcagtccaaccacgacaataatgaaaaatgagtacaaaagggtgaacaaaatgagatgttatcctggtgaaacgacagaaaacagggcacttcacaatgggtgggtgggtgtggggctttcaaatataagaagtttaatctagtctgagtcaattctacttatctagaaagaaggaaatctatacagagaaaaactaggtttaaggaagtgactactttttgagtatgtcaaaaggggaaacaaaactacttctaaaatgcggtatttatcaaatgtagtttcttccttatttagagtaatctaaggcatatcttccttattatgaaaatatgaacatatgacatcatgttaagttcaaatatggttcatgaaaccatgttaagttcaaatattaaaaaacagagagtaaaaggtaaactatgcccctctttcatttctttcttctacctatctgttctctatggataaccactagaaactgacgtgcgtattttctgagtatattctgtgtttaaaccacatttctgtttgttattccattactgtgtgaagctgaacaatcactggatgcacatgggccaagtctagggcatagccttgacattataggtataaaacatatgaaatgtcttcatttgtcttcacatatcatgaacagatgtccatgtcagtatgtatagacttacttcatccctgcagaagtaggaaagcagtcattctataagtgactgcaccatgaatgtcaagcctcttcctcttgaaagtataagatggtttccattcataaatggtccttcaagtcagccatctttacacatcactcctcatttgtttgtatcttgaaaaggtatttccatagaggtaggttgtctagacaaaaaaaaaggggggggcactttagctagtcttcatacacactaaggaagtattctataaaaaagcaacagcaaatgagggcttcttagtgtattatcacctgttctaagtcacatcactattaaaatatatttgttctagttgaataattatgtgtatgttttctcctgagaattttgtaacttaagctcatgtatgtcattgtctcatcttaatattttgcagatgttgtgggagtctagtttcattcttctataaatgtatatcccattttctaacacgtattgctgaaaagtattcttatttcctccagtgagctgtcttgggtccttgtcaaagacagactggctgcaaatgtgaaggttgatttctggaatctctattcttccccatttgaccgtttgtacactagtgttgagtttacacttgctctaactgtaaggattccaaactgagacatagtaaaagttcaagagcttcattctttttaaagattaagtggcctgtctcatttctttgcacttcaataaaaattttatgactgctttgtcatttctttgtagaacctgcctagaaattttacagggaccacactgaatctgttcctttatgcctattttatcctttgtgatgaaatggtaaagaaatttttgcttttaatattcatttttgcattgttcattttaagcctctagaaatgcagtttatttttaaactgtatattggaagtaaaatttaaccttgccaaacttgattatgagtactaacaaactgattacctcgatacaggaacacgtaatctgaagagagaggtcctcaaccttttgcatttagatggcagttgttttcatttcattgcctacgtgcttggtctagaacttccaatacagcatttcatggatgaaaagaacacaaatctttgatttgctccaaatactagggaaagggaaaactttagctcttttgtcattatgtataaaatcaactgtgtttctcatagaagctcccacgaggctggggaagtctctttatagctaagtctgtgtcttagagtctcagctatatagcacaggctgtccttgacctcaagagtctcctacccgagcctgggttgacagagttggaattacagtcatacactaccatgttttcccttttgaggtgttgtacattgaattcactgccttgcaattacactcaagatctgtcagccagctctacttccagcccttgaagttcctcttacctcttagtttgcaagactgtaaattcaatgtgcccccatcactttgttcttgaactgtagaggtttagaatttttagtctgtcttgggtttgtttgtttctatagggaaagactcatcagttttgctgacccttaaaaaattggggttctttaattatctctttagaaaacctttgtttcttaactttttttcctacagtctttactatttctgttttgctttgcattttcatatttttttccttttattttcaggtgccaaggcagaaatttcaattgttaagtagaagtctttacctttttaaatgtagttgtagctgggaggggtggtgcagcctggtttacagagtgagtttcagcacagccagggctacacagagaaaccatgcctcagagagagagagagacagagagacagacagagagacagagagacagagagacagagagagacagagagggagagaatgagaattaaataactgaataactgtggttgtctatggccagaagcttctccaggagcccacacatcttgatgttgttccttcatcctcagtcaccatgaaatacatcgtacgctctctggtgattctcgttcttcatctattgctggcctagaactgttatttaattcccatatgaactttgattcttccttgtttgtttctaattccacactgcacatgatctcaatccctttgtatttatcaaggctttttttttgagggggggggctgttccaaaatgttttgtacttgacagagatgtgtattctagacattttggttgttttagttgttttttgtttgtttgtttgttttctggcagtaccctatagcaaggagtatttcacagtctgatgtgaaatactgggtttgttgatgaggttatgctttgaaaataggataggaggtatattctgacctcacaaggactctcactattttcctctttccatgccccaccctcttctcaagcttcctgccttatattgtgtcctgttgatctcttaaaactctcaggctctccttaacaacttaccatcaataattctatttcttcccatgttctaggaatatcaagcctgtgttcttattcacttctttccttgggcaaaatctcaagtctccactccactctgctccactctgctctgctctcgtcctctccactatgctatgctatgctgtgctgtgctgtgctgtgctgtgctgtgctatgctatgctatgctatgctatgctatgctatgctatgctatgctagcatgagcatagaggacattactagttctctcagaatgatatcctgatttttttttcaaaattctagatcattgattttaaacctgtgggtcgtgacccacattagggtcccatatcagataacctgcatatcagatatttacattgcaactcataagagtagcaaaaccatagttgtgaagtagcaacagaatgattctatgattggggttagccacagcataaggagctataccaaagggtcgcagtatgaggtcgagaacgacagtgatggagcagcagcctctggagctcagcttgtcttttctggcgtggaatcttggctctaccagaaaactgggataaaggcaatctctgactcagtatttacagtataaagcaatctggatactgagtctacccatgtattgggtgaggaaaaaaaaattccgatcttttgattgcagttgacaaagactcagtatgtatagcctagagtcatgtgggaagctgagcaacataaatggcagcccctctagtaagacaggttatctttgactgggaggaacaggcagatggagtcttgcttgttcttcacctacagtgatgctcttcctaagctgagctgggggcagggatgctggagttggggtggggatattcaggttttattcctttcaatcaaatcctggaagtcactgtctattatgattttatattgcttttctgtaattttctgtagggcaaagggaaggaaaaattgcagactctactgaaggaactaaagtaatatgaagataaatgtaatatttgatcatacaccctaagcccaaactgatctcagatctcgctctacagatgccattttctgcttcctgccactgcttcctgtggcatggggaaaataatacatagctcatctttgtatatgggaactaagtgacttaacaaatgtaatcggaacagcattgagcatttaatcaattctgagtaatatgtcacaattatcattttgcttggatgtttctctgactaactaatacatactaaacctgtgaattgcagacatagtggtattctaggcatttgactgaaacaaaacaaaaggagaaaaaatatcagaaatttaacggtccttacaaagttcctcaaatcccagagacaaagaagagggcaaagtccacaggtgatcaatctcattccatcttagcatcggtctaccgaaaatcatatagactcacacctcaatttttaaaaatctatttattttttatttaatgtgtgtgagtgttttggcggcttgtgtgcataggcatcatgtgaacacttggtacttaaagaagccaggagagagcctcagatcccctggaactggaattatagatgatcgtgtgccattatgtaggtgccaggacctgaaacaatgtcctttgcaaggtcagtaaatgttaactgttgaaccatctcatcagtcatccctgaagtttttttttcaattaatttatttttatttcaaattttgtactatgaagtcagctcacactcttctcctctcccaatttattctacaaactccccaaccaaccagtgttcccaacttcatattttcctctttctctcaacaccaccccccattgaaaatcaaaacaaaacaaaaggacaaaaaaaaaaaaaatacccaaacaaaccaaaaagcacaccaaacagaacaaaactaaacatggagtctgtattggtctggtcatgaggccttgcctggagtgtggttgattgacccagtggcacttctttgtaggatgttgactgctcctcttccagtaagcatcaattttgactgccttcttggttaggggtgggactttatgtctgcttccccttctcagtgttgggatatgctttgtctgctttgaacaagagcagatcttccttgtgtgtgctgtcacagtctctgtgagttcatatgtgaactagccctgttgtatctgaaagatgctgtttccttagagtcatccaccacactgagctctcccagactttctacctccccttctgtggagattcctgagctctgaggtgaggagtgtgataaacacataccatctaggactgagtgctccaacacctcttagtgtctgcacattttctagctgtgagcatctgtattaatttccatctacttcatgaagaagcctctctggtgagcgttgagtgatgtgtccatcctagtgtggtggctgtgggtttgtggtagagagtggttctgaagattgaccaagtcacaaaagatagagatggtgtcaaaggcaaagttgaaaggggcaattaaaaattaattaattaattaattaattaaaaagtagcactttgggttccttctaagagggcaagtctctcagagggacagttgggctgggagaaccttaatttccctcaatttttcaaagagctatttacctcatgacacattgttcaagttaaatttatgaaatgtggtcattcattcattcattcattccatcattccatcatgtgtcacacctttatcaaatactcactctgatgaagacattttgtcaaaaaccccagagtgaatcaaatggagcgaatccctccatacattcacttgtgtctgggtatgtcattactccagtcacaagtatcaggatggtcactcagtatgaaagtgatccacgacatccttcgaggaagttcttggtagagttccaagttggcttataaaagtactccaaacattgaatgcagctcttcctagaggaagataaggaatcctcccaccccttacttcagaggattctagagtcttacagctctatgacatttaagataaacacaccctggggagtggggagggggggacatgtttcctcaagttttcaaagcagtcaggagggatgcttccatcacatgtgttagtcccatagatccttctgggttgaagacctggctgcagataccatttattcatctgcttctgaaaaagtggtatacacacaatgccatggatattttcagagaagatattagtttgagagaacacctatgcactgcattactaagctccaaacaggttcaactttgatcaaaaacaaacaaacaaacaagcaaaaccaaacaaacagctgacctggaaggccatgtagctcatgtttggatataatagaggggaaacagagcccagccattcactctgtgtattccgtagaaagaatgtgaaagacagtggagttatctgttcagtcctcagcttgaaatggatcttttcactaaccagattccttatcagtctctcttgtcctttgggagaaggtaaaagaatgaatgcccggcaaaaccatagttgttttaggctggaagtacgtggagaaagacttcctactctccctgtcttggcagtggacttgctggggtatggcagtgagccacccatatattatggaaatggactggggcatagcagcaaccacatatgtggcagggtcactgcctccagaagagctcacggtgccctctcaagaggaacatgtttccacccacattccctggccagagcctctgtatcagacattggggaaaatgtggttaagggctggttcttcttctgaaataaacatttttcctcttgagctcatgtctacttaagtatacactcggtcccttagagagaatgcattgctggtttcaaagaactgtgcataaattgctttgaaagccgaaggagggaggtgccccacatctcctccctagttttgcaattggactgtggaaggagtcttgcctgagtcaaagacacagagacacaaatctttcttgcctgacactttaaaaataaaatgagttgtacttgcatatattcacccagaaatcccctcactactgttcattgagacctcacaggccttctcgaacaattccaatggtcttttcttaggtttaaacctctttcaggatggacagatgttctttgtaacccaacttcaactgcataagacagtactctgagcatctcttttctttatttgaacttataatttattcattccttctacgttcttgcaagatttcattcagcataggacttttacatcaatatttttaatgttgcgattaaatgttatttattttgtttattgggttattggtatctccatataatttgctgccaagaccagcatggtaggcatgccagtgtgctctctcagccatggtcaagagtcatagttctgtgaaagctttactgtgcttatgggttctataaatagactctttggaagaaggattggtaatagtggcctcagaaaagcaataaagtaccactctctcctccctacagctgcgcatctacagaacttttctaggaacactctagcctcaagatacactaagacacattctctgtaacatctctttgttcttgtgttgagtgcaccactgtaaagtttcccagcctacgaacatgtacaatgaaatgaagtccacgtctcccaaaacactgtcttacttattccaagataataatctcctgctggtatgcgaatactaatcaagcaatgctggacacattatggaaaacgaatgatgcagctgagctgagtttattttcaaagcccggagacgtggatcctacaataagtttcctctcttgtggctgtccctattattccacatgattgatgtgtgtttaatgatttttatctgatgtgtctgggaactgtggagttgcaatcacttaggcaagtgcaggcgtcttccttcacaatgaaacttgctttagccacagagcagggatgctgcatttaaagatagatcggcctttggaaagccactgtacagctcctgcaacttgtaacagacctgactcacacatgctccctgagctctcagtagcatctgaatttctgtgaatttttttctgcacatggttttgttcacatgcttataacaccactttacagtatattagaaagttctagttgtctccccaattctcaagaaaggaaaacagctatgcaagactttagtcagtgacagactcaggaccacatacgtgagattatgacctatcttattttagcttcatagacattccatctcttctctctgtcaatattaacatatccacagattcatgggataactattttatatgttaattgcgctctagttttattgcctagagcaaattatgtctgagagctcacttctctgtttctagttatttatgtgtatgtgtctacatgagtttatgtgtaccgcatgtgtgcaagagcccagggaggccaaagaagggagtgaaatcacctggggctaagagatacaggcagttgttagccactgtgtgggttgtgggaaccaaccaggtcctatgcaagagaatgaagtgttcttaatagctgaaccatctctcaaccccatgtttattcttttgtatgatttcccaactttaatggtaccaagaggccctccaactttccagcctagaagagtcatacccttaagagtagaaatacaaacagctttatcaagggttggtctttgaactcatggagcaaacgctagataggatgtacaaaccaccgagtcttgtacacaactcagcaaagattttcctcattgtagcaaatgtctccctctcactgactctgataccctcctcaagcacacacattattcacatttaggatgcttcctatatcttcatgtttaatctcccctgaggccatatttgacattttgctctcttttattctgggacacaatcccagctgtgacgttcagtttattctacttgtttgctatggttgtaactatgttccttgcttccacatgagtgtaatgccatgatcggtttatgttataatactctatttctcaatccccagccatgaaattcattcttaaatccctgtctggtcttaccatgtcaagcttaatgtctgagatcctgaagtctagtgctcctgactttcactataaatcaaagtagatagtggaaacttgatattcatgtctgctgatatctgtagttcccacgacacctctattgacatgttcttccagggattggagctgtgcaatgtatatgtttgttttatttggtgctcataccagatagaaaatggacaatcaaggtgcagaattcctctaaacagggtgggtagatgctccttcgttcttctcctccttcctcctcctcctcctcctcctcctcttctttctcttctttctaatcttttctcatatgttaacttagaggtcttgtaggtaagtatttccaactgctgagaaatcaaggacacaggaaagagacctcacgtataggcgagtcttttgatccatcctgcccctttaccagttatccctctaaagctgcagaggttgactgagtcatggtctacatgatagctgtgtagtccttactgactaggcagccttgtgatccctgggttctgctcactctctctgggactgctactctgcagcctattatgcttctgacatcaagccttcctagaaggaaacagacagtacttagctccatatagttaagagaaatattgggactccccatgtgaggaattttgatgtaactgtgagagtagttaatatttaacctaaactttgggacacctagttatgtgtaaaagtcacccgtggaagtaaaaatttattatcttatcgattagagtcttcacagacctttctgatgccagcactatttatggtcgactttcacatttgtgaaggattagaggattttgcttttagtttgcactgcaaattcttttatcctcagataactgagtctgtgtgaatcatcaggtatggcactccgacccaacaaagaacttcaaacaacactgtagctctcagaaatttttctgagtaacaaacatgtaaagctgaaacatgcaaaggcatgtaaaattgagctgcaaatggcctgcagaagcaggtgaatttctgggagttcaaggccattctagtctacaaaatgagttccaaaacttcacaataaaaccatgtctcaaaaagaagagagaatataaaattaaaacaataaagttaaccttccaaaccctcctaaggtctccctgctatcagcacaattgctggttagatgcgtcactaagcatctgctgagcccttgaactgatgagcagctgtctgatggtgctgtgacatcattccacacagagatgtgtgcatgtgtcactttcacattggctacagaagaaaatttaaaaatccaattccaatgttgtttgtttgtttgtttgtttgattgattgattgattgattggttgattggcttggttaggtttggcttggcttggcttggcttggcttggcttggcttggtttggtttggtttggtttggtttggtttggtttgggtactgaacatttaccctacaaaaggctgtaccggtttatgcttctaccagttttaaataatcacccaacgtaaaaagtaatgtcaaaacaaaataatcatatttgattggtcaattaagggagggctttcttgagaagttttcattggggtactttgcctatgggaaaggattcttacctttttcaaactgatttatagtcattataaacttttaaaactttgctatgcatttcaaatacttttgcttaatacattcaatttgtaatttagttctatacattttctcccccccatcacaaatcaccattttagaaatgaaactttcagttacatagtgtggtgggctctgaaatttcctattgaattgaagtactatgaagctaaaaatgccaaaaccacattacatttcagttcataaatatttgttacatgcctgcacttctgtgttaaatgctgggttgcaaccttcactgctgatattattcctctttcaaacatcaacagagaattgtagtaattcatgattacagtctgtcttccctccacaggataactttaaatcaaatttgaattgttttcaaccatgtacttcattttcttgctactgagctgaatctactccaagtatttcatattcctctttagttatggatactaaaaactgtgcattcatgaagtggggatgagtctaaccaaagatcacatcttcttattagctactctacattccctaccagataaaaactgctgctctcactgaccaaagagagggccacagagaaatggcctggaagaatagactaccatctagagcccaagctatgagaccaacctgtagaggagcccaggcacaataaattcacaacagtcaaggtagtcttctcttcatttctctcctctcttcaccctcatccttcccttcctctctttcttcttctttctctcctctctctccctcctctccctcctctctccctccttccctccttctctccctccctccccatatttgcatctgttcctttccaattttattctctttattcagacttagcagattaccacattagacatcaccacttccttcacggtaactgaaagatgggatcatttcaaggttaaactttcagagctcccagactcaatattttgtgctgtaagtacttaaggtcaaaatgatgtttttgtcaaaatgatttgtttgtttagtcattcattcattcattcattcattcattcattttttatcttttttttaagtattagatagtataagctttgtgcatatgtcttgtatagtgagaattaactttttatttaaaatgttttatatagaatattctagtaaaaaattttttttatatttctgacccacagatcacatcagtataggtcaacccaaccttggccacacactttaaccaaaattgttgagacatgctgattttaataagacattaatgaaggctacaagccaattcatcttcaactatgaagcaaacataatgtggttatatttaagttgtaaaattgcaagacaccagtccaaaggccagccatctaggcaatcctaaagctcccagtggtctcagagcacacgttgagaacagccattttatggctttttgtgcatcccagtagcaaaatttcttttcaaaatggcacagctttgctatttggtcaagaactcttctagcttttacttatttcttgccagatcattttctttctctagtgagaaattgaatttaaaatctattttattactttccctttcaaaaatcacatgaaatatagtttataatgatttatagcaaaagcttcatccacacattcatgaaggcagaatggcagcagcaaagaatacaaggaaatgacctctgcatcctgctttgccccatactactttcctttgatgctcaacgttgaatgtggaactgagcagcagaagcagccattagagtttgcatcccaccaaaagttcactaacaaaaagagactcggaaagctggaataaatgtatcagtgaagaaggggagacatttacacaggatggattgcagagcagagcagcagaacaagtttctagatttaagatttccatccatacaggcaggaagcctgatcatgaaagctggagaggccagtgatccatgggaaatgatgagaagtgttcctccccaagtagcgcctgtttaaagaggaaccaggacacccaagttttctgttgtctccttgaagctctgtctgttgtgttattgttaatgttaaaagtgggtactagagagctaattgcaacagagaggccaaggctaacaggaattgcatccctaaccttaaccttaaccctaaccctaaccctaaccctaaccctaaccctaaccctaaccctaaccctaactctaacataacaaggaaatggcggagggagacctaggatctgtggctgaccagtagtctttttgactctacatggtccacctatgaaccacatatttaaattaaaatctgggtttttgatagtaaatagtttcccttaaggccctcctgggtctagaatcctcttttatccttctgaggcacaatattcttcctatgatctgaagcagacagtttggcactaaaagaaggtgagacgtgttgaaacagtcctgccataaatagcaactttgtctttctagacaaggtttcatggactcctgactggacttgagctcattttgtagtttatgatgagtctgaatttctaattccccagtgatgtctaccacctgaaagagagggctatcagtgtgctagcatactcaatttatggtgtgctggggattcatgcatgctgggcaaacactcttaacaattaagccatattttcatagcattctttatcctctaaatctctgtcagtcatgacactgatcatatagtctcaccctccctttctcaaaccttaataaagaaaaaaaagcatgtagatatatttattaggtataacatatgtacatgtttatttagattgtaatataatctatttgtgcaacaaaagcactaggtttgaaaaccaataaagaatccctacaaattcctaaaagaatttcctatagaaaaatattaagagtcttgaaagggtatatcatatatacacaaaaacatttaagtaagtaaccaagaaacaggaaaattcccaacctctttaataatctatgaaatgcaacttaaaccaggtggtggtgacacatgtctttaatcccaacactcaagaggcagaggcaggtggatctctgtgagtttgaggccagtctggtctcaagctcaggtttcagggctgccagggctacaaagagaaaccctgtctcaaaaatagaaagaaagaaagaaagaaagaaagaaagaaagagaggggagagaaggagggagggagggaggcgaaggagggagggaggggaaggaggatagaagaaagaaaaggaaaggaaagaaaagggaaggggagaggaggggaggggaggagaggggaaaggaaaggaaaggaaaggaaaacccacagtgaagggatgcatagattagcaaatctataaataaataaataaataaataaataaataaataaataggagtaatgcagtgtcaggacatgggagtgtgtacggtgcttggggaatgggatatgaaatctttgcatactctaggtagtcgggaaggctagatgaccactgtggtgacagtgagtgcagcttcagagtgaggctgagggctgaatgtgacccaagactcagtactcacaccacagctatgtgcctgagagatgtgcccaaggagagaaaactaagaacactcacagcaggcgtatcctaagagggcagtgttcagacagccctgctatcaacaacaaaagtaaggctgatgtctttagacactgagataggatagaacaaagccattaaagaggttatagccaaaagcaggaggactcccaataaaaatagtgaatgaaagaagccagaccaaagtgagcatctacacagtggatcccttctcattgctcaaacaataggatgggtaatgctgtgtttttgagatcgagtacataagtatgaaaactaaatgagtaccacaaaataaatacatggagttaaaatagatatcgtagtaaggaaaagtcatggcgttctgggtttgggtttcttgatccgtctgagtgtggaagaatgtagtcacttggtcagtcactagtgtaatgatcctttctgaatgtacttaatagatcgcagtttaaaaatgtttaaaagaaagcaaggaaagggctggtgagatggctcaatgggtaagagcacccgactgctcttccaaaggtcaggagttcaaatcccagcaaccacatggtggctcacaaccatctgtaacaagatctgactccctcttccggagtgtctgaaaacagctacagtgtacttacatataataaataaataaataaataaataaataaataaataaatcttaaaaaaaaaaaaaaagaaagcaaggaaagaaaaaatcctagcatactgatgtgggatttgaaattgcattgtggaagcaaacacttattgattgaaaaatagaagaggtttgaagccagagatttgttgtaggaaaattctaaaaccaggaaaaatccattaacctaagaaacaaatctatttctcagaacaaggcaagctctgtgtcaaaaaaatctcccttttgcttaattttatttttaatttcattgagaaggaattaagagatgaaagctgtattctgttcccagctatcgtgggagtcacccggacaccctagtaaaatggttaaataggccaaatatttcaacatagtaacctctctaacatcggcaaagtcagcacacatgggaaccctttcgtattctctcttaaaaccctaaatcagtgactaacaaccttccttgtgcttcagccctttaatacagttcctcgtgctgtgacgacaccccagccataaaattatttcattactacttcataactgtaactttattattactgttatgactcataatgtaaatgtctgatatgcaggatatctgatatatgacaccaccctccccccaaagaggtcataagctacaggttgagaattgctgccctggctcattatttttattttatttccatcagcaagaacctcctctaatctgggcatattactgcacacctttaatcctagcacttgggaggcagagatagatggatctttgtgaggtcaagggcagcctggtctgcagagtgaattccaggacagtcagagctacatggagagcgaaatcctgtctcaaaaatacagatatagatagatagacagatagatagatagatagatagatagatagatagatagatagatagacagacagacagacagacagatagatgatagatagatgatagatagatagatagatagatagatagatagatagatgatagatagatacatagatagatagatagatagatagatagatagatagatagatagatagatagatagatagataagaatctcccatttccattttatctgtataatcaattacaaatcaccaagttctttcaatgataataaagcctgcctggcccctgctccttctgctcacatggatctgatgagtaactaggaattttcagcagtgtggaatgtttttctatttctccgactgtcttttgttcatcttctgacattcattatatcacctatcactataggatagatacttactttctccttacaattattgcctatttacatataaactagcccccaaaatatctagaaatcattcattacaaaaatctcgacctgatagtggactgacatctttatagtctctggcctcccggattgattggagtgtgagaatcccatcctgcagtctaccagcgtgtagcacctcacattgacaaaaacatcctcggtgggggaggaaaaaagagcaggcagacctgagagggaacagacagcaactaaaacggtgtcacatgtttgcaattcaaaacatttgcttcctaataattcattccgaaagcagagggatactttaatcctgtatgtacttacaacagtatggttctcatcatccaatttaaacacttttattgtgcttctcagttgctttctcacgttgcactttgacacttcataatcaaatttgctcaagcttaatatgtgacatcataaagaataactgtcatactttgaggcagaccataagacaaagacactttgtttcagaaccacaaaaagaagggaattcacaagactcattatctgagacacgagattcatcctgaggggtgaaaatgtgggtgtcaaacttacaaggcttcttcttctacagctttgctttctctgtgtctcactctctgcctgtttatttgtttgtttgtttggtcttttggatttgtaaagagtgtgtgggtccactaggcagcatgtcccaaaaagatgtgtgcagtgggaggaacccagggaggtgttctgttcctttcctccctgactcttctaactggatctttggataaaattcttgtcgtctggcatgaactctacaagcacaaatatcagcttttccttctatcaacaaagccagcccttacaactttcttacacttaaaattcctaaatgtgtagcaggcagaggaatgttatatttcatctggtcatctattccccgctaaaacacagaaaactgtgttcagagaaaggagatcaaagagtctatgttaatgcctccaccaggtttctgttcatctgtagcctggcctgctctggttgaataattccagtgctaagttattctttcactgcactgcagactgaaaggtaaattgttaacacatctcagtggggctaggattgctgatctcccctggtctctgggatgaggctggggttcctgtaattaaaaaccctggagtggtcagactttatcactcatttatttgctctggccttatggggtctctctatgtaggtcagactcccttggaactctccagttttcctgcctccgcctccacggtgctgagatcgcaggtgtgtgccatcttatgcaggtctgctttgatatgtcttgagcagtcctacattgccatcagttcccatccagcctagctttacatcctgacatttccttcgttttctccagcttctaccactcccagtcacacattttctgtctgaacacaagttgacagaggcagccatcaccagctgtatgtgcttggactgcagtttatgtagcagttgtagagtgcttctctgcattctgcatgcacgactgagggtttgtttttgtttttttggtttttttttttttcagggactctctccagtgtcaactagggtaggaatcctgggcataataagaagatgcagaggtgtagcctttcacagttacctcgcttgtgctggataggactgggttttgagggctcttgggtgtgcaaaatcgtatcatggttgtttatcagttgttgcttttatgaattataatgggctaaaatgaaagaattacaaggtatgttctggaagatttggttgctgtgaggtggggagaaggaggtaggagtgatggccaaagcctctttgcccagctcaggatgcacagaagggaggatcaccagaagctccagacaagcctgctctagcaagaccatctcaagttagttagctaactcattaagtaatgtttcaatgacaaattaggtaaagcagaaagaaagtggtcaagaagaaaagaatttccttcaagtgtcggaagacagagtccatgaagtttaatccaagaaaaggccagggtaagggcttaacccaacgtccagacacgtcttcaaggggacacagtcccagcttctgcagtgattctttgaatccgtggcatttcacggccctgttcacaatgctcagcaatcatttccagctgtttctcagacatttcctttccattcctccactgggaagaaagagaaaaaaaaatcccttatgccagtgtttgtagatcatagcattagctgtaaatccactccatagtagtctacaaacctgggtttttatttcattgtttctatttcatgccaaatcatagtagtttctttttaatttatagaaagaaacaaataaaaaggctcttgaaagaacctaaggaacttcccttgcctatgtcataaaaactcactagctcacacttacttaattagtgagagctctggtttgcaagctattgaatttaatgttcatgcttttagcatacagagaagtatatgtgcatgtattcataggagtaatgttttttatttatttatttatttgtttgcttgcttgcttgctttgtttatgatgtttcagacccaaacaagggcttcgcaagtattcaattaccaagctatatccccagtttccctacctttaaaaacaaaaacaaaaataaagaatcattaagttacccagtttagtcttgagttccctctgtacctcagctgtcctgtgacttttcggaggaaatgtgaacattccaaataggggctgactaaggattattagactaaagaaagtattctacctgtttcttgcttgggaactagtgaatgcattggggtccttacagttagtgagtgagaggttatatacaggagcgtggagcctagcatgcagtgtaccgccaaaaacccacctgggaatgggagatgacgtaaaagctgcaggttgtaggcagctcctccaagggttgcctctctccagagtttccagattgcaaccttgtggaagaattccttgagtcctgttcctttagctttccaagtcttaggagtctccttataccccaaagagaaggtttgaattttgaagagctacacaaggccaagcagactttaaactctccatcccactgcctcagcttcctgagtagccaataacagaactgtgtacccaggccagactgactttataatatcagagacagcatagtgtctgacgtttgcgtcaagaattactatttcagagttggagactcctgggctcactgacaagctgtgagacctcagggaagtttccctgcagtggaaggctgaaccagactcggatggatgtgtgtaattgtgcagagacacgttccattccctctcacagccatttgctcatttgcgcactaaactttacgttctccccagaagcagcttcggcacatttcttagcacattgctccagtgagcatccatcaatctgtcagacttggcacatgatctcaagcatttttgtggaactagatgactgcaaaggttcttccaaaacactgcagctccatatgttaatagagtcttaactaacaggctttaaaggagatgcttaaaaatgagcagggcatggtgaactatgcctatagtcatagcattcggagtgctgatgcagatggattgtacatttgaagctagctggggctacctaatgacttggagaccaggctagtctgggctatatagtacaaaattaggtcaaaaagaaaatacataggaagggaaatgagaggagaggggagaagagatggaaggaagggataggaggaggtaaaggatgtagggagaaaagagaaaagagaagggaggggaggagaaaggaggcatggacaagagcggggagaggaaaggggaaaaagtcagtgatggcattgactgtcatctcagcactgaggagtctgaagcaggaagattacactgagtcaaagcttgcctgtgcaacacagtaataccaagtcagccatggatgcatagtaaaacctaatatttaaataataacaatcctctgtttgtgtgtgtgtgtgtgtgtgtacatataaacataaaacttacctgtctcatatcatcttactcttagtagccacaaacctctattccataatatacccctagctactctataggcagactggttgtgcctataatataacagaactaatctacgatgcaattcattgtttttccttctctactagctgaaaaactcgttattgttcaaaaccgcataatcagactggctgatttttgtataaaattttttgagtctcggggcctctgtaaaacatcaataagaatctacagattctctgggaagagttagaagtaggaatgggagtatatatgatcagatcgtacaatctcaaagattgataaatgtatttttacaatgacatacaacaaaagagtcataaatattttgtagcttataagctactttcaaattgctttataagtgctcacgtcattagatggatttataaaacacaatggttttcaccagacaaaatacaaaagctctcctcataagcacaatagttctcatcagactaggagaaagggctagtaataaacggattatgaacccagtgcttgaatcaaccaaagggaatttttgtgttgaacactcaaatatagaacacacggtgtcaagtatcttttaagtcttcaatgaggccaggagaatgtattcacttacaaatatgcttagcaaatgtggatcaacactgctgtccaagttccctgctgaaacctcatttgtatgacttcctttcttgaagtagtgtatcaagtaaaagtggtggccaatatcgttacaggtcttggccaataaaacctacacatctcaagagcataaagaaaaataaaccgggcgtggtggcgcacgcctttaatcccagcactcgggaggcagaggcaggcagatttctgagttcgaggccagcctggtctccaaagtgagttcaggacagccaggactacacagagaaaccctgtctcgaaaaaaaaaaaaaaaaaaaaaaaaaaaaaaaagaaaagaaaagaaaaagaaaaagagaaagaaaacgtgtttcctgatttgctttccctctcctcctggaagcagagattgtattattaagaaaaccacctaacaggatcactggacacttctagtgtttcagtcaaaaacccttacagttgctcttagctggtccctttctctaaacacttcacccagcgtgtttatccagttctgttggctcttgctttacttctgactgcttctcatcaccagctttcctcatgcctgcactgattacacctgtaaccacatagcttgtgccttgctccaatccttcgtctcacctctctgtctgtctgtctgtctgtctgtctgtctctctcgttctgtctctctctgtctctttatctctctctgtatctctttctgtctctcttctctttctgtatgtctgtctctgtctgtctctgtctctatctgtctctgtctctgtctctgtctctccctctccctcctcctccccctccccctcctgctcccccccctctctctctgtgggggggtatggcatgctaggaagaaaacctcttccttaggctaaacaaatattttcccactgagcaatgtgcctagccctccccagcatgtagcacagtgtctagcacatagcaggtgatcggtaaacagcttgtagaatgaagaaataagggaatgaattagccagctgccagtatgactcaggatcagaggaaacagcctactcacaagcaatgcactcctagtacaggcttttctgagaatttatatccaaacttcataattcagtttccttctctctaattgaatcaatctccccaccccctgccccagttttgcagatcatagtttgcagttagaagaaaggattgcatcgtagtgtttcagaaatgattacatcatttcaagatttgtaccactatctcccttcttcggtggccggcactatttcacaatcaccaaataagttggggaaaatgtcgatgtaagcaatcccatttcattacttactcacttctttatgcttaagacaaaaattccaaaacattgacttaaaacaggcaatagtactatatgcttagtaatttatgggaggttgctgagtatgaaggcagtttagagaaagtggaatgacacacatatattttaacaaatacagtaatgggtcaagtttataagcatcattttatcataaggtgttcagataccaaatccacatttcatcttatagccacataaaccctaataagaaataatatgtaaaatcccagcttcaaagccaggtataatatctcataactataatgcccacactcaggagactgaggaaggagagttattgtgcatttaagtccaaccaaggctacgcactgtattctaggcatccacctcatcaatagcataatagcctgcttaagaaagagagagagtgaaaggcagacagaatggcagagagacacagagacagagagaaaagaaaagacaggctggacatggctacccatcctgataagcacaacaattgaaagtagaagggacagctggttcaaagccagcatcagctacacagggaagttgaaattagcctggactccaagacaccttgttccaagcaaaacaaaacaacaacaaagaatgcagtcacctcaaactaaattcattggcacatgtgtgcacacacatacatgcacacacactcactgacacacagtaggatgaagccttgctggggagttggattttacaggaagaaaagaaggagaagaaagatgaatagggaacagagagagtaaaattcattgtatacatgtatgaagttgtcaagaacaaagccaggttttgaaagtttcgagcaaaggaatgtttaatgaaaagacaaagaatgatctggtcaccacccaagctcatttccaaatttggtcaaaacctcactactgtcagcgtgaaaatggtagacattactggatttgcatggtaaaataatttctgagttctaaaataatgataattggctaagcatttttcaaagaaaacataaagttggtattattattactattattaaagttttaaagaacttaaatattgaggcagcagaacaaactgtgaagtccttcttttgaatagtctagagcagaactcggatggaatctcagagcgttacaatccaaactcaaaatccctccatctcccaacatctgtcacattaaagagcaggttagcatgactattttttaaatattttttaatttatttttttaatttatttacaattcaagtgctatcctcttacccagtttaccccctccctctcctggaaatgccctatcccatcgctcctacccctgcttccatgagggtgttcctccacccacccacctacactgggccatctatggagccttcataggatcaaggacctcctctcttcccattgatgcctggcaagctggagccacgtgtactccttgactggtgacttagtccctggaagcgctaggggatctgattggttgatattgttgttcttccaatggggttgcaaaccccttcagctccttcagtcatttctctaactcctccattggggacaccccactcaatgcaatggttggctgtgagcatcagactctgtatttgtaaggctctggcagggcgtctcaggagacaattatatcaggctcctgttaggaagcatttcttagcatccacaatagtgtcggagttcggtgactgtatctggaatgaatccccaggtgggacggtctctggacggtctttccgtcagtctctgctctgcactttttctccatctttgctcctgtaagtattttgttctcctttctctgaaggactgaagtacccacactttgatcttccatcttcttgagcttcatgtggtctgtgaattgtatcttgggtattctgagcttttgggctaatatccacttatcagtgagtgcattctgtgtgtgttcttttgtgactgggttacctcacccaggatgatattttcaagtttcatccatttgcctaagaacttcataaattcattgtttttaattactgaataatactccagtgcgtaaatgtaccacattttctgtatccattcctctgttagcatgactgtcaaaaaaaaaaaaaaagtctcctcatacttgaagggaaacatgtaaaaaataaatcatattgaaacaatgacataatttgttttgtgaggactatttaaaatttgaatattatcaccacagtgaagacagtaaggtcatcaggtgataaaagtccctttttaaagaaagcaggggtagaggtgggagaaattggtccaggcggaagggtactgtttcagcaaaggaactgcctatggtgtggtcttcttgctgatgggtatgttcaagggtcttgggccttcactttcttccttttcaggtagctgattccatcattatttcccatattttttaggctcactttcaaggtctttcaagtttctatcaaggaaaagaggcaccttacaaccatgccacaggatgacctgacaaaaaatttaagttgttaacatcctagatctccctctgtaggagtcatgagtgcttatgtaagacttgtatgtttcctgcattaacttaaggagaaaaatgggttttttcaatcagcttttcaagctgaggctgaatatcagaaacctttgaccagaaaaattcaggccgactcaacagaaccttggattgctttaaataataataatacccaactcttcaggttgaaggatgcataggacagtgcccttgtccttccaggtctctggccagttcacccactattggagagtgggttgtattggacaattcagtccactacaaggatgcccagcactctggcttccacatctgtccacagcagtatccctaatactatgtagcagaattgaaagaacatggctgtcctgtttattttgcttttgccttccaaggatggccaagcaaggtgaatcagcatagttcagtggctcatagtggtatcacagatattcatgatgaaaagacccttagcttattcttcaggttcttatgaatgaaaactaacaccaggaaccatttggttttcagaagaacaaacaacatacatactcaagcccatcccggtggcaacctcctcatcgtcatcaacatccatgaacagcagcttctttttcagagaaatccttaccaaagcaactttttgagttcatgtggcagaaaataacgtgattcacctgcatactggaaaaggttcaataaattgctttaattcttcttcaaacttggcatccaagatacgatgggcatcatcaataactctgtaagagccttatacataaacccctgagcattctgcatatggtccaggagcccacctggaatggacatgataacgttgaatccattgatgcccttctgcacagtgacagcattaacaggtctgcttgtctaaatgagaatgatgggagaaaaatatttcagctcagaatagttccagaaacactaggtcatgggattaaagtgtcttcgttgttcttaacttctaagagttgactataaaaacaaagattgttaacataacaagccagaaagagaaaagctgccttggagtatccttcaccctagaaacctgcacagcacttttcctacactcttaagaacaaatgtatttgcagcataaattaaactgggggttggcatttgtcccattaattggatcaatgagtgatacaaacgagatgactcaactcttacagtgatcttttcttaatttgaattgtcttaatttatgtgtctctagggaatcaggcagctgacactagaaccacaaagtcttcgcctaactctcctgtcttggtgatgacttatttctaagtgaacctattgtgtcaaattagtacaccaaaatgtctttaatatatctgtcacgtgaaattaagcacctattcccctggggcttttccttgtaggagaagggaagaaatggaagatcttcctggagagaatgaagaccagcagaggcttggttggggtaggagggtaagggagatgggaggtgagatgtggggtatatatgtggaccgggtagtgagtgggggtctttcgtctagtgtggcaagtcaacatcggatgtgtgtgaagagggacatatctagaggaatcttcatttccccacactctatatttaacccagccatgtctcccccgtttttacagaagtaataacgaacattttgccagatacacaccaccaactgcattgtgactctcctttcatttttgaagacgttgcttcctttcttttcctggattgtttgtgtggccatactcatactttggatatcatgaagctatttgctgccatgccaagtgagaaaacaacagtgttgttgttttgttttgtttgtttgtttgttgcttgcttgcttccttgcctgttggctttctgttgacaagcttgttgtaatcattagttcaaatcccaagacatctcccagatcagaagatagattacggagagtgtgaatcaatttcaagtgaggagaggatggtgaggaatcttggcaaatttcagagaaagtcaaaggagagtcggtggatagtcaagaaagtaatgagtagtgatggaaagagccccatggaccaatggacattaatctgggtgccgtacttgggtcgtgacctgaataacataagtcctgccacaaagggggtctatctaacctagttgaaatatgtaccctaaggcttttaccatgaattttttacctcctttagtatgtaagtgattatgctaaatgttagccaagaaaaatcaagcacacagagagacctcatactttataatacacttgacactagagaaacaaataatcttacaattgattaagagaggaacacatgatatctttatagtaaagaaaacatggcctccatttggggaaatgccaggatctaagtactagtggaaaaactatcagagaattaaaaaactctactgtatctaagggaagtccatttggaactaagacaaaagcatgtcaccaagaactcttcagttccaaacatcctttcttggccctgcgtgagagactggaatgagtcaagtggaaactttccagggtttcctaggtcaaagcacaggccagagatctgccctctaagagaagctttataaacacaacttaagataacctagacaatcagcaacattgctctggtaccagtctgcccagctgcaaatcgagcttccatcactcactaggtgtgttgtgtttaacatttgaactgtatctcagttttctctcctagaaagtaaaacgaaaaagctttcttcatggaattctctgatgaatcaaaagtccaggtatattaaacactcagcacattgtcttgctgtactatagagtatttattacctaagcaaatggacaatatgagagctctaaacatcactgtatcactgtatcagtaactcctgtgagaaaatggcacaatacaaggaggcaaaacagtggtgacatatggctgaaaataaataaatatgttaaataatatgttaattgaggctcccttgtggctcagaagaattggcaacaaatgtgtgtgtttgtgtacatatacaagcatgtttttatatgtggaaatggcaatgaaaattgaagcaagataaaatacccaaggcatgcactgattgtcagcttcatagctctactgtaaagcagacagcttaacagaacagggaactctttgccaacaacaaaataaataactgcaagttaataaccccagtcctgcactgctgtgaagtttgcattttgactcagatgtttcaggttgcagtcaatggctgccttttaaaagtctagaaatcaacatatattaacaatacatggaatccatcaggtaactctgatgcaacagcccaaaaagaaccgtgactaacacatccccatcttatcttttttcccaaagtaattaagctgctattttaggacagttgaatgtgtgccatcttcccttcccataacctccctttcctaaaacacttttagaagttttgttcatcaagagtctattctaactgccttattcccaggactcttttcaccagcttcagacaataatgacctcatcattctaaaatcgccatgtcccggaagtcatacccaaagtcttgaccatattaacacgttttcaagtttccatccagtcacttccacggaccaagacaagtctacaggacgtagatgatacagcctctgcaagacagtccccaaggtctgttttaatgtgttgggctagatccactgggtaaaggcatgagcagaaagttatactcttaaagtcatcagcatgaagttttctgttgagctaaagccaatgttggggtagtcaatgttgatcaggtagtcaagaggttgacaagacccaagatctcaaagctgctgtgcagcaccttcttaaattttgatgatgttgactgagtcagtgtctggacagtgcacgggggagtgtgagagagtgctgtacagtgagtcaggcagcagacctcacttggtacttcagggtagctccaagatagagctagagcatccagaagcttcatttcttaggataactgaggcacctttcttcaatttcttactcctggacagggcttgaagtttagagcttctctcatctactttaacaaggtctcctcactcatttaacctgtggacctggtagatatattctcctaaaaagaatatgtagtacaaattaaatttctagaattggggacaatataccaaagattacaaattaaatttctagaattggggacaatataccaaagattcctcaaagcatttggatcttcaggtaagcagaatcctaaaaaaggacaagtgtgtgtgtgtgtgtgtgtgtgtgtgtgtgtgtgtgtgtgctgggtgtgctggcacacacccttaatcttagcactccagcaggtagaggcaggtagatctttgagttggaggcaaatctgatctccagagtgagttccagagtagccagggatgcacagagaaaccctgtattggaacagtaacaataaagagaaaacaaaataaattttcatgcaaaaattaaaatatataattcataatagtttagggctgtgaatcatgaaagttaattatgctatatataactgtaaagggtaggatgttatgcttttaggattcagatggatatagcataactcagaatattggttgtattttgacagtggatctctaacctggctccacaaaagaatttactacatacagagcttctgcaaaacgtccatcacagatacattaaaatcaaaacttacagaaaagaaactcctaacgttaacattattatgaatatagtgatctgatataaagctgggggtagggtgagtcagtagcttgaatgatggccttccttggtgcccttaaccagagtttaccaagcatgactgataatgccatggaaagcaaactcctggtacagagagacttagacttaacgggtcctcactaatgggcacataaatgaattggtggtagaggtgatacagttgtcagggatggaaatctctatctttgagagtctcttaaaacaaagctttaaaaaaattatttatttattttatgtatatgagtacactgttgctgtcttcagacacaccagaagagtgcatcggatcccattacagatgattgtaagccaccatgtggttgctgggaattcaactcaggacctctggaagagcagtcagtgctcttaaccactgagccatctctccagcccaaggcaaagcacttcatatgatgatccagagtcctagaaatagttttgatacacatcattttggtttactaagctgaaaccttaactgggtcagactactgggttccggggtgatttcatctttactgaaaatatgactttgaccttgcttgatgcaaaacaactcaaggtttgatttctaaatgggtttccctggttaaatttacaaaacagggagaccgctttgataaaaatatgcttttgatgagattttggaattcattgctggatatactctgtgagtacttgcaccatgtcaacttgaaagaaaagagcaaatatattatattttgggggaaggggagttttttatgttttagacagggtcctattatgaaactcaggctattctcaaactcaaaggcctcctatctcagtctcctggttgctaggacattgtcaagcttaaatgattagactgtcaaactgaactgaattgcgagtaagattcttaaactgtcccatgatctatcactctactcttccattctccacaggccagtgcttctcaggcttttccatttgtgtctgttagatcacctttctccttgtgggaggtccaactcacacagcccattctgagtggagcttaacttcctaatttgcaactgtgtctgtttccactgaccagcagtattttatcttttgtggttttggaggcctctcaatccatccttcctctataatagaaaaagtagaaatagtcactctgcatttttcctctccagtccttctgacaccaaccccacttcctgttcagataggggctcctctactggaggataatgcaacttgccacctgctccctgatttctgtcaaactggtagagtttgaactctgccttgttgtgttctaaggttacctcagaatggaacatttgagagttctttagtatttctaaagtcaacactaccagatatgcctgttccagggcaggggagatactgtttttaaaattgcacttcaatacatcccttgacgtgtccttggacttatcagtcaagacagacctttgaatcaacagttgctagccactaggcatggtggtgcatacctactgagctagcatttgggagattaaagctaaaggattgcatcccagagcagcctgagctatgaaaggaaaagaaaaaaaaattattcttaactcagtagatcatatattttatctatcccaactaaatattcagtttttctagtgtgatcaagtctgcacccatcagctacaaccatataaaacaatactaccgtgaatgttgatcaaacattgagcaagattactactgaaaaagaaatgggagcaactgaaatgttcctgaggaaatggaggtcagaaccagagaaaaagatgctggacattgaaacctcatccatctcctggaagctgagtttgtactccagagggcaatcgatgaaagcagggaggaagttgagggagattggcctggcatctagatgcactcattccaaagcactgagatagaaggaaggactagaaaggagagcaagcgcagggaggaacacagaaggacctaaacgtgctacctagtttctcttagtttagtttacatggaattttagtttagtatagtttatagtttttttaataatcaaaattcatactgtgcccttaaatctgtacaattcctatgtataggggaactcttatgagtcagtgctagagcgactgcctggcacatactgggccctaggtttgacccacagcattgtcagaaatagcaacaataatcagtagataaacattttaaaatacagttccaggaagatagaacaaccatgaaataaaaagacagtgtgctacttgtttaggttctaggaaattggaactgaatagttcagaagttctttttggtaagtcattgtcagcagacaaaatttcagctgattcttcttcaaacttgcagaagtggattataaatgaaacatcgctaagtgactacagctatcctcaggatctcacacttcctcgagatgaacaacagaagacatgcagtgtattcctctgcagttgtttagaattgtctcctacatcacccatagctgagcctaactctctcagatcctatgcacctctgacaggattgataccaatgctggtccaatcagccaagcaaggcttgcaatcagactatgtgactctgcatcaaatcactcaaggaaaccagtctgcgacaccacatgtgttatcacccaggcagtctgcaaactagattccaaactacacaagcaatttggtctgccttctgaagaaaattagtagtgaggctactcagaagaatatatttcaggtcatgcagattattagagagagagagagaagagagatgagggttaaagatacccctgttttatatctgtaacatctgacataattttagaaatccagatttttcttcttcagaggtatttcctataatgtagtgatttcaagacttctttgagctgacttttagtcaaggatgatgactgacttgctcctgccaacttttcatgatgagctcacaatatagaaacagggatctgcatgacacaagaaccaagcctttagaactagaatgtttgtatccttggtctctcacccaggagcccagcacaccttccttaagtctgagactcatctaagagcaagcataatacataatacatactaagaagccacattatctgagcaattcccaaataatagaactattcattttagacatcatcatttagtacttatttgttttatcatttttgatctgggcaaataagtcactaactctgtccagacttcagctggtctgggaatgcgtaagtgacaccgtctatacatctttccagttctaagaagcccatgaaggaaatcacatctgccaccaatattaaaaaataaaaaaagagcacaagttatgaattctgctgagtagcagtcctacttctgcatttcacaactttcttcaagaacacggagcagtgaatccctttcatctgtcctagtctccaaaacacgttgtccaagatgggggctggataaaaatcccagcttggggaagacaaagagtggtgggtttttgaaataacaaaaagagctcaaattattagtataagacttttatgttcatctctgcataagatattgaagttatttttagtgaatttctcaaacactccatgttggtcaggatgatgtagctagagagaagggacaaatttgagggagggaaggagcctggcttggattcttagcctccaccacctactgtgtgacccaggaactcttttttctgctttggggaggtgcagcatgtgagtattgcagaagtcttagatcacagtaaggacttccttccaaacatctctccaccacagctcatacattgtaatcttggttgacaggggtgaccgaactaaatgaccacagaacacacataaaataacaatttgctgagttgaatttgacccagcttggttcaggtgtcagctgagctccagagcaaactatagctattcgttctttaagaagaaactaaataaggacctgcaggcccttttatcctgtacctagaacagggctgattgtattgaaaagagcactgcccaacgtgtttgggtggggactcctgggtaaaatagtctcactttcaaatgtggttgaaatagctagtattctgatggcctgatatccctccacacttgaagattcacagtgtaaaacagctggttaatggcagctaaatctgtactacattcacacatgcatattttctgtatcaaatcctctttcctaggggaatttaaccatagagcctttgaacacaaattgaggaatgctgtcgtttaaagagacaggagaaggtagcagcaagcatgatcagatctgtgaagttagagctcagagagagaaaggcatgttggcagtattaagaaagaatgggaagccagtctgtggtacagaacgaggttttgcattggagcagccatggtggagtggacgaacataggagactactaggagagaggagcatacataggaagacacagggaaagctcagatagatctagatccagagttttccacttctacaactggccagatgatgtcctagccatggggctaaagaacagaagacctggatggtttaagagcccctgtccctagttagacgtgtagaaggtatggagcgaagggccaattacagtgtaacaaacagcatcagaaacatccattcgcctttctctctttcactcagcacttattttagccaaagtgtaatcattggctccctggggacactaagcactgtgtgtctctgaatgaagggggaggggaaaacaacacaatgccaggcatgtaaaaaaaaaaaatagctttagcattgccagatcattcctgcaaacagacaaacatgtacctaaatgtagatcataatagtgttttaacacaagttcttaggaaaacaactgaagcattttttgttggtggtgatgtttaagagcttactaaacaaataacaacaacaacaccaaaaaacccaaaccctagagaaagagtctaatacagtgacacacatacgtagttccaattatgcaggaggctaaggaagggggttcacttgagtggagggggtcgaaataagcatactgaaacacacccatgcacaccccacacacatgcacgcagcagcagcagtaccaccaccaccaccaccaccaccacaattcttcctccaaaaataaattaattaaataaacaaacaaacaaataagagtggtatacatttggcatcaactgttgaccttagaatattttccttgcatttgaaaacaaaacaaaacaacgcagaccaggcagggaaaaaaagaatggcattgcacactcgctggtttacaatggcttgttgcttcccacactccagcactcatgtgaatcacccagggaaatggcaggcatagattcgagttcagcaggtccaggcaaggctccagttctgtatccacagaagtcctgggtactgctggtgctgtgcgaggtatcagacatcagatgatcctgccttcacaggtctgaagagcactgaatccaaatgagagctgttcaaggaataagctgaatcaagagacaatttagctaagcctcagttcccatacctgtgcttctttaggggtggttaatatacgtattctctgagaagattatggccacgtacggtacggtaaaaacacaatttacaaacaaacaatattctgcatggttattaaaagtgtaatttaaaaacgctttttgacataacaaaattttattttaataatcttttaaaacaggaagtacttttttgtttttgcttttggagacagggtttatctgtgtagccttggctgtcctggaattttctctgtagaccaggctagccttaaaagtacctttaaacactaattgctgctcatattagtatcattgaagttctcattccaagacatacaaatcgagagcactaagttgaaggtttaagaaaatgcaccctgtggaatcacaacaatcaaggccaatcaatgattaggcctgaggcaaatcaaaagcacagcacaaatgctggatttaaccagttgagtctccccagcagctgcctgctccagttctgagcacagagcacgtaaattcacatactcagcagcttcatgaggagccgccaggactgcagcagaagactgtgactgactgtgcgccacgtctacaataaaggagggggtgggcaggtgggggagcactcttatagaagcagggggaggagggagggaataggggatttgtggaggggagacttttgaaatgtgaataaataaataaccaataaaaataaaaagggtagccaggcagtggtggcacgtgcctttagttccagcacttgggaagcagaggcaggtggatttccgagttcaaggctagcctggcctacagagaaaccctgtctaataaataaataaataaataaataaataaataaacaaaacaaaacaaaacaaaaagggttttttctttccctcctctttgtatgaagtagtttgtatcctgaaattagagatgcataagtgacttcaattaaatagcacctagagataagaggatgtgttgaaatgcagtgagtttgagagcagccatcactcgggcatactatgtattgcacaggtccacccggaatgcaggaggggaaatgtcctttaacaataatgtagttattgacgtcagcgggtctgaagtgaaacaattcagggctttcacttcatccttttgcagacaactgtgcattgagagctagctttatgtcagacatcactctagaagttgaatgggggccaaagtttaagagtcagttaccagacttctacatgacccacatcaacatgcatgagcgtgacggcaaagcagtgtgactgtgacctctgaggagggactgggatggctgggaaaaggacatcgtgtcagggaactgcacaggactccaaccttgagagggagcttattaatctgaattcattgggccaagtgaggaggtcatttctggcagcatccacagtaacaagtgtgggtttggttttgtatctaaaaaaaattaataatagacaaatggacggcaatatgcattcactgtggtgggaccaggtgatgtcacaggaatatttaagcaatcatatgagaatgctgaacagtgttcaggagaaatagacatgtgatgcatgtatgtatttatactcactaaaatataattattaataatctgagaaaattagcaatatttccattcataatatgataccagatgttgatatcagcacagaggtatctgcagcagggtgcatataaatcggagagatactggagaggtctagagtcacactgtgtagttgtctactcttccacccaagagttaatgtttagcaataaaggagaagatctttcactgggaactttcagattatggaaatatctactaaaacttgactacatctatacactcaagatttggactgtgtagtttcgggctgtaggaacgggtctgatcccgtctgatgcttttccatgtggatacagtgatctaatcactggtttgggatgaacgatccatttcttgctcctgggtccttatttgtaggtccatgttgctgtgcgaggcattgccagctcaagtcatcctttctgtaaattgacttcccaaagttctgcaggaccctcaagtgctgatgacggctttgctgcgacttctctttaacagctgtgtttcctttgggaaagagtggtttactgtctgctgtggcaagcagaagtcacttctcgtactgagaactgaaacctgagtcaccatgtgccatttcctgggcacttcctattaaatattaaagttcctttttgttccccacaaaagctagatttagaagcacaggttcatagactgatatcaagacagaagctcatcaactgggcgctcttggattaaactggatttcagtgtaccagctagcttttccttgttttgtgaatgtgaaaattctggaaccaaccacacaggaaggctgcgaagcacaaatgcattattacatacaaatatccttacagaggtgattggcacctatcattaatttagtgtccagcagctattaccagtaatgtctgtaaatcttaatgtttctaaagtcatgcaaatgtcataggcattttactccccaaataattgttttcccactcaaatagattcaagtattgcatctgtactgttataacatgaccgtgtattagggatgtctatgctctcttacaagaatggcagtatgaagtataagagactagtagactaatatttaattagaactaatttttttgcagagaaaagaaactccctgagaaccaaggaaccatagaattctttcagtgtcttaagcaattgacaaacatgaaaattcactaagtgaaaacagaaaaaatagcataaaatcaggcatttttatagaaaaaaatgtttcctttctgtatttatttaataataattcactgaacatgttcaacttaccaagtgcagaattggatgatatctggcatgcatagatagatagctcatatatgtgcacatgtgtgtttgtgtatatacatggaaggggtactcacttgaattctactactcaaaagacagaagggagttggaggccagcctggactacatagctagaccctgcttttgttgttattatcttgcaaacttctaaacttatgaaatgtatctgttatcactaaggaatttctgagtgtgtaaacaaaagagaatgaacattttataaagcattatggttttctcagttcatcataacataaaaacaaaatgttgcctatgaaaaagtaaaggataaaacaagccgagaaggtggagagtcaggaagaaatgagagcaagtacgtttaaattgtagagtgcagggcatgacacccataccaggaaatatttacaaacagtaaatgctacctactaaaatgggtttcttcaaaaatcttcccaatcaaacctagtctcactgcccagctaattaagaggctaaagcaaaatggtcacaatgatcacaagtccaaagacatcctgaaccagagaatgagttcaaggcaaaccaggacaacttatgaacactacactacagggctagtaatttcatgagaaagtggggaaagtatttgtctagcttgtgtgaggaccaagattcagtacccaaaatagaggaaacacagacacacagacacacacagacacacacagacacagacacacacctttcctaagaaccttcaacaaatgtggttaggtttagttagatggagttctgtcttagttcagtagatcagtggtccccttagagactgagtaagactagagtacttggttagaatactttttggtctttgatgctataattattagaggaatttcttgcactacgtaaattccataggtatgaactgaaaatagatagaggactccaagctacaacgttaccattctcttattatcttgctagtgaggttatgagcagcacagtcttgatgaagttactctaaaaaactgtattatgtgagatcttaattagttttgtgcttacgttgagtaaacactatacatgtgcagtaagaaatgtttctcaggatttgagcatgtgtgagactgtgggttatacaatccccaacactgaaaaaaatcataaacactctcagtatgaatattgagatatttaacttttctagatttcagaaacacttactgaaaattgaaaccaatccacaatacattttgatataaaatgggggctgattttaagacaaagtctcactatgtagcccaggctgaccttcactctcccccttctgcctctagagtactgagatttcaagtcaccatcgtggctgccaaagacattccatatattttaaaaacatgtgatactgtctcagtaaggttatcattaaagaagaatgttggcacaggaaataaaaaacacaaccataagactggaatcaacaggtatttatctaaaaatattacaatgcctctgtagagaacaatgtaacatccccacccccaacacacacacacacacacacacacacacacacacacacccatgactcagccttgcttttaaagtggggaatccataaacaaagtttcccagttgctgagttcatgaagagcttaacttttatttctggttacaatgtgtacatattggaaatttgttaaaagagtaagttatgtatctttcatactgcaatcaagaaaaaaatatgtccattggttgggtgcaaatatctgcatcggactctttcagctgcttgttgggtcttttggagggcagtcatgataggcccccttttgtgaacattccatagcctcagtaatagtgtcagatcttggaccatccccttgagcaggatcccactttgggcctgtcgctgaacctccttttcctcaggctcttctccatttttgtccctgcagttctttcagacaggaacaattatgggtcagagtcctcacttgatgccctgtttttctgctggaggtgggctctataagttccctttccccactgtcgggcatttcatctaaggtccctccctttgagtcctgagagtctctcacctcccaggtctctggtgcattctagagggtctcctcacctcctacctcccgagcttgcatgttttcattctttctgctggccctcagggtttcagtcctgttcccccacccaatacctgatcatgttcccctcttcccctccctgtccccttttccacccagagctctccctttctcccctctcctatgattgctttctcctccctcccaaggtgggactgaggcatcctcaattgggcctttcggcttgttaaccattttgaattttctggactgtatcctgggtatcctgtacatttttttttttttggctaatacctacttattagtgagtatattccatacctgtccttttgtgtctgagttacctcactctggatgatattttctagttccatctatttgcttgcaaaactcaggatgtccttgttcttactaggtgagtagtactccattgtgtaaaagaaccatattttctgtatccattcttctgttgttgggacatctgggttctttccagcttctggctatcacaaacaaggccgctatgaaaatagtctatgaaaatagtgggacatgggcagatatttacacccaaccaatggacagaagatggtgacccctgttgttgaattagggaaaagctggaagaagctgaggaggagggcgaccctggaagaccagcagtctcaattaacctagacccccaagatctcacagacactgggccaccaaccaggcagtataccccagctgatatgaggcccccaactcacatgcagtagaggactgccaagtctgggttcggtcagagaaaatgcacctaaccctcaagagactggaggtcccacggagtggggaggtctggtggggtgggggtagggagggacatccttgtggagacagggggtggggaggagacatgtgaggtggaacagtcagagggtagacagggaaggggataaaatctggagtattaaaaaaatattaaataatttttttgtttttgtttttgtttttttcaagacagggtttctctttgtagccttggctgtcctggaactcagggggaaaaaaaagaaaaatatttcctccttatactcctttaataatttattgggcattcaagattgccaggtgttgtactggacaagatctggcatgcatagataggctcttatatatgtgtacacttacacaaaacacacacacacacacacacacacatttgcacactggaatcctagtactcagaagaatgagacaggagtattttgaattgaaggacatcctgggctacacatcaagagcttgtatcaacagttaatagaacaaagtaaactaaggcaaacaacaaatcacaggatgctactgctgcaatgaaggctgaatggtggcatgagacatgcctggccagggctgctgccttaggtagggtgtgatgggtccatgtccagccagattctgttcagattaacatccctgcatgagaagcagtgctcgtaagagtgcaaagcctaagagagtcgcttgagctgctgatataaatgtaggaatcactattatgtaaatggatatttaaacaatgggtttaactttgcttacaagaatgaagctggaaatgattcttgacaagctgtcagtggttgttctaaacacgcggtctcgaaagggtgacagtcattagcaagaaccacattttttcaaaagtaaactttttaaacatcaagtcaaatgcatatgtgtgtttcaaaaagctagtctgaagccgtaggctaaccctacataattaatctgattaatgtagacaggatttcaaataatttagaaagcaagacagattgcctggatggtctttgccattttatatggcctaagtgaaatttagtactaactagaagctcttctcttaagagccatgttgtcccaaggaatgagtcacagttggtatgtggtctgaaatgaatgtaaagacaccaactgactcggaattactttttccagactgacttccattccctctctacctaccagagcgaagaatgaaaattactctgaggagaatttcccagacatttggtgtggatcatccactgattacaatataagttgtttatgtttggttggccaaacttaataagtttgtttttctatactgtagaatttgacttctaggttttagctccctgatgctcttctctcctgtggaccacctgcttcctctggaaactccttccaacatcataaccaccaaatgtgtctgtacagccaatcccaatgaagcatcttgtccttttttgtagaaattctaagctatatttgtgtttgtttgtttgtttgtttgtttgtttttgtttggtgtgttttgtgttgttttgttttgttttgtagtgatggcagttgagcccaaggccttaccccacgctcagtaaacactctatcattgatctatgtcccggccttccaagggttttcagatttgttcgaattataccctccatggctctcgttctccaaaggagtcttccatgctgccctgcttggaagcactgacctctgacagctctacaaaaccattagctgttgaatgtgagtgaacgtaggctatcagacagtccagcatggttcaaaatgggttttcataccatatttttagatattcggagaatagagaatttgctccattactagagactaaggcttacaaaggggcatttataaagaacagttcattataaatcaaaatttgtcaaagtgttgaagagatggagacggtatgagtcgatgtgtgcctaacagctgccttctctggttagaaggagacctgccaggagcgggtggtaatgttgaaagcagaggggggtccttttcacttattcctttctgattccagtaagagaaaatatagagagcttagtgatgagatgagcaagagaaatgttattttcccaaaagatcatgaggccaactctatttttgaaaaggaagtatcaattttgaaaacaggggggaaaaaaaggaagaagccattgagaaaattcaaaacaagctccaactacaaacaaggatgcatttatgacagccgtagaaggtagctggattcaattcaggagagaatatatttttgaaaacattctagttaattatacaaagggaaattaagcgtagggtaatttttttatataaaaagacacattttaatagtttgtctgcaacagagttgctttgaaagatacaaagtacctttgtagaaaaaaatagcttataagcttgctttgagtgataaaaccaattcttatgccccaaaacagtgtagaaaatgactactttcttaataacttttaggtaagttgttcctcacaataagctgacagttactgagtgtttagaataggaaagaagaaaaaaaaatgggaaggaagtggagagggaagaaatgaatcaggctgagaagcagagccttgatctcaggattccaggagggatccattgataggaaggcatcggtgcaggtatctttatatctggtattggtaactacagagacgtgtgtatatttttatagcttacgcaaatgagtgtctatcattataataggatagcccagcagtggttactaaacagaggggtccagtcttgacttagagttctctgcaatgctttaactctgctctgctcctctacccacaggggaatcaataatccaaccgtgtcaatgttttcagaaaatactgaagtgactggctttatccaagcttagaatagccagcaacagaaacacagaacagcagaggaagtgtggtccccgtgctgcccccaactccatccctgagtttactagagaaaaggaaaaaaatgtgtcttgaagaatggagtcaagttcgtctaaaccgtagagagactctactcccacagtcatttgagttacataagccttcattaatagtggctattttaccagggcatcaaagagcataggtgtggtcctaactcctcgagaagcagaggcaggaagatctgcagtttgaaaccaccttgggctacatagccagaccttaacccacgaaaccaataaatcattaatatcactgggagaattagtaaggcatcggtgcagttatctttatatctggtattggtaactacagagacgtgggtatatttttatagcttacgcaaatgagtgtctatcattatccttgctgaaatctctattgtttattaaagagttgtgatctctctaaggtaaaaaaagaattaagcctcagctgggttgtgaactaagtgcactgggtccagcagtaggcatctaagcagtgttcttggcacactcttctagcctttctgtgtaagtagagataattagtggctcccaactctatatgtttcaggaatgttcatgaattgtattcaaaatgtggatcttctgtctaatcagaagttatcaatattctctaaatacatttatataaagtttcaagggcttcgactctcttctatactaagaattccagtagtattacatcgtcttgaaaataaaaggccatgtttatggaaatgtggctcccaggcattcccacatttaaaccaaattatgctgttctgaagagtgagctcccggaatcctacacctaatgtgttccagtgtcacaagctggttttctttaaaaggaaaaattgccgttttcatgtaaatactctgtggttatgaaagcagtgtacgttgaacttggcaactacttttggactgtgtcttcatccttggtaggaacagaatggtggatatactctccccaggttcaaagacactcacatcctccctgtgcagctccatgctactcaagagttctgaaatatatgacttagccctgctctgtgtccaaccatattcttcaatatgaaagttcaatgttaactttgaaagatgtttccaatgctaacatgttatagcctgtaatacagaatgcaatagggaagtcagcacagtgatgtactctaaacaaagaaggaagtggagggagaaatccaaaatcctgagcaacacagtgagagtttatattttaaaaaatatgttggcatgttattagaacaggtaaatatttcttcttctaataacaaatttccattacactgactgactcggtaatccctatttttttaagtatatgtagagtaatataaatttagttactcaaatgaagcaagaggatacatagatctattcctgattttttttttaaatcacatcgcactatcgttacttgaatatattgtagatgagcaattaattaccaggataattctctatctatccaaatgtgcttctttcttgtacagcagagctagttcagattgttagttcaaggatcatggaaagccacaggagtgtgttgctggattcactagaagctgaagtgtcagaaccggaaaacatgtccactttagtcttttgaaatatgaagtggaatctgaagttattatcatttttaattttttctatggattttttttcccatagaatagaattctggtcgtggtttccccctccccaactctttccaggtcttccccagctctccacccatccagtgccacgccctttcattctctctttggaaaacaaataaacagaccggaaaaaaaaccagaaataatagtaatagtaacaataataatgatacacaatcaacacacaccataaaaacacaaaactggaaatcacactataaaaaacaaagaccactaagaaacaaaaatacccaaacaaagcaataagagacaaaagtctacaaaaataccattgagtttgctttatgttggccttcaactgcctggcattgggcttactcttaagtgtggttaacagacccaatgggattccactagagaaaactaatttttcctttgcaagctgatgtcaattggaaatagcttcttggttacagagcactgcatacccttgtcttagttagggttttactgctgtgaacagacaccatgaccaagacaggtcttataaaggacaactttcaattgggctggtttacaagttcagaggttcagtccatcatcctcaaggtggtatcagggccacatccaggcaggcatggtgcaggaggacctgagagttctatatcttcatctaaaggctgttaacaaaatactggctcccaggcagctaggatgagggtcttaaagcccacacccacagtgacacacctacttcaacaaagccacaccttctaatagtgccactccctgggccaagcatatacaaaccatcacaacccttctacccctctcggcactgggaccccatatgacttgaatctgtggagggcctgactatgctaccacagtctctgtgagtttgtttctacattaatcctgttgcatgtacatttggacatctatcctctctggctctaacaatctttccacatcctgttctgcagagctccctggaccataagggtaggggcttgatgaggatatctcagttagggctgagtgcttcaacatctctcactctatacattgtctagttgtagacccctgtgttaattctcacctactgcaaatgaaagcttcaatgatgactgctgagcaagaccctgatctacataggtataacagaacatgttaggagtcattttactgctctgttctttatgcatagcaatagtactgagttttctcctaggcccatagcctatctggtctcaggtttcaggttctcagccaacagagcagtgtcaggcatgggtcctaagttagtattcttaatattgtaattttttaacagataacagaacactgtcttgctgtatcgtcaggcttgtttgaagcctgttaatctgatgtttcagtgggaattcttgggtaaatgtcttcatgagtatgtttgaatacatgcatataccttcaatttgtgaccacattaacaagatgtatgatgtctattaataagtcacaggtgattagcccaaaggtcttaggaaatacacaaattacatccaagaacgaatcattatttttccgcagtagaatgccctttgaagtcctgattataacaatgaaggaatgctagaacacacttgatgagtgtagcttctgctgttactagaagacaatctcacagcattctccccagtgctcacagcattctccccagtgctcacagcattctccccaatgctcacatcattctcccccatgctcacaggattctcccccatgctcacagcattctccccagtgatcacagcattctcccccatgctcacagcattctcccccatgctcacagcattctccccagtgctcacagcatcctccccagtgctcacagcattctccccagtgctcacagcattctccccattgctcacagcattcccccccatgctcacagcattctcccccatgctcacagcattctccccagtgctcacagcatcctccccagtgctcacagcattctccccagtgctcacagcattctccccattgctcacagcattccccccccccatgctcacagcattctcccccatgctcacagcattctccccagtgctcacagcattctcccccatgctcacagcattctcccccatgctcacagcattctccccagtgctcacagcattctccccaatgctcacagcattctcccccatgctcacagcattctccccagtgctcacagcattctcccccatgctcacaccattctcccccatactcacagcattctcccccatgctcacagcattctccccagtgctcacagcattctccccagtgctcacaacattctccccagtgctcacaacattctccccagtgctcacagcattctccccagtgctcacagcattctcccccatgctcacagcattctcccccatgctctggcccttacaggttccctttccccttctagggtgtttcctaagccatgggtgcagggatgttctatagatgtatccatgattgcaattgcaaaaatataagagatgatatttaaaaatatagaataaaataattttatgagctttaacaaagagagagagagggagagagagggggggaagagagagagagagagagagagagagagagagagagagagagagagaggagagagagagagagagagaaataaagagaccaaccaggagaaaacatggatgttctactgatatccagaagaacagaaaaaaaaaataagtttgaaataccaagaagaactaagtttgaaaatatagggaaaggttaccaagtttttcaaactttgaagtatgataaaataaatttcacaggtgagcagccagggtaagaggcgcaaagtctttccctcagaccctggatgctagcccccagtgctaagaggatgaaatgagtgacttcctgttaggaagccatattataggccctccagtaatgcacagtgtgccctacagagcacagtgatgacctgaactgaatgtctagttgttgtgcaactcatgaaaactgagagggttgaataataaaatttctttactggttaaatgttcttcaacttcagaaaaatttagaattaggtatcaaaatgtgtaggaaaatccaaacaatcttatgagcagttctagtgatacatcatgtttagtaactgtgttcatattgtttaaaagtttctggcttatttattaagatgaaagacgaacttgctgattccaattttaaatgaataatggaagtctaacataattgtggttttaacttataaacagtttttttttaacgttggaccagagaagaggtttaaacgtcactattatttatattcatgcacttttgaaaagactttttaatgatttgttgtgggggtagcgcattcattctctgtagccgaatttgttcaaggacttgggtttgaacctcaaaaacaagcaagcaaaaaaaaaaaaagtttaatattaagatttgaggagaggtttgtttgagttttggttctatgtttattattttcaagtaggatcttactatgtagtccaggctagcctcacagagatgttccttagttttctgagtgccaggattaaagatacacatcaccaccccaagctgagggagttttaagttaaacaactagcacactttttaaaaagttcagggctggagcgctacctcagccgttaagggcttgtattgctcttgcagaggaccccaggttgaccaccggcacccacactcagtgactcacaacgacctgtaattctagttcccagagagatctggtaccaccaggactcatgggtatacacccccacacaggcacaccaggactcatgggtacacacccacacacaggcacacggacatacaaacattcaaaatgataaaaataaagtctttagtaaggtaaatattgaaaagtcagtgtcaaaacatggagcgatttagttaactaaacatttagttaacacaaatgtaattgtacatattcaaatgtcccataacagtagttaattaaactacggggggagggggggatgagatggttcagtggttaatgacttttgctgccaagcctgatgaacagggttccgcccccaagacccacatgacagaaggataaggctgactaccacaacctcttccctgaccttcagctttaccccaatacttgaggcatagcaagcatttagatgagagagagggggagagagagagagagagagagagagagagagagagagagagagagaagaagaagaagaagaagaagaagaagaagaagaagaagaagaagaagaagaagaagaagaagaagaaaagagggtgagaaagaggaataaataaataaaagtaaatataatttaaaaaactaaaacaaaaatgacttaggtttacaattagagtgacagccaggggagtgttctcttatctaggaccccattaggattgcagtccctcataaaacagactttttaaattactcaggcttacaaatataatgggatcagtggatgagctttctgtcaaagtgaagaaatacaggagacgtcagcttcaagcagcacctgtgtgttagtgaccgtgtaaacccagggacctgggctgtaaccccagtactagaggagggggcggggaaatggggcgttttagctggacaaggtggttcatgcccataaaagcagcacttggaagctgaaggcaggaaaatagagcgttcaaggttgtcttctgctacaagacagcctgtctcaaaacaaaaccacctcacacatccaaaagagaaagttttatttgggctcctgtctctgaggtctcaactcaagatcacttggcctgctaatctggattctttgtagcataataaggagggcttggtggaggctcatgacttgatgagcaggggagagcgagagagcaagagagcgagaatgagccaggatgccaactttgatgctttaactataggcagtacctccttaatgcccgcctcctctcagtagccaataggccactactggggacagtttgttcgaatcatagcaatgggaatgctaagttttaaattttaaaatcgtaactaggaactttctacaattttctacctttaataaatcacttgttaaactttttagcaaaaataaatgagggaatactattttctgatggaaaagttactttgggggcaaaaaaccttatttaacaaagtgcaaaatcctttgggaacaaagctcctcccccacattcaataaccaccatataaattcaatagcactaagaagtaagtttttgtttttgagacagggacacactgtttatccctggctggcctggaaatcacaaggtaggtcaggttagctttaaagttacagaggtctgactcccgaatgatgagattaaaagactataccaccatcatgcaagaaatacacttatttttattttttaattcacgttacatcctgattgttgacccctcgcacagttccttcccccatatcttcctccccttctcctctgagaaggtagaggtcccattgggtacccctcttccccccaccacacccccaccacacacacacaccctggtatatcaagtctctgcaggactaggcacatcctctctcactgaggcctgacagggtagcccagttaagggaacagaatccacaggcaggcaacagattcagggtaaacaaagagtatatatacaggagatctaggattagcccttgtatgctcttaggttagtggttcagtctctgagagctcccaaggatccaggttcatcttcctgtggagttcctgtccccttcgggggcctaaattcttcctccaactcttttgtaagagtccctgagctctatccaacatttggctgtgggagcatctacatctgtttcagtcaactgctgagtggagtccttcagaggacagttatgctagactcctgtctgcaagcacaacagtgtcagggagtggtgcttgccattggatggctcgctagttgggctggctattggttgggcattctgaaagtctctactctatccccccatccctgcatttcttgtagacaggataaatttggggtcaaaagttttgtggggagattggtgtccctgtcgctccaatgggattcttgcctgactgcagtaggtggcctcttcaggttcagtatcaccactgctgtgagtctcagctaaggtcaaccccattgattcctgggagctgcccaacccccatgctgggtttctggcatgtcctcaagaggcccccactcccacctctgccaggtgcaggtctccattcattctctggcactctctcctgtctctccctatacctgaaaggacactgtcaatgggacaaaatggcagcctaggcattgggaaatgatctttattatcgctacatctgacagagggctaatattcaaaatacaaaaacatctcaagaagttagacccttacaacccaaataacctgattaaaaaatggggttcatagctaaacagaaatctcagcagaggaattgctaatggctgagaagcacttaaagaaatgtccagtgtccttagtcatgagggaagtgcaaatcaaaacaaccctgagattccatcttacacatgtcagaatagctaacattgaaaactcaagtgagaatgtgaggactgaggatatggagcaaggggaacactcctctactaatggtgggagtgcaaactggtacaaccactttggaaaacaatttggcagttccttagaaaactggaaatatttctatctcaagacccagctagctataccatgcctgggcatatacgcaaaagatgccccgctacaccacaagggcacttgctcagctatgttcatagcagctttatttgtaatagccagacactggaaacaacctacacatccctcagccgaagaatggataaagaaactgtggtacatctacacaatcaaatactattaaattattagatacaaagacatcatgaattttgtaggcaagcagatggaacttgagaatatcatcctgagtgaggtaacccagtcccttaaggacacgcatgctacgtgctcacttaaaagtagacattacctttaccatctgagccatctccttggcacttagttcttatttcataaaatccatttttcaatatctaattacagaaattatattggaatgagttagtcagagcagctacatttccatcacatttctgtgttcaaaagaatgtgtttcaaaaaaaagtggatattaaccataaattacaggatacccacaccacactccactgacccaaagaagctaaacaagaaggaaggcacaaatgaggatgcttggatcgcatttagaagggggaataaaatagtcataggaggcagatagagggaggatagtatgtaggagaggggatggggatagggatgggagggaaggttcaggatcaagaaacgcattcagaatgaagaggaggccatgatggggagatggctcagtaaagtgtctgacatgtgagtctaatccccaatacctatgtaaaagcctgtgaccctgatgctgctggaaacacagggacaacggaatacctggagctcactggccccggggccagtcaatcagtgaggtcagggttcaggcagggactgtctaaaaagaaaagggtggaaaatgataaaggcagattgctgaccattatacacacacacacacacacatacacacacacacacactgggggtgaggagagacacagagagagagagacaaagttgatccatcccataatcagccttcaaacgctgacaccattgcatacactagcaagattttgctgaaaggaccctgatatagctgtctcatgtgagactatgccggggcctagcaaacacagaagtggatgctcacagtcagctattggatggatcacagggcccccaatggaggagctagagaaagtacccaaggagctaaaggggtctgcaaccctataggtggaacaacattatgaactaaccagtaccccagagctcttgactctagatgcatatgtatcaaaagatggcctagtcggccatcactggtaagagaggcccattggacaggcaaactttatatgccccagtacaggggaacgccagggccaaaaagtgggagtggttgggtaggggagtggggggggggagggtatgggggacttttgggatagcattggaaatgtaaatgaggaaaatacctaataaaaaaataatgacaagccattaaaaacctggctactatgtacaaaaatgaaacataagcaaaaagagataagaacctatacatgccatctctaagtttaagaaataccagtgtgctaccaagatctagggcatggcttagtcgtgtaacacctgcctagtatgtgcaaagctcgggggttccctccctaccactcaggggcagtgaaatcctgctagctctagcctgtcctcctttgtaaatccaactgtcagctgcatcaggggctgagctgaggagacggctcagtcagcaactcgcttgtcttgaaagcatgatgaccttggtcctatcctcaacattcaatgtaaaaagccaggcatgggtacacatgagcacacctcccagcaatgtggaggtgaatacaagcagacccctgtctctagggtcaccctagagctcaacggcctggcaatctagccttgtatggcaagctgcgagccagtgcaagagtgtgtgttgaccaaaggatggccatcatctgagaaatgacacctgaggtcgttctctggtatgcacacaagtgtacgcacacacacacacacacacacacacacacacacacacacacgcacgcacacacacaagaacataagctaaaattaccttggtgggagacaacttgccaagaactatcatgttttaaatcgtatatatccttggtcttggtacccctattgcagaacctattatatacacatattggtatgtgctcacgaaagctgtcacccatattggccaccgcagagatgtttgcactatcaaaaatggaataaattaaaaaagaaaacgctaaagctcatgtggggaaagaaaggcttattattagtcactgaaaataacaaaatacttctatggatcaagacgaaaggcttaagctacgttaattaaaacttaaataacaaagccaagtgaagagcattttgggatatgcgtccagtgtatactggaaaggtgaccggggacttcagtctgatctccagcatccatggactgctgtcaagggtcgtggcacacacttgtaatcccagcacttaggaaaggatccctgagtttcctggccagccactctggcataattggtatgctctggcccatgagagatttcagccatccttccagcccagagagaccctgtcataaagacagttgactatttctggggatgaacaaggttgttttctagcctccgcacacatgtgcgcacaggttcatacacccttacattcctaaccctctggacatgcgtattaaaaggaactggagcgtctgcattctcactgatgctggtttgtgaaactgtttgtcaccagaaaatacaattatgcaatttagctcccacttttctaagaaaaatattccatgtaaccataaactctgcaacctttctttaaaggcgcaagtcttatttccagaatatcttttaaaaaaattctcctgagaatagtttttcaaaaaaaaattattctatgtataaataaaaatggaaagccttgaaaataacaagggatactttgtgagaatgctgtccaaggactctggtaagaatttacatttcttatgctgcctcaatagaggtatgggttctgtgtgtcaaaaggactccataaaatcatgacaatttgtttaactcacagtaacactgcaagattttgctacacagtttgaaagacattaataatgtatgtcattctgtcattccttcatgaaacacacccttcactaaaccaataggttagttaacagctacagtgcccatctgtgtgcatgcaacactccatttgtagattcctgatgtatgcatgaagcatcaattcatacaatgctctccagaaccggtcaaaacaacaacccaactgtctggaaattctctggcgtgctattctgatggaaagggcagctgtgaatcacctggacttagcatcatccagagtcaaaatatcaaacagtatgtgttaaagataaagtcataattaaaccgaccgatgtgggtatcagcagcatttcttatgcaattgtataaccgggcggcttagaaatgaggaaggtccagatgtatcccgtttcttgctgtcctgttataaatgagagccttcctatttttctctccctggtttaaagcaaacttctctgataataaaagcttataaagctgggcgtggtggcgcatgcctttaatcccagcacttgggaggcagaggcaggccaatttctgagtttgaggccagcctggtctacagagtgagttccaggacagccaggactatacagagaaactgtctcggaaaaccaaaaaccaaaaataaaaataaaaataaataaaagcttataaaaaaaattcacggtgaaggataaaaaaggctcatcactacagtgagagctccaccagtacggtagtagtagagacagaacacacattggatttaaaatagcccgttagaaaaatgcctgcaagttcagaggtaacgtttatgcctagcacgtgcaaagccctgggcttgatcctcaacaccacaaaaggaattttaaaaagctcgcattaacaatttgtttatatattaacaacacatctctggtcaaagcaacaagagatttctttcctgggtacttagatgggcttctcttaggaggaaactcctggttcagttcctgggactgagcagtttaatctcaaagatcagtttactctgcattagaagggattatcgctcagacattaatagaatccatatttttcaggttgcttgtttacgctccagtttttatgatttttttttagtagagtctctcgtggctgtccacttagaacttaataagcccagagaaaattctagattaagaaaattaaaattcataatcctcagcataaaaaaacaacaaattaaagtttgagctcttaataaaagaggtctgagcagagaaacacgtgcagtcagaatatcagttaaattctgtttagggcctgagctttctgctcatggctgtgtctcctgtagaagctatgaacagatgcgcttttctctgcagctactcactctgggttttctcatgaattgtcaaaaggagtacttttaaatacagttgagcatgtaaggttgctacaacctgctctctctaatagccaccagaagtttcttttcctttaaactgagcattctgtagttcaaaaccaaaaacaaacaaacaaaaaaagcaaataaataaaatgtgagtattgacccttacgtgactgtaccagccttggctggtttgcaactaggtttttgcaaaatcagggcttttacccaacaatgactagtttgggttttggttttggcattgtggcctataagaacatctagggcttctagtttctaagttttcttaactgactggggacacatcctgaaacaagagtcctggatttctcttctcagtatttttcctccttctagcatggtggtttctgaaggtttgttaagatgtgtcatgttaatacaactaaacactgggtccaagtagcttttgcatttcaactttatcataaactgggtcagtctggtaaaacaagggggcttaggcatctgcaacctgccttgctcatttagaaaagagagtaggaattgtctacactgttctcatccttccttcaggaatgccccccctttatctcctagccaaaggaaaagttgaaagcacccatcactcttagggtttttgccctccacacttagtacaattctcaccccgaactccagttccattctgttcccttcagatagtatagatgttatatctgtttagttaacatgggccatggtccaccgagtctaagactctcttagttctgaaagacatcactatttttatgtaccactaaggaccaaaagataccaaagaaaaatctatgcagagggcatagaggaccacaaccatatctcaggccttgggaacctgagacacaaagatggtaagcttgaagccagtctgggctagctatgtagtgagatcttatctcaaataaaaattctatggctgtcatcaaaggtatgatatattctaatgtaaaatgcaaatgtaatcctcttacctcttctattgggagcatcttcctggctgtggctttctgtacctgagaagaatggtgttagaaggaaagtgatgtcgaactatacaaatcatttctgtgatgcgcatagctctaggaattcttctggaatgggtttgatgtattccctctaccctttgggtacttcatacttttgaacctctaatcactttctccattgatttagttataaataaagttcttgtctctggtagtaatgacaggaaagtcagaataatgatagggattgctattccattttaggtgagtactgggactttggaagaaccgggctatctgaattccctcctcagggaatggaatctacccactggtctgtccagctctatcactctagctgtgtctgtgtttctgcttagtgtcctgcttctactgggttccctacttgtatgtgagatctttattcctttgccttaataaagtggtggctataccatcatccatatcccaccattcagtgctgcactcaggtagtttacctgccaaagcccctatcctgtactggtgccttcaaggttaacattcctttattcacatcataagtttagtgagggcttctctcatttgaagaaggggcccagggcaggccatggctgctccattctctaaatgagcaaggcagtctgcagaccactgaggatcctcattctaacagactgactcagttgatgataaagttcaaaggcaaaacataaagggcttggggcttgagtaaaacaagcatataagttcaattttccttctttcactaagtactgtatttgcaatttaatatttgcagtgttttagctcaaagaattctcttatcacatacatgaattgaacatattttcatttatttatttatttatttatttatttatttatttatttatttattttaaactccatattttattcccctcgcccctgtccaccctcctactgctccacatcctatacctcctacccaccccctgtctccatgtggttgttcccagcccccatgccacctgacctctaaattccctggggcctccagtcccttgagggttaagtgcatcgtctctgaataaacacagacccggtcagctacttctgtgcgttggttgggtgcaaatatctacatctgactctctaggctgcttgttgggtcttctggaggggggtcatgctaggtccctttttgtgagtgttccatagcctcagtaatagtgtcaggccttgactttgacctgggtcccactttgggcctgtcactggaccttcttttcctcaggctcctctccatttctatccctgtaagtctttcagacaggatcaattatgggtcagaggtgtgactgtgaggtgcccctcccccacccctacctcacttgatgtccttcttcctgctggaggtgggctctataagttccctttccttacggtcaggggcgtttcattttatttgttatttttaatcttttttgtagaacattattgtaatatttcaactgttaatatttaacagacagaacaattattttaagatatgtctccctttttgtttctgattttattaatttggatactgtctctgtgccctctggttagtctggctaaaggtttatctatcttgttgattttctcaaagaaccagctcctggtcttgttgattctttgtgtagttctttttgtttctgtttggttgacttcagccctgagtttgactatttcctgccgtctactcctcttgggtgtatttgcttctttctgttctagagctctcaggtgtgctgtcaagctgctagtgtgtgctctctccggtttctctttggaggcactcagctatgagttttcctcttaccactgcttccattctgtcctcattttcattaaattctaaaaagcctttaatttctttcattatttcttccttgaccaagttatcattgagtagagcattgtttaccttccatgtatatgtatgtgtactttctgttgtttttgttggtatttaagaccagccatagtccatgatgatctgatatggcgcacgatattatttcaatcttcttgtatttgttgaggcttgttttgtggccaattatctggtcaggcttggagaaggtaccatgaggcgctgagaaggtgtatccttttgctttaggatgaaaagttctataaatatctgttaggtccattttgttcataacttctgttaatttcactgtgtctctgtttagtttttgtttcatgatctgtctattactgagagtgaggtgttgaagtctcccactatattgtatgaggtgcaatgtgtgctttgagctttagtaaagtttcttttatgaatgtggatgcccatgcatttggagcattagatgttcagaattgaaagttcatcttggtagatttttcttttgaccagtatgaagtgtccttccttatgttttttgacaactattggttgaaagttgattttattcaatattagaatgtctactccagcttgtttcttgggaccatttgcttggaaaattgttttccaaacttttattctgaggtagtgtctgtctttctcatttttcctgtgtgcagcaaaatgcttgttcttgtttaaatatccagtctgttagtctatgtctattttttgggggggtggggggattgagtccattgatgttaagagatattaaagaaaagtgattgttgcttccaggtgtttttgttgttagagctgggagcatgtttgtgtgactgtcttcttttaggtttgttgaaaggtaactttcttgcttttttctagggtgtagttttcctacttgtgttggtgttttccatctattatcctttgtagggctggatttgtggaaagagattatacaaatttggttttgtcatggagtatattggtttcttcacctatggtaattgagagttgtgcagggtatagtagcctgggctggcatttgtgttctcttagggtctgtatgacatctgcctaggattttctagctttcatagtctctggtgagaagtgtggtataattctgataggtctgcctttatatgttacttaacctttttcccttactgcttttaatattctttctttgtttagtgcatttggtgttttgattattatgtgatgggaggaatttcctttctagcccagtctattttgcagttctgtaagctacttgtatgtccatgggcatctctttctttaggttagggagttttacaagaaaatcaagaaggaagaccaacatgtggatacttcattcctccttagaatagggaacaaaacacccatggaaggagttacagagacaaagtttggagctaagacaaaaggatggaccatccagagactacctcacccgggaattcatcccataatcagccaccaaacacagacactattgcatatgccagcaagattttgctgaggggatcctgatatagctgtctcgtatgaggctatgccagtgcctggcaaatacagaagtggatgctcacagtcatctataggatggaacacagccccccccccccatggaggagctagagaaagtactcaaggagctgaaggggtctgcaaccctataggtggaacaacaatatgaactaaccagtaaccccagagctctagctgcatatgtagcagaagatggcctagtcagccatcattggaaagagaggcccctaggtcttgcaaactttatatgccccagtaccgaagaacaccagggccaagaagtgggagtgggtgggtaggggagcagggtggggggagggtatagggaactttcaggatagcatttgaaatgtaaataaagaaaatacctaataaaatttaaaaaattaaaaaggttaagggaagttttttctataattttgttgaagatatttactgaccctttaagttgggaatcttctctctcttctattcctattattcttaagcttggtcttctcattatgtcctgaatttcctggatgtttggggttaggagctttttgctttttgcattttctctgactattgtgtcaatgctttctatggttatcttctgcacctgagattctctcttctatcgcttgtattctgttggtgatgcttgcatctatggctcctgatctctttcctaggttttctaactccagagttgcctccttttgtgatttctttattgtttctacttccatttttaaatcttggatggtactgtttatttccttcgcctctttgattgtgttttcctgtaattctttaaggaatgtttgtgtttcctctttaagggtttctagctatttacctgtgttttcctgtatttccttaagggagttatttataaccttcttaaagtcccctatcaccatcatgagaagtgattttagatctgaatcttgcttttctggtgtgatggtgtatacaggacttgctgtggtgggagaattgggttctgatgatgccaagtaaccttggtttctgttgcttatgttcttatgcttgcttctcatggtctggttatctctagtgctacctaccctcacaatatctgactgggtctgtctttcctgtgatcctggttgtgtcagaactcctcagagttcagctgtctctgtgatactgtgatcctgagatcctgagtgtgtcaaaggtcctgggagtcaagctgcctctggcaccctgagatcctggtgtgaccaagctcctgggatcctgggatcctgtggtcctggacatgttagaactcctagaagtggagtttcttctgggtgttgtgagactagctgtggagttcgaaccgaaggtctgctcagggcaccagcccagaccagaaggctgaacatattttctgagccataaattagtaaacatgacagaagcacattgcgaggggaaaagacaaaccctctactgtaagagccatcctgaagagtcaggagtatacagcattggttcttgggtaacatctatttttggtttttgctttgtgtttttctgattttatgttggtggtattcgccagatcttccagtcacaggccaaaatggaatagttacatatgagaaaactagaacccataaaatgccccatctctccttcctcacttctcccaaagcatgtttgacaacacttcaaaggcttcttttatagaatcttcagactccaacattaaagaccagtgtttccactcttccctcaggaggatggagactgttgtacttgcagtggcctgggtagtgaggtccagtgtctttatactcaattgatctgtacttcccccctgtaaattccataagtgaaccctaagtggggccatcaccagtaaggctgtcaaacagtacaaaaggtatggtataaattcccaaagaattaaattaataataaaaaatatagacagtggtagtgcgtgtctttaatcccagcactcgggagttagaggcaggcggatcttgcctacagaacaaattacaggatagtcagatatagccagaaaaacccagtctccaaaaaccagataggtaggtagatagatagatagatagatagatagatagatagatagatagatagatagatagatgatagatggatggatggatggatagatagatagatagatagatagatagatagatagatgctaggtacagtgtaattgagggaaagaaagcagtatcatcccctggtctctataccacgagagagagagagagaaagagagagagaacaaatggcagctggggatgttaacccagtgggagaatagttgctagtaagtgcaaggtctcagtgttcaatccccaacataagagaaatagaggaaaatgtaatattgatatattatgcagtgttggtgcagcataaacagcaatataattatatatgatcattttcaagtaacatgtggtatatacgattgtatgcactctacatgtgtataattggtttgcttaaatgggcaccacaaccattggggcaccagtaagatctccattctgatcatatggtatcttttgtatgtgcagtcttttgtttaccagaacagcatcatacatgtcaacctatgcttttattttaagattatattaaacattaagtttactggatacatatgtgcatgggcacgtgtgtgtgtgtgcgcgtgtgcgtgtgtgtgtttatgcatgtctgaataaatactattttttccacactttcacatgagactaccactggcacaggggctctttcagataattttatgtaaggatttagagtgaaggaaggaggttaagcttggcatgtggtcaaagacagcaggcaaggaaggactcagagaaacacacgctgacaaacaaacaaacaaacaaacaaacaaaaacccacacatcacaaataagagcctcaagccagagatgtcagggcaaattgtaaagcaccctgaagactccctagggagactcaagatttccatccccgttcagaatacatcaactgaaatccaggtttgtttaactcattgtttctaagccttagcaatgcagtcaaaccccagagctcgctagcacaggctggaattctataatgtgtctgctttgggtgagaggccaatggaaaagttatttaacctaaacgacacagtaaaaaatccctttgctgaaagtcttcagagttaaggtgaaaaagttctcgggcaagaaacaatacatctactctgctgacgtaataatgtgagcgcgtgaccatgtgatgggggcagggcttggctagaagagcctagaatttccctttctctatctttgtgttgtttcattcattcgtttgtttgttttgttttgtttttgcttcctgtggttgtaaggatcaaacgcagtgcatcacacatactagggaggcatcgaaccactgggatatatccccagtctgacactgcactttaagatttcaagagaagacttttcagcggctttgaggatgccttttttttctttttctttttctttccttcttagtaaacagcctctatttatatcactttaaaaacaaaactacgtaatttatcaccctccacccatttcaactttctccaaatgaaactccagctaaactgattgacaacttaatgccccaaagccttcttagaggaactcagtaaccacgcatggtcgtcccaataatactgttccagacagtgatggggaaatggaaatcttacaaaaacgcttccagtatttcctgctggacaaactctgtcatcctctaaaaacactgaaacgggaggagagaggtttatggagtctgatgtggaaacatttttcaaagccagggctggctgggccaggttgagggtgcagagcctgtctcttccaaagagctgtttctcttctgtgagggtccccaggctcagttactcttcccatgtatgctgctgtctcggaggcagtctttctggactagtattttagttcaagaaacactccttatttggaggataaatcaatagaatgggtctacacgctaacctgtcattactcttttattttgaagctctgtgggagttaactccacccccacccgacccccccccccccaaaaaaaaaagtatttggaaaattcctagtgaagccacttgcttgttttgtgaatgacgtttgtggtcagctataacatatctggcatgtttcttcttattgctgcctttttcatgcatgtttttataatttgggagtttttatggaagtgattaaatattatttggcttcaagctggtgcagaaactgtagagaggcagagagaattctccctagctagaatccagcatgaacatacccatgctctcataacacacacacatgcatgcaacatttccaatgtacatccacacagtttcttgcttgctaagtagttctctctctctctctctctctctctctctctctctctctctctctctctctcccactcttccccctcccttccctctccctgcttctcttctcttctctttttccctccctccctccctccctccctccctccctccctccctacctccctacctccctccctccctcccttcccccctctctctgggaaatgaaaacagctatgatttccagctcattttaggtttgcttctaatagaggcggcattgttcacatgtccaagccttctgctcttacccagcattaatgttgtataaatgttgttccaagtcttgctcataacgattgaagtatttttgtagaatgtcaccttccaaactatccttagcgcttacagtttgaacagcaagcagccttgcttgctgacttgtataggggctttctttccctgccctagcctacctcccccaaaggcataaagccacagggaaagtaaactcttgtatgtaaatcaaagctggtgtttagtagttcccaaatggcatcccccgaaattaactgtttcttgctttattaaatcaattttatatagtagcatggaacaacaaatgaacaattttgagaaaaattgtagttttcttcttggcaaaattctgtcaatgctgagagaattgggatttatgttcagagaaatattataaggaattatacagatattagaaaaataaaaatatctaatcagtgttccatgtgtgtatatgtacttaaaaagagacagtgttttctgggtgaacacttcccaggtttaattaggtatctgtattcactggcatatagtccagtaatttggtctgtgtattgcttacaagtaaagggtggttaagagtgctgactgctcttccaaaggtcctgagatcaattcccagcaaccacatggtggctcacaactgtcaataaacatattaggaactctttttaacctgttcacattatctacttgctaaaacacttgaacaaattatctaaaattagtactgagcagattataatcttccttcattttcacattgccagatgttttggggtatatctaacccaactccacagtcataatatataaccaatacaaataccagcacctgtccctacctgggcttttatttccagtgtgagtaccagttaaaaccatgaacctcgccaggagtagtggcatatgcctataatcccagcactcaggaggcaggggcagggagagtcctgtgatttcaaggctagtctggtctgtatagtgaattccaaaacagaaatacctatgtagtgagaccttttctgggataacaacagcagcaccagcaacaacagcaatcatgaactatacaaagtaccataaaatgtataacctttaacacagagactggaggtgtggctccgtggtaaagcactaaactaacatgtgagcagtactaggttcaatccctgtcaccttataagagtccattgaatgcaaaaccccaagttacggaattctcacttgcacagcagaaaatggatagtatcagctgctttggaacagaaggtttttcatgtgcatgtgtgtgcagtggtcacacttatgtgtatgtgtggttgcaagtgtacgtgggtgccactgcacatgtgtgtgcatgtatgtgcatgcgtgtgcatgtggaagccagaggatgcagttgggtatcttcttctgacattccccatctattggctgaggcaaggtctctcacttgaacctacagttcaccaatttaactcctccagctatccattttgttccagtaatgccatctctgcttcctctctgccagaacagcgagagggccacagtaacctcccaacatttacatgggttctggggattcaaactcaggtctttacatttgcagaacaaatcttttacctgggagccatctcccccagggaaaccaggttcttttatacaatgcctcatcatgcatgactttaattcttttttctatgacatataaaatgggcattttgcaaaatcagaagaatgctaatgtgacattaaagaattgaggttataggtttgtcttttgccataggataggcagtgtggtgttcagtactagacagcagataatccacagtccagtgtctttagaaaagagaaataatggtaggttgcaaaatgagaaaaatcgaactttcatctcccttgcaatgaatgaatgatttcattttatttcctccccagtatttgtgttctttttagcatcttagattgtatttttttaaaagacccacctagttaggtaatgagtattttttttcttccttagttaacataatatttttttcaatatgcattttattttatttcttttactgagttctgatttacattacaatgcagcccagaagctattcaataaaaatgaattgcataaattctccaaaaagaatatgtcagcagcaaaagttttctagttcaaagggcaagttttccacttgatttatatccggtattacttttttataaacaaccttccctcccttccttcatgttgttctctgtgttgggatggaaggccatgtctctctgtttcgttcagcagtgttgtgattgctggccattcctcagctaaaaagaaccagatggccatgaaacactaaggtcccctccaagtctcttctagacaagtcttttacatagagcacaagggtgctggcctaataccagtgagagcattacacaagccaaacatcatgccggctaagtcagaaggggccacctttcggttacaaggaatcaatttgcttaagaagaaaatattctgggctggagaggtggctcagtggttaagagcactgactgcccttctagaggtcctgagttcaaaacccagcagccacatggtggctcacaaccatctgtaatgagatctgatgccctcttctagtgtgtacttatatataataaataaatgaatctttaaaaaaagaagaaaacattatagagatgagaggttctaagtcatattaatatattacaaaggacaccaaaataatttgctggctgcattaaaatatctcaggatatgttatatataaatatatatatatatatgcatacatatatataaaaccatttttattataatgcagatatttagagattacacgttcagagaaaagaacatagctaaatcccaaaacatcttaacagtgaacacattgcagataattagaaactaggtaacattagtttcctttttaaaaattggattgtctctctgtatctcagagtcggtgccctccctttcctgcagtggtccctgagccttaggtatgggagttatgttatgaatgcatcagtttggactgggttccacaactctacactttgatcaattgtggctttctattgtggaaagattgttaagaaccagagaaatagggagttcttttttataagattgtttgtctcctaaaaaggtcagaaactatacccataatgtctcaccaacacagccacctaaatgtgacctgaacatgaaaaatgccgcatggcaagctgatgtggaaaagggaaagagcaggtgacctcaaccatagacaaggaaccaagggtagctgaggaacgctaagagttggagaaatagtcttccccagggaagagcacacttggttaatatatatatatatatatatatatatatatacatatacatgtatatatatatatatatatatatatatatatatatatatatatggtggctcatggatagatttggagacacaggaagggaagatgatgtaattatattataatttaaaaaaatatttttttttaaattggattgtctggatgcttgggtttttgtggttgttattgttgttgttgttgttgtttgtttgtttgtctgtctgtttgagataggttatctgttgtagctcatagtagcctggaattcaaaacatagcccagcctgccctcaaactctcaaaccctttgcctcgccttcttagtagaattgtgtgtgtgtgctaccatgcccagcatcttcctttgtgaaatgtttttcaggtcacatcttataagttagaaagatttggggtgggataataagagtcacaaaatgatatcctaaagttgacaacatcactagccgtgggcagactgctatgcaaaaagttctttaaccctgagtgagatccaacttcatcatctgttgggtaaggatataacatccctacttacgagatagacgcaagactcaaacttaagtaaggctagagtctattaaactataaaactacccaggaaaaagtcaaaactgatgccttctttatcaagataaaactgcttgtcaggcagcagtggcacacgcctttaatcccagtactcgagaggcagaggcaggaggatctttgtgagtttgaggccagcctggtctacagagtaagttccagtacagtcagagctacatagagaaattctgtcttgaaaaatcattaattaaaggaagggagggagggagagagagggagagggagagggagagggagagggagagggagagggagagggagagggagagggagagggaaaaggagagggagagggagagaaagaaggaaagaaagaaagaaagaaagaaagaaagaaagaaagaaagaaagaaagaaagaaagaaagaaagagttgacaagttctatcagtttcctgttcctgtcccgccatacaggcgcttttgacgattatgtaacaagacacaaaagaaaatgttcgcgacacagtcaaaacgtagagcccgatttccaaagatgcttcggaaagccaggcttcttggaacttgctttgtacacaggtgtcctgacttcccgaagcctgaaaggcggaaaaacagactctggaatgtctaatcagacaagcacatgacagagacaccgggtggcctcttcctaaggcccaggaaccaacagactttggacctatttgttttcctcactcccagtgccttaaaccagagcggaaagcctgggtcatttcgcaaatcacctgacttcaaactgaaatcagtaacctagagaaacaagtacttcgggagcataggggcgcccaaggggcttagcctacacgttctgatgagatctgatgttgaatgattaataccaccttattcatccccgaccccaggaggtgcgcctctgcacacattcaaactccccaggtgaaggacacacaggaaagagccaaacacaaatctaaagaatgaggttacaaagttatctctagcatccagctgataactcagcagcagctagcaggtagaaaatgacaaggaacaaaagagagggagacagagaaacagagagacagagagacagagagagaactccatggcaaacagtggagcatgatttccttcctattacaaaacactttggttataaacaaaaacagaattatacgttgagtccaatccacatatacagatcactctgccttgcccatctcgagtatgtttttgtttgtttccctatttgtttctccttttcctctatttcctttagatttgcgcgggggggggggatgatttttttaaaaatttaagggtttaagagttagggatttagttcagtggtaaggtttttgtttagcaaagccacagccaggttcagtcccagaatagaagtgaaatggatatgtctcatttcacccacaaatccactgtgtcgctaatataacgtattagtaataaaccttaatatctacttatatttcaatttctccttctcagaaatgcccttcagcaattggttagattctatgagacacaaaattgcttggttttgcttcctttccagtccctctgagtggctggagaagcaggtcatttgacctgtagaataggctgcacgctggatttggctgggtttagctgggtttggctggagcgagctcacgtgacttgctcccttacccttgcgattcctctagcctgataggtaaagctagtgtttgaatccatgtactttgtattgtttttacaaatgactatgcagttccctactttctcacggaaaccatctttttaaaaagcttaagtcagaaggaacaaatgtggcttgtctgtgtgaccaggatagacgctggcagagatgaggcacgtgagggggggcgctagaggttggggggcggagatcagtgatacattgcacactgcatggatgagaccctgggttccacaaagctcacaaacacatacactccacagagaaaagaacacaccaggtctatattctaaacctactagaaatcagattttcaaattgagcaaatgctctctgtctccccctgtgtgtctctccttacatgtctttccctcctccactgttccccctgacaccacttccacttctatctcaattctttcaagcttttattgatcaactccatgttacacagcatgtatgaatgtctgaactgctaaattattgcttttagtattttaaaccacatacaaatggaattatgccttatgtgtccctccgtaccttggtctgcctactcgttccatcttcgctcacacaaacagctcagagtatctatccgtctacagcactgccgccatagtgagggcagtgaagttgtctccagcggcgaaggcaccatagtgtgctaccacgtttaaactgttctcgatttttgctaattatttttttttctcgtttattgagacagagtattatgtaacacaggctggccttgacctctccacgtgggtaaggctggccttgattcttgatttcctgcctccacctccctggtacaggaattacaagaatgtgccatcctgctctggtagaattcttcaacacatttctagggaatgaatgggaattccctccaggctgtctgaaaagtgaaatttgtgggtttaggggtaaacttgttttcaaatgtatttgatatttttaaaactttaagtgtcagaaaaaatgaagtgctatcagcaacctagaactaggtgctgagaactattgctaaccctttaggtgccttagcttatctaatctgatagcatatggggaggatgcttcgatatttctctttttagaagtgagtgctattccacaagattgctaaatcacagagctgggatttgtacctcagcatattgtgtctagagctatactaaatcgaaagcaacatagtaaaagagcaagacattctaaccaaacggcagtatacaacacacaagagacttcgcagaagagaccacgagtgagtttgtttccaccaaccatacttgcaaagacaacatgtccaaagaagcatcatttgaggcactaagaagacattatttgtagagaggcaataattcagttcctgtttctgtctgtggataaggagcgggatggaatccacttgtcatggcaaagcttcacttatttagaaggaggtttacacagctctttgccaacctgctgtacaggtgtgaggtcagcctagtcctaactgtccatgcccgttataataaggctacactgggatggctcttagcaattcttatcgactgtgtcatctcttgtcccagtggccctgatgtggacactcttccacttagcaatgtctttctcatgaaaggaaactcttttctaagcatagacagacaaatgcaggatacagagaactctaaaatcgtctactgaccactagaattatggtcatggcagtaagagcagaataattctagattgttcaaggatgtgggttatatcctggctctgtctttatctctgtgaaaagaagtaagccaagatgtttgtgcttaggaacaagaatacttggactaaccagtttgaccatgatgttgtgaggatacatatcacatgagaacaaaagacacagataaaaatcttccgttaaaaatgggcagaaagaatgtggaatggccataaaccttaggtactgtggaatttaactttattttatagtatgaggtcctttgatgacctagtaaaagctacaatgtgcttttcctaggaaatgtacacacacacacacacacacacacacacacacacacacacacgttcctaaacattgagggaattaaattactctgcagtacaaaaagtgtcttatttccactttccaattatgaagtgactttgagttgagtgtggtggtacatacatgtaattctagcagatcagagaaaggaacagagagaatgcttcatgtttaatgctggtctcctccatataatgagctccagaccagcatctaggaatatatagttgaggcccccatctaaagggtagtgacaccttttggctgggatcaatagtatgtcctacagtctcagccctgaggcaggaaggcagggggtcacttgagtccaggagtttgagccccattctggtagcatggagagaccacttctcaaatttaaaatcaacaacaacaaaaagtgtcttttgaggctttgaatgtgtatatcatgtgacgttggtcctgggttcaaaagcaactgttgtatttcagagctgaagagactaaggttgtctaagctgcaccttgctgggatcccccaaactgtttggattaaactgaagagctgagacaaccggggcctcatcttcacagtggaagaagaagatgctgtcctctatttgaatgtgccccccccccccatgcaaccattctccattctgttaaagtagccctcacccctgtgataacagctggggcggccaacccaacaggcagttctagtcacataagcgcatggcttcgtaatgatggggcgtatggtattagtgctggaaatacctttttatttcttagaaaataaaagcaaacaaacaaaaacaaaccccttttttgagatgggtttctctgtgtagccctgactgtcctggaatgtgccctgtaaaccagactagcttcaagttgagagatccaccaacttcttcctcctgatggctgggattaaaggtgcctaacactaccacctgtcaataatttctaataatcagtacctttgtaaggaaaaactctgcgtttcacattttttttctgtgttatttacttcactttcagcatcctagtatcctttcatgagtgtgaatttactggattgtcaccaaaagccaaaataggatcaggagatagggaaacaactgttttacaattgggtcgctgaaaactaggcttgccagcctctcaggtgcagaactagtagtttgtcccagatctggtcccaacttctggtctcacttgttaaaccatggaggttattgtgcatctaatacagtttcaattttcaaacagccactgggcaccttgagatcaaaggacaataagtacaacttcagagaaagcaaaactgcccccacactagaagtctattagttgatcacttttctggacagttttaaacaggggacaagatagagttgagaactgcttcccaactcctcccaggtcttacaaacatggctgggaggcctgaactttgacctgtgtctgctattccatagcaaaggccagagtggaaaccataaacctatatgtttatgtcaacacaaacggctactgtcagctccttttcttgaaaacaaacattgacaggtaaggggccagggatagaagctatcactggagccaggaccctgcctggggcttcagagagccaaagagaaaaaacaaccgtggggctttgattgtgtaggattctgcttctccactcttctcatcccacagagaacaacaaaatcaatttcctcttgccctcctgggggaaaacacagtgtttatcaacgtgttggccccaaaacctcagaaccagaagaaccacaccaaagtgctgttgagcaatagattccaggtacttcacacatccgggatccctgacactgcacctgggaggcaagatgactattgtgaatgctaaagtctgagctcccttgggaatagtaatggatactctgagagtgtgtgcgcacattgtggtgtatatgtgtatggtgtgtgtgtgtgtgtgtaggatgtgtgtctcaggtatgtgtgcccatggacagacatagagaactgtatactctgtttcagctaggcttactggccacagagctcttggtatctccctgtctctatttcccaacaccccaaggctctaattaacaagcatacacaaccatgcaagccaatgttgttatttgttgtttgttctatggatattagagattcaaactcaaatcttcatgcctgcataacaaacactcttatctaccgagctatctctccatcctccattgaaagatctagggctatgccttcataaggatgtttggggggatttcttctgcaccccttctttttcttatcataaaatttctggatttatatcatacatttttctagattgcacatatttcccttccatgtactgacgctcctctgtctctggacacctctcatttctttacctttgcaccttcccctcaattacccccacctcttccagagctctggtgatctatatcttagcctagtttctattcccttattatcctcaagacacatccatacacatatacaacactatacatataggtgttgctatttcttttcactaaaatagaaactcaaatttccctggtttctgctttcttcccacccaacaaaacctgatagaaaagctcctaaactcttaagattcagcttcaatttgatctttttaaaaggtggcatgtgactcaacaccatgtgtgaaccgtgacgtgactccttcttgctgatggacacactttgttttcaccttcatatttctatgaacactgaagcaatcagcatctctgtatatggtgcttgctttctgtctggttcacagattcttttttttttttaattagatattttcttcatttacatttcaaatgctatcccgaaagtcccctataccctccagagactgccccacccggggtccatcccataatcagccaccaaaaggagacactattgcatattgtccccccctccccccgtcctgctctcctacccactcactcccacttcttggccctggtattcccctgtactgggtcatataaagtttgctagaccaaggggcctctctttccattgatggctgattaggccatcttctgatacatatgcagctagagacatgagctctgggggtacttgttagttcatattgttccacctatagggttgcagaccccttcagctccttgggtactttctctagttcctacattgggggccccgtgttccatcctatagatgactgtgagcatccacttctgtatttgccaggcactggcaaagcctcaccggagacagctatatcagggtcctttcagcaaaatcttgctggtgtatgcaatagtgtctccttttggtggctgattatgggatggaccccgggtggggcagtctctggatggtccatcatttcatctcagctccaaactttgtctctgcaacttcttattttattccctattctagggaggaatgaagtatccatgcgttggtcttccttcttgattttcttgtgttttggaagttgtatcttgggtattctaggtttctgggctaatatccacttatcagtgagtgcatatcaagggacttcttttgtgattgggttacctcactcaggatgatatcctccagatacatccatttgcccaagaatttcataaattcattgtttttaatagctgagtagtactccattgtgtaaatgtaccacattttctgtatccattcctttattgagggacacctgggttctttccagcttctggctattataaatagggctgctatgaacatagtggagcatgtgtccttcttaccagttggaacatcttctgggtatatgcccaggagaggtattgctggatctactggtagtaatatgtccagttttctgaggaaccgccagactgatttccagagtggttggaccagcttataatcccaccagcaatggaggagtgtttctctttctcacatcctggccaacatctgctgtcacctgattttttgatcctagccattctgattggtgtgaggtggaatctcagggttgttttgatttgcatttccctgatgattaaggatgttgaacattttttcaagtgcttcttagccctttggtattcttcaattgagaattctttgattagctctgtactccatttttaaatggggttatttgaatttctggagttcagcttcttgagctctttgtatatattggatattagtcccctatcagagttaggattggtaaaaatcctttcccgatctgtcggtggcctttttgtcttattgacagtatcttttgccctacagaagctttgcaattttatgaggtcccatttgtcgattcttgatcttacagcacaagccattgctgttctgtttaggaatttttcagattcttcttcataaggtagaaaacgggctacgtggttgctatcaacgttcttgcagggctgtgtgccttttatcattttatttgcaatgctaagtatattttaatttttgataactcacattggcttggttgctaaataaaacaatatttatttgagtgataaatcatattaaaatactctcttcctttattacttgtcattatgtacaaagtgtagtgaagtgtgattagctatataaatatatgatattgaattttatttatttgtatttattatagtttttgtgtatgcacacgcatgcatacttgctcatgtgtgtggaaccaaaagcacaacttttaggagtcagttctttcctgtcatgtgtgtcctgcagctgggactttgcaaggactttgctgcactttgccaggctttgcaaacagcaccatcttgctggcccaatattgaatgctaaatgtctgtttcaaggtgttccagtttccccaagtattctagtggcatcatcagagtttcactattactacaggccacatgcaaatagattgaatcctgtggcatcgtaaggaatgtagcaagaaaacaaatgtcagaaaaccgaaagacaaaaaaaaacctgtcttccaaggttccaaaaatattctcagagagagagagagagagagagagtcagagacagaaacagagagagagagagagagagagagagagagagagagagaggagggagagagaagaagggagagagaatgcggagggagggaggaaaaaagcagagttggatgggatgaatggataacaaaaataaagaccaactcccaatatttggttatccctgtcagcagttgattctgatggcatctgtttttcttcagtgttaaatatataggattagtggagggcaaggaactttttgtagaaacaacagtctttttgtttgtttgtttccttttggggattttcttttctttccttttcctttctcacttgacagcctatttatttatttatttatttatttaaaaaattgaaaacgcagaaagaaggaccttacccgataaatctcagtcaactcttctttgatattttttttcccctcttgaacttactcatcctcctgccccagcctccagaatagttaggactagagacagatcccatcttgccatgcttgctttgtttggtttgaatagctctatgtgtccaataagcagagaagtggacagtttccttgaggccgatacgatctatcgttcacgggaaataagcacaattcaaacaggcagtgtgaggaacactgagcagctgaggaataggcaggggtgaggggtaggagagaaagggccagacgtttgagctaagaatcgacagttttcatcatggaagaacagacatacataggatagcctgcataggcagagctgctgtgagagtacattccaggaaaaccttaagagattactttaataataaaccatgcattcttcagcaagctgtcacgggattaactacccctttctcggctgggaacacagtccagactccaccccaccctaccacagggcaggtttttgtgcaaacgactgtccttatgtggggaccttggtttataaagcactgcatttaatttttttcctactttaattctctaaacaaattttagtggtgatgaacaccggggtggactttggtgtgtgtgtgtttcttatgtggagatgttcattttagacttactgaaaagttatcaacttagatgtggtaggaatggtaagaaacaggacctcctgggataaaaagagttaaatttattttcatccccccccccccccataatgtgagcaggacattgaactactgccaagaccaatatcagcaccctagaggtataaaaatacactgcaaaaccagaactctctactgtgggctctttagatttctgtctaacacaagggtgttcgctttaagcagccactatgagcctgctgctcacaaatgagctctttgggtccacatcactgcttcacaactgcagttcacagcagatgaaatcgttttctttctctggtttctaaggcaaatccattccatctagtgggagcaagttaacacattttgataataatctttcaactatatagataaagacaaaggcctaagtggccacttccacattgagaaatgattcatgtctgtctgtagacttgtttcttttatattatcagagcccctgtttgtgtgaatgaactacctttttttcccctaatttttgaactttttgaaatgacaccatttctctagactactagatttgagaatcaaagtgtgatgttctcagagctagcagaattaaagttcgcacctatgtcttgtgccttcatagaactgaaaagtagaccttccatcattcactgaaaatcctttttttttcaaccatagaaaattacctcagaggaatattggaagcacacacacacacacacacacacacacacacacctctactctgcacacccaagtgtgaagggaatccagaggtcaggtaggggcagcacctggaccagctgtgttgctctgtgtctcttactctccctgcatgagggctgctccaagcctgacctacttgcaagcagaaactgccactctcattgagctacctcaaattacagtgattttgcagctggggctaggcatggaccacaaaatacatccttggtgcaccataagcccaatttgaaccctggattctcagtggtaaaatgcaaatccattgtgttgcttactcaataaaatcaataacccgtttccatccaagtcacaatttgtcattttcatagtcagtacattctgcttacaacaggggaggaggggcaggagggagagggaagaagaggaggagcagaaggaaaaacagacaagaggaggaggaacaagaaaaaaaggactaaataagaaagtggaagaggaggaagggggaggggaaggagggaaaaggggggaaggagggagaagggggaggggaaggagggagaagggggaaggagggagaagggggaggggaaggagggagaagggggaggggaaggagggagaaggggaggaggatcttcccaaagcttaatttcttaagtacttgaaaagcaccactgtttctgtgactatttaacaattgtcccctgactttaaaatatacagaaaagaaattgtgagattctataggattcccaaggtctgctctgccgggctatccacagctgagcatcgatgaaacaccttccaatacttattcacatatctcaatattttcatgaaggaataagaaatgctgtagaaactagcagacaaagtcatgttatctacgtgtgggtggatatacactgaaatgatcacaaatgtagatcatttatatggaggctaacttgttttgtttaggccagtttaatagcgagaatatgctcgagcgtgatattaaatttcaataacagggcatctttttacttgggcacacatagatttccctcctgtttaagcacgttcacaattaaagaatagtgattttctttaaaggtaacaatccagtcacatgcccagctttagaaaggacagactggacccgggaacggaaagtcaggagtaaaggcgcgtctttgttcaaaatgccccaggcggtttaggatgagttcgcagttcgcgtgccacgccactcgaagtggcaatccagggaacggatctgcgaaacgcagctcagaggatcccatccttttcctccagaatttcccttttcctgtccttacgtgcaccctttctggcccaaggcagtgtggggctcctggcccgggttgtgtgcacgctcctttttccgggtctctgcgatcgcccccagctggccgggcgcacggggcgcaggaggcgcaggaggcgccggatctccgtggctttagttcgagttaataaacagttaagtttggaagactcggcagacacgttgagggggagttaccaagtccaggcagcaaaaacatcccgccgccacattcctggagagtcctcagagccagcatctgattagaaccatatctctaccgggagtggccgcgcggctatttaagtggcgttctccgcgtcctcggcgctgcagccttgaggcttcgggcgcggggaagtcatgctggctccacagaagcactagctagtccgtgagtaactctgccatcccccttcccttcggtcccttctttctttctttctttctttctttctttctttctttctttctttctttctttctctttttttccttttttttctttttttttcttttttttctttttttgcgacctacttctctcctttgctggctcctctcttcccatccctgccttggctgcagaccttgggcgctggggaaatcttacaaatgagacagtgtactccggggagagcagcgggttttgtggcctgacatctgtggaatgcttccaaggaatgcattttacctttggggtcggactcaaggcgcccatcctgtgacatttaacgagtccctgtgtgtgtgtgtgtgtgtgtgtgtgtgtgtgtgtgtgtgtgtgtgtgtgttgtacacgagccctagtttttagggcttaggggacatcccagggaatgcgcggtgtggctgctgaccacctaataaactcctgaatgatgttcagttttactgtgcgacaaaggctggggacatggtctgtgcctccgaggagctattttctgctgactgacagcacagggcattaaaaatgtgaactttgtcttataccagcattcctaagaaaagtatctgcccaagccacgtaacaaacttgttttaaatcgtgaagcgtttgaatgctgtttttcttgactgttgtaaattatttggaaggattaagaattcaagaagagggactaaactgtgtttaaaaccttggagaccctgccaacgtagcggttctctttgcggcatagagctggctgttatttcttcctgcctgctctcctccacttaatcctgagtctggaattcagctctgtagtcggtttcagatgggagctgtgtgaatccgaagggaaatttaactggattaaaaacagttaaaaaatatggatgttatctccacccgaggcaccccctcccaccctttcctctttcttcgcctgtgtttggaagaaagggagccaccctgtaaaccgagaagagcaaaaacgagcaagcttccaggcacatggaaagctttaaaaattatggaggggcaacttcatgaatagtaaatgttgctgttgctctataaagatgaaaaaatttctggccctaatcaggcaaagcaggaggggaagggtggaggtagatataactccaacctaagtaatggcagaaaatttgccaaaatcccttggagatagctgataaggctccaggaacgcttctgatgggatgtctaacctacctagtttacaatcttgaggcctgggttctgcacatagtagcagtgactggttgtttagaaaggagggactagccaggactcgggagccactgctaccaaatggcttttcatggtgctatcttgtcctggattaggctgccctgttttagctagctaccccacccaccaaggactctacctctctccactcccttggttgaggcagggcacagcagtactgaaagaaatgtactggcttgagaatttaggagtgttggggattcaggctttggagaggaaaacagctatctagacaaagcaatgctagaggaacacagctcagaaggcgagattagcaagagcccttgagaaagcaccagagaggtgtggtggtctcttccagcactcgcatcagacacagaccacttcttccctagttcgtagtcactgtctcctaaaactcgctgggttcttcccaagccttgtttaaaaacctaatcacaaaccccttcttcctctactgcaaactcaagcccttttgtccaaccgcgagtctagaaactttttccctgtaggctgctatgctccgtctttgccctgagttctggagaaggaacccaggaccttgggcatgcttgacaagccatggagctgcgcttctcaattcctggttggatggtcttactctgtaaacccagtctagacttaaactcatcatcctcctgcctctgcctcaggagccctaggactgtaggcggaggtgagcacacctcgctaagctgggccacttgtattatggcagaagagagagattgtggaggaatgggaggaatgtgttctgtctttgccctccagcacccatgtatttatagaactgatgatcccgattctattgatctccacctgaggatgtaaaggaggctgggaagataaccacaggatgcttttaggccttgctgacttgagaagaaagaacaaaatccagaggttagatctctctctctctctctctctctctctctctctctctctctctctctcctttcctctttttcttttggcattttgacactgaatcccaaaacttatctctcttctcagtgggagattgaacaccccccccccccccagtcatcgagtcctggaatcccaggcgagcgccaccacacccagttcagagtttgcatttctgctaaagacttaaaatttccaaggttaaactaagtctaaattcctgtccttgggcctatttatttcttgtcttcctccaagggttaggtggattttagctcactttgaagatagttgttgacgtggtgaatggtgcaagagcctccggaagctgtggaccaactggtctggactgctcagccatagttctgttacctaaaaattaaacgagcaggaaaacagggcttgctgggtggcttgtagccaccaggaagttttgtgggaaactgtgctcctggtgagaccatgaggaagtcccttcttcatttctcccccagactaaacctatcaccactttgatgaagccaacttggaagtaccctgcgtttcttcgcctcttctctctgttggggtttcattccttttcttctaggacagagctaggatactggaatgggtggagaggctgctgaagggaactcactaacaacctaagttcctccagctgaaggcttgcaagggtccaccatttaaacctccctaccctgggcagaattaggctgggaaccagactggcaatctgaaacacctgagtagcaggatgcggctgttttgggttttgggttggtttggcttcctcctccttctccttggagttgtaataaaagttgaagcactgttacagaattgcagagggcggcccaagtctcatttagatgacaaagtattcacatcagataagtgtgtttaagggaaagctaaattatggtaagatatcctagtgggttaatcatagcaatcagaagggaagcaaatgaccaggtctcctgctagagacaaagcccaaacaaattcctgattaggggtacaaatggtgctggatatcttaaaggcttagcagttcctatatgcattcatgtgctagccgtgtccctccttctgccaacacagcccagttgggtagtagttgaaagcatctgcacaactgttagtaaaatgaccgtggacacacagaataacctctcggtaattctgttttcttatctggggaagaacaatagtacgaagggctgctgagaaggtaagttaatctatatccttagaatactttattctgtttgtctatttgtttctgccctgtgaacaattgaatcaagtgtctttgtggcccctgagagcaagtggagaatttcttaatcagagtggaataccacccacctatttgaaaaatggtaatcattcaagtattcaatactaaaaaagcctgtgtatttgcttgtgttcacgcaagaacagacagttactctctgttctcagtgtggaggactgctatttggtttggtcagaatgacctctggtctcatttaaatcttccccacactctctcagactcccaacagagaaagagtgacccttctcctgaagtcagcattctagccaaggaagtgggaaagggagggaccaccctgactaagcagtgactaggccaggacacgggccccaatactatcttggtccacatagctgggcaggttgccatggttactccccttcctgcatctttccaccaccctggaaggaaacttgccttctctagcacaagcagaatctgaacaaattgcttcctgctctaaaaatggaagttactaagtgaagtagagcctttcgttactcatatggcccttccctcacccctcaaacttgttttaattctaatatagactttctaatctttgctagctctcacatcatctagacaacacaaggcagcttataaaatttcagttattacctcagtacagaagttgcttggcaatttctttctcctctttaacctgcataaactagctgggggcaagtgacctgtggctgatctaagctggtaggaattctcagtaatgggtcatgccaatttacggtttagttctcgggaagttaccaggaaacagaaagtatgaagaacatctcagatttttcaagaaatatctgagtaaagggtgagggaaaaacaggaagtaaggatactagaatgttgggtctctaatcctgtaagagctaagagttgttgcaactgtggagtgggtgcctatgtgtagaaaaccctggattcaacccccaacactacagaaaaggaaaattaagttaaaatgctcttaaacctggaagaaacttgaatgacaagtaggtttaataagccttgggagaaagcaaagctagtaaaagctagtccgtttcaccacagtgatgtgatgtaacacattaggctgaaaaactctgctctctgcagaggacataaactgccacctgtaagctgatttgtaacaaatgaagtcacctgcccaagactgcactcttggggtgtgattcacagctagagagatctcttcttcttcttcttcttcttcttcttcttcttcttcttcttcttcttcttcttcttctcctcctcctcctcctcctcctcctcctcctcctcctcctccttcttctccttctcctccttctcctcctccttcttcttttaaaggtttatttatttattatatgtaaatacactgtagctgtcttcagacactccagaagaatgcacatcagatctcactacagatgttatgagccaccatgtggttgcagggatttgaactcaggaccttcagaagagcagttggtgctcttaaccattgagccatctctccagcccgagagaccacttctgagaaaggttctcagagtgtggtctttccactccagatggactgaaccaagctggcagaagggcttacccagccgcattctacatacctttcatttgatctaagagtaacacttatattatagtccagctttatgatccagtcacgcagtggaaagcctaacatggtacttcatctcctgccatcatggaaatagtaaagcaaagctatttaagtatgtttagctgcatcttcggttgcaaagagatgagacagcacatatttatgttttacccagaatcccaacattgctttcttggtccaaagaaaactattgtaaaccttagttttatgacattgctgaacatctaaatcctttctcctaggccaaagttctttaaagagtataattaatgtcacttaggagactgtctcagccaacacttttttttttttttttctaaaaaggactccagtaatctacatcattacccttaaaccaggtggctttttctacctcatagcttttacatttgcttttcatgccgtgtccaggagcgcagacaagagcctccactgtaaatacactatctactgcacttgagttttagagagctgtgtgtctcaggaaggatcagtccattctcccatttaacttctataacttgtaattaaaaaaaaaaaaaaaattcctggactttgggtttagctcagttgctggagtgcttacccagcatgcacaaggctctgggttcagtccccactgctgaactaattgtagctcatactagtaattccagcattggggaagtggaggcggggaaggcccaaagttaaagagcatcggcattatacagtgagtttgaggccagcctgggctacttactgtctcagaaaaaggtgtctccattacttagctcctgcatgatcagcttgctccacatcagccctaaaggggaggctttagtgtttctctgagtgttgatgaagaacctctgtgatccatgatgctgggttggccatggagaaacaacaatcccagcgagtagcagtaaggaagaagtctgcatcaggtgaggcccgtctagagttctgccaaccttccgtggaatagcaactcctggcatttctcagaaacaatactaaaagccaggcaagtgactcattggtagaggttctaccgagcacacatgagacacgggatttgattgccagttttaaaaggaggtggctcagtgtccctaacttttagctatcacattcaccttgcaaaacagtcctaagaatgattggtgtgggggctggagagatggatcagcagttaagagcgctgactgctctcccagaggtcctgagttcaaatcccagcaaccacatcatggctcacaaccatctgtaatggaatctgacaccctcttctggtgtgtctaaagacaggtatagtgtgctcataaataaaataaatcttttttaaaaaagaagaagaagaagaagaattaatgtgggtagagatcccacttgagactaaagtatgtatggtgtcatccagaagtcgattagagaactctgcttctgagatgaatgaggttagtggttcaaagctcctacaaatgcccatgtccacagtccagcttcgccgtaacacaagaggtgtaacacctgaatttccttcttcctctcggtaaaatgagctgactcaaagttacagctaaagggaatggaaagttcctgagggtgtctgctgacacagacagatgctcctttcaaactgtcattcccagtgcaacagctgggctgatgtgtgggaaacattcttattctccttcttgctgagttttagataagctaaattctgatgctgaacacattgcggctgagagttagaccaattttccttcatatgttaaatccattaaatatgagggtcaagcagtagagtatgactatatgccattaactggtagagacctacaaatgctacctttcatggttccacgttggtctggccaagacaatacggtcatttttaaagtctagagttgatctacacctaaaaatctgggacatgaaaagtaaccaattttccttcttgtatcaggcatagctgttttcctatgtaacctccttccctccctcctctcatccacttctttctccctcccttcatccccccttcattccttccttttctccctactttcctatgggacagggtctctcagtagcccaatctggagtcaaacttctcgtccttctgcttgagtctctcaagggctccataggtataggtatggtaccaccacatccaacttttacactttacctttcagctgctttgttcaaggctaaagtctgttctgatttctatgacacacaattcagagtaagcttttatattatcttctagtgttatagaaataagccaaatgcatctgcaagtatgacagaggcattaagtaggttgggaagaatgcagggcccacttggctttgggttacaatggtaaagtcctttgagtcaggatcagaaatcacaatgaatgtatacactaagccttccaggacccttgctttagggggaggccttaggtgtgctttagttatatcaccattgactttgttgctattgctgtcttcacatcagcagtgtttgcttcccccatcccctccaaaattaaagattataaatgcaacctcaactttgaagtagaaaacaaatgtagagctgacaaacacagttcttccattaatagttattgatatttaaacataattctttcactagtagttaatgatattcaatattgatttctgccaaggcaaaggttgaactatagatagaatctttcagaaaacatatagatagatgatagatagatagatagatagatagatctaaattgaaatgataactaattttacttagtatccaaattgtcttcggaagtataacttgatgcaaaatgtttaattaattgcctgaaaacctgttgagggaataaaattctgatttattgagctgcctggaattataataattaaacattggttgaaattcaaaatcagatgcaactatttattttgtgcatgctaattaccatccacaaaaaaaaattagctgggtatggagatatacagagagagagagagagagagagagagagagagagagagagagaaaatgctcatatagtgccacacacctatggtcccagaactaaggaagcagagacaagaagagcttgagttaaagaacaacctgggtgacagagtgaaatcctgtcttgacaaaataaaagaaatttagagaaaaatgagaatccaacagcaggatttgttccaattgagtggtgtagggaatttacatgggtccaagtaaagtcagtggttgtaatgatggagttgtcctttaaatggctaaaggtgtcaactatgcaaaggtaacatgagaaaagacattgtaggggaaagtaaacaagggaatcatgggaagggcagagtatactctagttactctggtcactctgacaggtgcagagctaagagatcataacgtatcgaatgaaaccatggagtaggacagtgctcatggaagttagggttttcctaagagtatctcttcatttaagcagaaagacatgttgactcaaaacagctaatccgtctaagctagcaagatgagtatgagcaaggattgcttagcagttgacaaaaatcctaccagcaaagtacagcaaaaggtttgcttcatttaatattaaagaacaaaagggaaacaggtttaatgtcctatatttcttttgatttgtttgagacaggttcttgctatgtagctcaggctagctagccaccagttcactgcataatctgagctggatcaaagtcaacaaaccctccagccattgacctcctccactcccaccctccagtgctggaattacaggcatgcattaccacctcctatctgtacattagccttaatgttttaaagtactgtgctctttaccagactgtataaagcctaggaaagtagggtaactaattccctcacctcataggctttactgagttaaaagaagaattccccaatgagtcagaaagcaacaataggtcataatgtggggaacgatacagtgcgtaagagacatctctgaggtcatacacttgagtagactttgagtgacaggttgagacttaagtgggagaagaccatcagggattcaagctgggagagcagcagcagaggcgtggaaggcgtggcacatccatatctgtttggggaaacagaaaagaatgtcttctctagagagccagtaaccatgaatccatatgtctgcgagtgggttaaggactttgaagcacaaatataggtattgagcactgacacttgactaatacaaaatcaggaagactaatccagtaggcacttctttttttgggggggggtggtttttgttttggggttttttttttttttggtttttgttttgttttgtttttgttttttgttttgtttgtttgtttgtttgttttgagacagggtttctctgtgtagccctggctgccctggaacttactctgtcgaactcagaaaaccgcctgcctctgcctcccaagtgctgaggtgaaaggcatgcaccaacactgcccgcagtaggcacttatatataatgtctccatagaagttgacccaataccactagaatcacttagaacttgggttatcattggaattctttgcgaagatggaaagtgcttagcgaatgcacctttcgactttaagcattttaggcatagtagggaatagcatagtatttatgtagaagaggtaacgtacatataccatgaagcagacactcataaggagtaatgtgacaatgaggcatggctgaggaagaacgctggaactcaggaaagtgtaagaagcaggagaaggatgagaagcagcacgacaaccagggacaactgcaaaacaaagcaacaaaacagtaagtcggagccttgctggataagtagatacctgaacaggtgaggatattccaagctacagacaacactctcacaggttctgtaggtacagaacaaatcccatcaaatctcgtcccagcccatctacagtggtgctaacgctcagctcctgatgtgggaactcttctgcagcgtatcggatgcattcgtgctctgtttgaaagtctagatgcagaggcttcctgcaaccagcatctgtggaagcttcatgagttgctgctgtagactactttcttatttctatgagttgctgctgtagactactttcttgctgtagactactttcttacttctatgagttgctgctgtagactactttcttgctgtagactactttcttacttctatgagttgctgctgtagactactttcttgctgtagactactttcttacttctatgagttgctgctgtagactactttcttaagaagactgtcctaacaggaggctaatgctttttgtaactaggtagtgcactgtaaccaaagctagcttgagggaatgggaaggagaaatggttacattttcctgataactgttttcatttaaatctcaggtcaggagtttgcctcatctgaaaatgcctttcttgagattttaggatcagctagcacatttggtactaagatgtacccattgacatgtcctctgtgacattcctggtggttgaaactgattgccagatgcatgtaatgttttcttccggtgtttatgaagctagtgatggatcagaaccttgagttttaagttaactttacagaaaacaccactggtattctttaacaaccctgccttgcacaattcttcctctcagagatcactgccacaaaggtgttccttgagattgtagtatggctacaggagattttacaaaattgttggacagatagtctatacattgtggtagtcttctatcattgttcatttagaattccttgacatagtgctaattttttttccttcctaaatgttgatggcaaagatttttatgctaactagaaacatctcctccaaaccactaagcatcaactttagccagcactttcttgtcttatgcaacaggtacctatgggtaaagaccatgtcttcttcgtcattgtatgcatagcctaatacagtgcttggcacatagtaggtatttaataaacagccagatggccaggtggataagtaactcaagtcactctcatttatgactcgtaattttccccttagctattagaataagtgaaacatttctgaaccctgtcctaactcttgagcaatttataatgagcaatatccacatgctcctatagtttatatctgctcaggtcttaagaaatacagacaaggtgttactaaaattctccagatggtgtggtgttcccaagtcatgggtttaagctctgcatcatctgctggatgcaagcacttggctaataacaattgtactccactgtttccaggctgccattacatacaaagacagcttttcattcttcctttgtttcagcacctacatatgttcatcaaactttcgaatacagatgacccgtcggtcatggctgataattgctttgatttaacataatctctgcccaaatgagaaaaacttaaatgtatttattttgttttgctttgcattttttgagataggagcgggcactatagccaggatagcctgggatttactatgtagcccaaactgaactcctcctggcttagctggtcccaccccacaccagtggagggattgtagccatgagccaccacacccagtgagaaacttatttttgaaaatgtgcttgtgcagctggcttgtgatttaagatgtaatttccactagcctttctaaatgttgacgacattagactgccaactcattactctctgccttgccctcagtgtgtccaagaacatagctggaaaccaagactaggtcatagcctagccagcttcaaaatcacaccatcaaagcaatttttcaaagtttaattatttgattcaaaacgcactgctcggtgattaagctgcttgcttattcagctgaagtccagatcctggcagccatatgagcaactcataaacacctgtaattctagttcccaggtcaatcctgtgtggctcctggcctcccaggcatttgcacatgcgtgttcgaacacacatacattagacacgcaaataagtcataatgaaataagtttaaaaataaccttattaatgaattactttttttttaaacacagagtttctctctgggtgtagttctggatgtgccaggaccaaggtgacctcaaaccaatgctgagattaaaggtgtgtgccaccaccccctggcttgaatctttaatttgtcaggagattgttctcagcaactttacataggcatcagttaaatggtgacggagatgtattggtgtaggctggctatgggcccctttctagatacattcaggtgttctctgtgttactggatcctaagagacttacctaatttcctttgttgggtgctaaaattaggcccagcctcttacactcgatagcaccctaggcatgtgccccatttttgtaatgctccaagttctacctaaatgttaaatattgctctctgatatattaatacatctccaggacatttagttttaaaaatcaaagcacacaccatgccagtgttatatcctaactgtttaaggattagcaactgcctagccttttctcagcgctgatgtttctagattttcaatagttatataagaaacactgaatgggcaagagcaatactgcttcaaataagtcagtgacgtggttatttcagtcagttgctgcctttgacaaaagatgtccttgttttgtttcctaaattgacacttcaaaaatgtcatttcactgataaaataggcattaaaggagacttctttttaaagataagatggatcgaagaatgaagggcgaactatataatggcctttgacttttatcaaagccacatttgggacacagtttatttgaagtttgagggtcactggcatcactgcctgcctagaaagaataaccttgaatctgacatttgagattattagaccttaacattttcattaaaaggttttgtttccagaagattagtcgagtatttaaaataaaagaaactggcagcgttgaatcgctcaaagtagcaagtccacgcagctatcatactacaaagctatctgactctttgaagccttcctgcatgcactcagatttgtcgctgccccaacctcgacaccatcactcatcctcagtactgtctagacaaaatagagtaccgtaaactcactgtaatcctgcttgacctgactctcaacctttcccccagcatcacgagggccagtcctgtatccttactcagatgatataaatactctttattccttgctaagaatttttctttcccaaatagattttctagtttttgcaaattacacctagcttaaacaaaatatacatttttaaatttttttaaaaaggctctttttctttgccagtgttactccatagcaaaggtttaggtaaaagcatcagaaacaagcacacttaattctttcaagccagcttttcccatcaaaattttttcctggtggacctaattaattgcatgtttttacaaaatgttgcttacagaagatgttaccagctaacacagcaactgtagacgttcaccaaatttcagatgtccctcaaagtctctgtagagtttggaagagttccatcacaacctttgaggatctgccttaacttcctagtctacagcattgagcctttttaataaagattggattagggacttaataatagctttcaaaacaagactttggataaagctatagagttcagctaaggagacaaatcatggaattgcactctttgatactaaaagtgcctacataatatgggtgaaatcagttgctactgtggagagacttcaccgaatgcttgcagaaccacctcaggttaccttgaattgatgactttaaaaaggcccacaaagaaaccctgtctaacccaggttttcggtgcatattgggtgccctttgattaaaaggcacagaatctcaagtcctcagaagtgcaaagagcagaggagagtgcttgctatggaggagcattcaggctaatgagcacttgtttgaacactgcatttttcactaaccaaggaaacatccattaaaagtgactcactgagattgttgttcctgtgtgctctaaccagaagcccttttagtttaaaacaaacaggacaaaaaacaaacaaacaaacaaacaacaacaacaaaaaaccccaggactatctagaccatcagtggcctgataggtatcggttgaagcccagcaaggtggctttcttgtcagttcatctcgtgctgggacgatatacttagtagacatccccatggtgctcttgggatcccaagaaggtaacaaacctggtcagaaagaagagtgaactttcaacaaagaaaaagtacctcatcctacctgcttattgtagaaaggcacttagggcaaagtgtgtgtgtgtgtgtgtgtgtgtgtgtgtgtgtgtgtgtgtgtgcttgtctgtgttgagacagggtctctctctgtagactgactgtcttggaactcaccagattgacaaggctggcctcacagccattctcctgcctccttcccagtgatagcttagacaagcctagtttaaatcagggtttttaactattcttttgccctaaagccaagctttcatcatttaaaacatttgaatgcttgaaaggtttataaataatagcctaatataagaggaaaatatgcaacataatttctagctaattgttagtacctagaaaacatacatcttgtagggctttgttctcagtcccctgttagatagtaagactttgatactctgcaattgatggtgactttgaatagcacattttaaaacaatacaggcataagtttagaaaactacagaaatggttttaatgcacacatttaatatttcaaatgtgttaagcactttgggaagtagcaatcccttgatgctatatatgatctaataggccagcagtacaaggtttataagaaaccaatgttttgtgggtagtctttatctaagcaaagctaagacactaatcatgttgtgtgtggcagagcacacctttcccaccacttgggaagcagaggaaggtaggtctctgacaagttccaggctagcctggtctacactagtcacttccatttgaagtgtgctatctagatgagcagggaggaaaagaaatcacatttttctaggatctttaaagctatttggctaatatcatttcaagggtttttattaaaagcaataaataaacaaacccacagcaaataaaattaatatttaagaatggaactgctgaactgtttctagtgatataaccagggtagtgtgtgtgtgtgtgtgtgtgtgtgtgtgtgtgtgtgtgtgtgtaagagacatacagacagacttgattattttgttttgtttaatttagagagagtatcgctatgtagccctgggtggcctggagcgcagagatttgctatctgtcttccaagtgctggattaaaggcacttgctattatgtccagcagataaatttttattgcacaactgcaactctagaataattatactgttagaaggcaacagagtcctctctcacataaatatatattccatttttaactctggagcaaactttttgaaaccatacagaataaagtaatttttaatattcttagaaatttacagtcagaaaagaaagccagtgagctctgtctttatttcctggaaagtcctagttctctgaagcacttccattcacttccctctttcttgttgaaattatgcaaccaatttgcttaaggcgacatagaaattgaatcccggaaggctaatttagatgacgcctattgttttaatgactagaacctcgtaggtatggctctgccctgaaattatctttcctttgaattatctttccacagttagtaattgtgcttatatgccaccttgtatttcatcttatatttagtctgcagtagttgtgtgtgtgtgtgtgtgtgtgtgtgtgtgtgtgtgtgtgtgtgtgtgtggtggtggggtggtggtggttgtttttaaataaccataaacacaatttgaaggcaggtgggttagctatcccaggatatttttggatcatacattctaaaatttcaggaccagaataatatctgtataatactcaagaaacaagtttctatatcaaatcctatagcagaacccaatattaccaggcattttttatctagtgacctcctagtttgtgcactagtcaaggtgtattaaatgagactacacattcttatttcttcagggagagttctggctttttagacagtactttggaagctccctaaccttcagtttgctaggacactagtattaatataacaggattgggtctcaggtccctggttcctctataaacctaacactcagcaaataatagaaagtctcatgttatttttgttttgttttgttttgttttgttgagatgaaatctcttcatttcccaagctgatctctaacttttaggctcaaataatcttgtcttgaccccaacagaagcaggaactgaagggacacaccagtatcatcagcttctagatatttttaaatgacctctttatgtgtctttgtatttaagagcaaaaaaatctgctcaaaacaaaatcagctgaaccattaagaacaatctttaatattaatatttattatttagatgtttaatatttagatatttaatattctgagcacaggaaataacagtaaaccgtagatagattaaaaaaaaaagcattagccattgaagttagcacagtcaccaggattcttggagacaaagcttgatgctttgttggcaaaatcgtatccagattgaatagattgtatcaaggaaatatgggccagtaaggttctcatggtgactgccagccctaaggatagactgagcaccaaaacaaagggcatattctaccagaaaggcaacctagaatctagaggcagcatttcagaattgcagcatttaaaccggtcttgggttgagtctatgcaatcgtaatgctgccttcttcctgaagtctggtctagacatagaaatgtaatcgacacaggagttagtcctagtgactataaacaattgttgcacacaccccagtttgactgctctgcactgatgtgacagggcagctgggtccttcttcctaaaactcttaaaacctcagcatgtgtctgaaacctgagttggagaaaggtgggggccacactcaagggttggctttctggattctgtgaaggcggggctctgccggggaagggaaatctcattggggtttatatcattcagccacaaagaaaccaaatagcaggcagtatttcttgcactggtttgtggaagaggaaaggcttaaggttgtttttcctcttttaaagcatcctggtgtggttacaagatcataattctgttggggtgtgtgactctgcatttataacctaaagtttcaaatatatacacatccttataaatagcatgcttgctttaactcggaacattgcgtagagttttaaggtgactcatggtacttgaatagagagtgagatgtgtttcctaggattgtgtacacacaccctaggagaacaaccagagcgttgagtattgattgtgtctttaggtccacacagatgggcaacactttctttggggttatttccggtgggaacagacaaatacaacttggctagccctgaaaacaaagtgctaagattttttttaaatgtgattttatttaaaaactagctgagagctaggaaaactagctttgataaaagcatctcacctatcttaaagaaggagagtcattgaacacgaaacgcttggcgtgtgtgagaggactgtagcaaatactcctgcttttccccagaaatccaatggtgatgtggctgagtccattcaccacatctgactcttcagttttattttgttgaagttttgaaattgtaattgaatttccctcctttcttcccatatacccaggccactcacgttcatatttatgctcttgtcatcaattgtcattgtgtccatgcacgtattatattcctgaatatatcccgttgagtcggcataatgttacttaatatatatgttttgggggctgatcatttggcacgagacagccactttttatgctcctcactggggaagaccgcttctccagctcccagttttacttggttccctgtagttctttgtgtaggattgcggcctcatgggctgcccccaagcccctgacgtttgacatgtttattggtgcctttttgttcagctcaagtttgactgtcatgttcccgacactttatacgtatagcttctgatgtgactaggagacacaatctccttgattttttttcaactcataatctttctgcccccttttccccagtgtttccagagcctgagatgttgggatgttttgtagatgtatctgtagggactgagctccacaaccctgcactttgattggttgtggttttctttcttttttttttttttttttttggtttttttcgagacagggtttctctgtgtagccctggctgtcctggaactcactttgtagaccaggctggcctcgaactcagaaatcctcctgcctctgcctcccgagtgctgggattaaaggcgtgcaccaccacgccctactggttgtggttttctgtagtagtctcttttgcaaagagccatcttgcaaagttcaaacatactatccatgttaagtttacatgccaaacgtaaagtgtgctttatgtgttcgctatggtgttgtatctgatccatgaaacttctgttcaaatcactgccccaaagccctgtgatagattccagtaatgcacatgtcagtagttacatttttaaaaagtatgcaaacattaaaactcttcatgtaagttgttcaggctttagaaaacttttgttagattgcaggatgaagaagacagggaggaaatatagcatccccatctgataatagaagacggagcttttctgttaaagcttgttgttgttgttgttgttgttgttctaccctgatatggagtttcactttttagcccaggctggcttcaaacttaaaacccttgtctcagtctcccatgaaatagacttgttctatctaaatcaacatttctaaagttggtttatttaactcactcatcctacttttctgagggggtttgtttatttgtttgttgtttgtttgattggttgtttttgtttttgagacagggtttctctgtatcaccttggctatcccgcctcccgagtgctgaggctaacaggcgagagacagaaggcctggcaaatatttttagaaatctccttttcaaatctggttggtacccacttctgctgcagttgctgtggcctagtgttttgaattctatcccagctaccaatgataagtggtatggctaagattgtgttctttgaagaaagcattcaagtgacacaggtagctttgctgtgactggcccagcaacagcgtcacagggtggagaaggaggactcgggggcatcctgacacgttcccatggactctctcgtcaaaaagcattcacattgtgcttcttacgcactagcgactatattagagacccaaagtactaaagtctcatttcacaggggttagagagaaggaagcctgacatttgagccatctcttcactgttcccatcctctccaaaggaactcttccttccctatcccccgcctgagtcaaaggactttaatccattggcttcttcccagaaatgctctggctcaagggacaaacttgctcttcaagttcccagtcacctttgagctgcaaagttcacagtatgcaaggaagagtagtctgtgttaagcaagttcacacctccccggaaagccatgttctcctttctcccagaattacagaattctttcttatagtcctttcctcagaatttgaagaaaccactcggggcttgtcccacgagtgagtttgcatatgtctaaaaggaagacaagagctaataaggaatgacattacttaagatgggtctcagtactatgcccctgagcttcaagatacagtgggtaccatattgagctctcttcctgcctagctccaatatacagtgcaaagggggaacaaaagcatacaggaaaataaatactgccttgcaaaggaaatctgtgcccaagaatcctaaatgcagagctctggtacagcatactattcactagaccgaaccacttgaaatatgcagggtacgtggcccacagcctgggtgtagggacaaccatgagagaactgagcccagtgctaacaacatgacgcaaagacagaggtgatttctgaagctctgattcccataagccaaagtcccaatgccacttccttctctttgtagaattgaattacaggacaaggctggattctagttttcctgtttcacccaagctacaggaggtcatacttgggagaggaagccaagatgcatgcatgctgggcgttttagtttttgtctttgttgttttgttttgttttgttttgttttgttttgttttgttttgttgagacaaggccttactatatagctcaggttgactttaaactcaaagtgatctatctcaactggccaagtgctaggataacaggcacctggctgtagatctactttctaacattgaacttaagcctcatgtccacaagccagagggatggtccacccctgctttctttcctagaatctcagtctgtagagcattccttcttgctaggttttttttttttattcatataatttcattatcagtatccaggtttcccaaagtagttagcaaaactacttgttctggtttttccctgctaatgcagacaagaggttgagtgtgcaaaacaacaaccagggtactgaacaatcaacaaaaattacagcagaaaactaaccataaacttgagagtttggactaagctgagaatatgtttcagacactccaggtgagttgggtggagtgcctagtctagagaatgggccgtaatatgggtacacaaagctcctttaaaagttaacacccccgacccccaaacaccaattctgatgattacttccttcagctcctaagggagatgtcactaatacaaaattgtttttaaaatgaaaatggttcagggtgggcacaaagtcagaaaaagttgaaatgagtcaaaaacattaaaagttactaatttgaaaagtcagaggactttttatcatgcagagagagagaagacaaaaggtactacatagtagagagtgtactgaactaagaactaaatttaaagtctttgatctgtgagatgtgtctcagacctagccaaaacagccagatccaaaggccaatttgaccaaatatgatttctgctacttgggcgggggtgggggtgggggatgggaaagactccagtgacagtgtagaaggagatggtataaaaccctcaccctttttctgctttggatcagagaagactataaaacacttaactaagttgttttttttttttttttccttttttcttgctatgcctactaaatgaattggtctggtctggtctggtctggtctggtctggtctggtctggtctggtctggtctggtctggtctggtttggtttggttccgttcggttcagtctggttcggtttggtctggtttagtggtgcagggggtggaccctagggaccactagcagcatcctctggctaagccacattacacctctagtcccagaagactttcttggtagagcctccatgtaatgagctttgcatagtctaccttaaaaaaacaaatttaaaagcagacatacatcctctctaggaataggccaatcgtgtctcattctcggaactggatttttagtggtaccagctgcatcccagccagctttcaatgcttatgttttcttgcccccaggttcctaattattaaaaagaaaaaagaaaagagaaaccagctaagtgggaatgactcctgtccctgtatcccacgaggacacccagagtgaggcactaggtggctagctggcactcgggcttaccctctcaccctttcacccagctaaagtgcttctgtccgtgttgtatgttactgaccattgaaacacctgctgtgggaaacccgtgttgacgaccatgcaatataacacacagcgtttggacaccaggctgtacttaaccatgaacagcatttgttaaacattggctggttttcttttctttcttctttgttttgttttgttttttaattttatttactagtttttatagagtcctatatacctctgactgttctggtattcatcatgtagcccaggatgatcccaaactcacagtcatccttctgcctcagtttaaaaaatacagatccctgggaagatgagactttgaatgttaaactctcacctgaaatgtctgctttcctctatgactgtctggggaactctttagtttgacttgcttctaaatatcggaaaaagcctcttagttcaggactttatattctgactctgtcttgtaccattagctctcccagtgtatgctcactgccaatttataacctgtacagatgcctagtgtatatcactcaggtatgatacagtagtcaatatttataagaatgtcttaccaggattctttttgagtgtacattaacatagtctagttacccaaatcaacaagatgcaaaaatcttcttttgtttgtgtgtgtgtgtgtgtgtgtgtgtgtgtgtgtatgtgtgtgtgtgtgtgtgtgtgtgtgtgtgtgtgtggtgtggttgcatgtgtgtcaaacagtgtgtggtgggcatcaatgatcaactcaatggagtcattttcccccttccatttttctgtgggttccatctattggatttaggtcatcaggttttctgagtaaccacctttcgctgagccatctttctgatccacaaaaatcttactgtctgacctggcccttgcagaatagactgtcacagtagaatcataaagacagaagcagttagggaggaagtcaacaagtgtgagactttagagccccatcacaatgtgttttctcagaggttacttcaaagacagtggcacaggtatttgcggccactggtcctgaggtctggcttacaggttaatatttcacatgtcctgtcctccagctgatcacgcacagagaagcacggtccctggccaagacaaagtgctgggcactcaaagcaaagatgcttgaagtgctttcttaagtctcctgtacccagctttactccatggagttctctgtgagaactgtaactgatatgttaaaaagtccttgggattgtgaacttttgaaaatacaggttaaaggatggggatttgggaacagcaaatgacaagagaaaaccacattggaaggagaaaaacaaattcagttctgacctcaacagcttatcatggttatgttctgtgttgttcagtgcatttattattcctaaaatagaagcaccttttatatggttttcaggataaaggttttaggatcttggtatatgccatgccccgatgtccacaatgggttgattcgaggatcctctccctcccccacagttctaaacattctttgatgttcaaaatcctacatacatggtttgcttcaagccatctgctatgtttctttaatgtatttcaaatcatctatagagtattaataatactctcttaataatgcaaatgttaggcaaatagttttatactattatatttagggaaaagtaattttttaaaatatctgtatatgttcagtacaggtgattttcttctggctatttttgatcagctttttttttaattcacagatgtagagcatttgaatagggatggctgactatattagatgtttataccatattaccctaaactttgaaataagattctctactatgtgtggaaaggggctactgtcaagtccttaactcaaagttattctagcatcttgagactgagcaaattcctgattgttctgtataattggagtaagagataggttagaggtgcaggtcagaggacctgtaaaattgtgtcatgatgttgcttcagaaccttccagacattaaggagtaccactgagacaccagttcaagtccttctgatggaaaggaaaagcaaacaattttaaggtgtcagttagggtttttttttcccccttataaagcctagactaattattgtccactgtgctagcttttccaggttgcaaaatgctatgagtcagtttaaggacaagacaaactatagctgacttttttattcatgcagacgacatagtcattcaaagatgactcatgcatccttccgttgtgcatctctctgagcttctcagaaaccaggaaagatgttgcaagctccaaaatcatgggactccagtgctgcaagggggccattttcacgttacttcagggagccctgtctggagtccaaaagcctaacttagatgccttcacgcgagtggagctgatcttactgacttgccaagcttccttcttaccgttttctgttttacacaatgccttaaggagcccgggatagagactaacttttgattcttcaggtttttttcctgcagatatgtgctcttatttcccttttctatcttctaatgaaggaaacatactgttctagaaaactgggagggggggagaccctctacttagagatgacccttgtatatatcttggggaatgcatctgtaatccttttcttttactgaccactatgtgtagttcctagataatttcttccttctttaaacataagaaccatagaatcatacagcaaatgaaagactatataaatccattttctttcagaagtccataacaaagtttttcctccctattttctcttcgggtactataactatccctacacagtaaagggtatatgatcaaaggaagccaaacacctttagaacaataacaatgtcatcaaagctgtgccttatctaagcgtggtggcacaagccactcatcacttgtgtagctgaacctggatggtgacagtttcaaagcccacagcaagcttgaagccagcctgagagacttagtgaaactttgactcaaaaatactacagtaaaaaggacaagggagcaaagacagagtatcagcagaggactttcctggagtgtggagggttaatctttggtgtttcctctacacaaagagttgtctttggtgtctgaagcacaggaattgtttataaaaacacatggccaagtaattctactcagcttctgccctttctaatttgacccaggaagccaacccttgatatggacactggccttgagttatatcctggtatgacttgtatgttatgactaaatccacatgccaagccaccaactgctccctcttaggtctatcagagtgctttgtggaacttctcagatttctttaaaatagtaaaacgttggagtcaaaattgcaaaattgagtaagctaaatctttaaaaaacaatgttacataggtaagtctttccttgtcagaaataatatcctgttggaggatgtggcagtgggcttctgagatgggcaataaactctgatatctgacagtttctcagcctataatcctacctagtttggatctctcttactttggctatccacatgatcactgttgaagtcaacatcatgctaacctgagcaaggcagattggaaaggataacccacaggtactgcaggtgcctcccataaacagaataatatgcagtctattctggagagcatccttagggctcctgttcttggcctaggaaattaaaagtatattaaatacagatacacatattaaaaaactgatatatttacactgctccaacagtccaggttgccatccacatgactggctcccacacgccagatgaatcttcccctttcaaggagattctggtcctgaggatttgacagacaagcataaagttgatctatgggagaacttgtgatcagcatgggtatttagaagggagaagggagagcttcagagaagacctacccatcttcagggacaaataggtacctaaggatgaaggacagaggcacctcagcaaatgggaaaatgtaaggacataaagcaaaggtcagtcacaaagaaacagtgagcttggagcttgcatccacatgtgaaagagtaggggatgaagatgatcaggactaaaatattcaagagcgttatataggatgcaaaaatagcaaatctttgcttaaataaaaagggggactcccacaggagattttcaaaccttttattttaaattcattttccttaagatttatttattattatacgtaaatacactgtagctgtcttcagacgcaccagaagaaggtgtcagatctcattacgggtggttgtgagccaccatgtgattgctcagatttgaactcaggacctttgaaagagcagtcagtgctcttaactgctgagccatctcgccagccccccccccttttttttaaatttagaaaatgtgtcatttagggtgacaaaaaaacaaaacaaaacaaacaaacaaacaaacaaaaacaatggcaatggaatccagtaaacataagccaggatgcaaagcttcaagaaaggcatagacatgtgatgcatagggtaggactactcaaatggatggaaagcaaagcaattgggtgtgtcaggagaccatcagcaaagtgaaaggagagttaagacaaacaggcctttgagggtggtagaaaatgggaaaaagacacaaagtagcaatcttttccttttacaagcttattcttgaaagaatcaagagaaaataatcctaaaatggtcaggttacactaaagtattttctttatttataagatgatgtctgagcaaggttgggggagagaagggggccatgtgggagaatgagcactggtgctccttagaagaggaacttagtttcacccctgcttagtttgtaatgaatcctcagagatgaagaaaagacctttaagatttgaaggtcatagatataactaaaagaatcatctctcatgtcaccaagaatctcagagaccaatgaaagcgcacaaaaaataggtggcatatgcactattctggttgcttcatcaaattattaaaaatgggtgagtggcttaatgcaggagaaagtgattgccacagtccttctgaaggcacgaagtccaaaatcaggacgtgacatacttggctgcttatgggagcttggagatagagtccactctgagtttgtgcgcctagcttcaggtgggcagtagctgtgacttggctttccttggttgacagacacatcaaatccagcccttcttgttcccacctgctttgtgagtctgtccctcagacctctccttaccttttacagtaggggcgtgagtcattggatttcaatcccttcccaaattcaggacaatctaagactcagggaactatgtcttagacagacatttatggaccatcacatgtatacaataaaacaccttctgtaacaagaatgtgatttctaagataagattcatatgactctgagccatatgtgtaggatagaagctggttctgctgcttgacaagtagtgcaatctctctgccttgatcctgtaatcctggggtgttgaggatttttaagagttaacaagaaaaattaaagacttttttttttttaaccttccatgactacaaaacagcaggtatttcccgtgtggtaggtttggtccacagtgttgccacacacgggggacatagtacaggatgaagaaggcttctgcagtaagggagtgtcccggaccaaagagagtgttacagtaagcttctaaaccaaatggagtctcttctttccctttggtctacagtttcagattgttcgccctttcaagctcctctccatcgtggagaagcagaaaaccaagtggtagaagaacctttagaaccttagtttacccctgtatgctttgcaatgggctggttttctctactgcaatacacagggaggcccgataaagagcctgtgaagctcatgagtttggaagacactcgtgctgaataataccataaagacatttattaatgtacaccatgaattgtacaagagacacccataaattctcagataaacaagcatattgatgggaagaaatggaagtcatttgtttttattactgatttttcaaatagcatctgaaacaatgtgtttcattatgacagctttttaatatagatcgttacactttgcttgtagtttctcccactaccttcccccacccaaacttccgtaagctacgccccttcctcttttagctattcctctttatgttttcatgccatacatgcatgatatatttgacctagacctatatatatttaaagctagaccccacgtgtcttagtcagggtttctattcctgcacaaacatcatgaccaagaagcaagttggggaggaaagggtttattcggcttacacttccatactgctattcttcaccaaaggaagtcaggactggaactcaagcaggtcaggaagcaggagctgatgcagaggccatggagggatgttctttattggcttgcttcccctggcttgctcagcctgctctcttatagaacccaggactaccagcccagagatggaaccacccacaaggggcctttcccccttgatcactaattgagaaaatgccttacagttggatctcatggaggcatttcccaactgaagctcctttctctgtgataactccagctgtgtcaagttgacacaaaactagccagtacaccacgtaagaaagaaatatttgatattttttcttttatcccctcatgtttccttctgttgctttcccctctctttctttcccaaagaagtcacattctgctaatatgtcatccacatatgagagagaacgggcaatgattatctttctgagtctgacttaacgttgcttatcaggttgattcccaacactactgtcccctccacacacacagtcatggaggtattaaaatcacagtgcttatacagcacttgaggtcatatgtagaatcctaataatagatccttagatctatcagtaaagtagtaaagagttctgctcttttctactttgaggggtgctggggatacaagccgggtgcgagtccttctttatgcccctagagcacagttgcctaatcttagcaattttgtgcataaggaaactccaaacatccactttcaaacatcagtcacagtcttatcaagctcaggaggtatgcttctattttgctatgaaacctaaccagtttctgattcctatctttgattgtagattcttatgccaaagttctaacacaagttgctgagctaggtaatcattaaatgctaccagaaatcaagcacctgatgaaaagtttaccaaacaatcctttcccctctgggagcttcaaagggaacaaccctgctttccaagttcccatctaacagggaagggttggcaagtgcgtgcagccagccagcatataccaacagcaaactggccctgtagacatgcgcggtcagagtttaggtttgttacatttttacatcacgatccctctcctctaccctcaggtgtactttgtgggttctgtccttttgagacctgcccgtcggggattggctggtatcagtgactgtctactgctggattttctgcttgccttcccgtcatgtctaacgaagtagaaacaagcacaaccaatggccagcctgaccaacaggctgccccgaaagcgccatcaaagaaggagaagaagaaaggtatgggaaaacagctcttgtctgttgtctggctaccacaggagcttagtctcaacttctaactttttttctttttggcacaagtgattgctttgcctcaggtagacttgtttctgcatctttggttgtaccaactcaggtccggttaggaaaatttcatagcattttgttcttcctttctttctttctttctttctttctttctttctttctttctttctttctttctttctttctttctttctttctttcttccttccttccttccttccttccttccttcctttctttctttctttctttctttctttttttcaagacagggttcctctgtgtagccctggctgtcctggaactcactttgtagaccacgctgtccttgaactcagaaatccgcctgcctctgcctcccaagtgctgggattaaaagtgtgcaccactacccccgggtttttttctttttttctttctttttttttttttttgatcatatgtctttctaatagttatttagtttaaacatatgattagttgtacaaccacaactattgtgtaattgtctctccataatttatttaccattttgccttacaggcatccccatttttgagaaatcaaatttttgactttattagatagttttggttttaagtaccgagagatagtattcaagtcttagcctgccagagctggagaagatgtcatgacctttctcttagctttggccagtccttcagctctaggtacgagactgcacagcctgtttgggagcccagatgtaaatagaaagaaggaataatttccagtcacagccatgagaatttactgccagttcacttttgtttccttggtgattcagaatattagaaaattgtttgatggcttaattttttttttcttttactaagcagaatatgccatttttctaaaattcattcaaaataaagctttgatgaagaatattctcaatgcccagttcatgaaataattcttatgtatttctcatatgcattttgtgtcttgaagtgtattttgtttgcttttatttttttctcctctcaatgctacacttgatattatgaaacatgattttgctcaaaagaataagactggaaatcatgacttacagtcagtattcaatttttgggggaaggggggtaccgagcacatgtgatcgtacctaagggtgacatttaaatataagctgtatcgtgcacttcttttttactttgtaggttctgaaaagacagacgagtacttgttggccaggttcaaaggtgatggtgtaaaatacaaggccaagctaatcggtattgatgatgtgcctgatgctcgaggagacaaaatgagtcaggattctatgatgaaactcaaggtaagaggaagaaatcattggccgtctgaaccaagcgtctgaaggagggaattctattagcgctcactgactcatgtctatgtgattggaaacgattctctattcacattgattctattcacatattgagcctccagtgttctcttttcagagaagccagggctagtctgacttttttgagtcctgttctagaatcaagaatatcccatcaaggatagcaagagtctgagaaccttgtcatgtgggcaaactcagaacttggatgagcaaagccccatccctaaattttccaccatgaaatgattttaacagtggtgggcagttgtgagtgatcagtattctgcatggaagacacaaactagggactaggatgttgggcaccatggagaaggttcttgcctttcaagagtaaagaccagaacttagatcaccagcacctacacaaatgtgacagtccatctgcatccccgtatctagaggcagagacaatatccccatgacaagctggattagagtgatctttgtgctcaaatgagagaccctacctcagtatagaaagtagagaacaataaagaaagatatgtagtatcatccccagcctccacacacaagtataccatacacatatatgtattccaaagtaataaaaattaaataaaaattgtaaaagaagtcacagagtgcctattgactgagaaagtctttagatgaaatacaggactccacatgtgaatttatatgtgtgcatgtgtgcacctgagtaaggacagaggttgacaatgaatgcctgccttaattatcctttatcttactttttgagacagagtagctcatggaactcgaagcttactacagattggctgcccagcaaggtctggggatactgcagtctctgcctccccagcactgagattcctggtgtataccacagcaagcaacttttatgtgtgttcttgggggatcaaacttgagtgctcttgcttgtatgacaaatgctttaccaactgagccatctctccaggtcccgtgcttcaggatttaaatttctgccctatgctaccatgtggacctaattaaacagtacaggttttaggtgagccagcttcagtgtgtgtgtgtgtgttagagatattaaatttatgagtgtgtacatattaggcaagcacactttcactaagctacattcctatccctacaagaaatacatatatcttctacaccttccaattacccttgatgaaaggtacttaagcctttcccagatgccatccaagctgaaagcaaagcagtttgtctttctaagttctgccatcagaagtattatagaacactttaaaatacatttcttttattttcccaatctcaccagggaatggcagcagctggtcgctctcagggacaacacaagcaaagaatctgggtcaacatttccttgtctggcataaaaatcattgatgagaaaactggggtaagaatgtgtacttgctcgccagtgggtacccacctgatctgactgtggttgatttctagtgggaaactgccttttcttcctcaaagtatgaaaaagaaaactaccatgttctacttctccaaaatagacaataaaaacagaggcgtcaaggtatccttttttgaactttatttcctatgaaacacatgactgagaccctaaacatacgtatgcttctactgttgcatagtagttgttttgatcctcagactacactaggttaatcttcacctcgcttattttaatgtgttgatcatgtgtgaatttggcagcttagttcaaaacctttagaagacttttcatctctctttccctgtccttcccaaccagctgttgttctaggttcttccttccttccttccttccttccttccttccttccttccttcctttctttctttctttctttctttctttctttctttctttctttctttctttctcttttacttgtggtagttattgttctgtcacaagaatcagtgttgcttcttcactgtttactttactctgattagtacacaaaagctatagtatttcaaatcttcggtggcacttttccattattctatagaacatggtaggattcattcacttaaagtgtcattagtaactctgctattcatagcaagacactatgacaagattcctttccaacccttccaagagatacccattatctaatatgcaaaatatctgcaagatttaggaccagggcaccatggtaactgtccattcagtttgctggtccttaggtcctcagatattattgtctttatcaatatccttcagctcttgataactttttatctcaagtcctccagagaatggtaacaggtttctctcataagcattattcctttcttcttcttcaaatatgtcccctttagtaagttaattttgttttttttgggggggttgtttgtttgtttgtttgtttgttttatttgttttggtttttttggtttttcaggacagggtttctttgtgtaaacctggctgtcctggaactcactttgtagaccaggctggcctcgaactcagaaatctgcctgcctctgcctcccaaatgctgggattaaaggcatgagccaccacgcccggcttgtaagttaattttgatatacacataaaatgataaatatagattcataacatctataagaaaccatataactataatttgctttgcaaaaatcttcatttgacagctctaaatgtcttgtagactaaagggtggttgtcaaatggaactcagtgcttcagatatagcacatgactactttttcagtgatcataggtatttggaaataaaattcaagacacactttgccacctacagatatctttgaagagttaaaccctgatgtgttctggaaagagagagggtgtttggggagagaggaaattaaccataagagtctctgtcacatttgacttcttagaacaaggtccttctaggacaggttagatacacttatggtggcgtttcacgcctctaggatttactgggtccagtcattttaacgaaaatacatgatggatctttggttgttgtctaagggccctatgggcaatccagaagcttacttaggctgttcatttaagtttgtcatttacttaggaagataggccaactgaagttttgtttcattttggtttttcttcttgtcattcttttattgcggggaatttgctcaggtggttggtcagttggtcagctgcttttgagatactatcttgttgtgttgcctgagctggtcttggagtcataatggccctgcctcaaattcccagggactctaaatgacacagcacacccagctcaactcgggttggttcaaggggctgtctgctccctcttaactctcaccaaccattgaagctcccctcagtccttccttgtaggtggcattttatcttttggatagagagagagagtcaagtacttatatttttagaaaggatgtttttctacttttgttttctatttatccttccttttggagccttttctagcaaaaagaaatctagatgtagccttgaacccaagactaaaaagtctttattcaaaagctttaaactcaccgggcattggtggagcacgcctttaatcccagcactcaggaggcagaggcaggtggatttctgagtctgaggccagcctggtctacagagtgaatgccaggacagccagggctacacagagaaaccctgtcttgaaaaaacaaccaaccaaccaaaagctttaaactctttgtatttcccttcacatttgtttctgatcgccaactgtgatagccaacaagtccattctttatttttcactattgctcttctatgttcccttttaaggtaattgaacatgaacatccagtaaataagatttccttcattgctcgtgatgtgacagacaacagagcatttggttatgtgtgtggaggtgaaggccagcatcaattttttgctataaaaacagggcaacaggtaagctctaaagcataatacacctgagaactggttctctgttgagagtagaagtgtttgggtttttttgttttgtttttatttttgtatttgttttttgagacaggctttctctgtatagccctgactgtcctggaattcactctgtagacttggcaggcttcaaactcagaaatctgcctgcctcagcctcccaagttctgggattaaaggcatgcaccaccactgcccagcacaagtgtttattattcaatgagatgtactggaaacatttcattaggccaacactagatctttaggccaatcatcattcagagaagaacttttgcctcagaatctatttaaaatgttactgatagtcatgtgtgtggcaaaagagttgtgagaatagactttctattaatgctactaatgaacttagaacagtattgagttattcccagaaatcttaaaggaactcccaaaatcgacatggtacctcttgttttgtctgaatagttgaagaaaaattctattgcggtaactatgttcttaacatcaatgaaacatttattaaccctgtgtcctttatttatctgagggtggtagccctctataaatcagagaagggttgtaagcaatctcaagtagaaattaaaaaatatatattaatgagaactgaatatgggcaaggaaagaagatggaaacaaaatcttgttgatgctgtctattgtttcaggctgaaccattagtcgtcgatcttaaagacctttttcaagttatctataatgtaaagaaaaaggaagaagataagaaaaaggcaagtagtgcttgataggcgtactggattcactggattgacaactactcagggcatgtttagtgttgcatggcatgtctgaagagttcattttctctccttccaagtggaaaattgtctgctgttcttagatggacatggtaggactttgtgttaggaaatctgatttgctgtctctgactccttacaacatttggggtcgttaaaggacttgacagagcaactgtgtttattaggatttctattgttgtgaagagatgtcatgagcactgcagctcttaaaaaaaaaaaaaagttaattggtgctggcttacagtttcagaggtttagtccattaccagcatggcgggaaacacagtactgtgcggcagacattttgattggcaggcagcatcaggagactgtcacactggccagaacttgatcatatgagatctcaaagcccacctccagtgacacacatcttctaagaagaccacacctactccaccaaaccacacctactagtagtgctactcctactaggacaggccaagcattcatacacatgagtctatgggggccattcctatatcaaagcaccacagcaacctagttaattctagaaagtgttcaaatccagtatctatgtgagaggaggggggagaaacacagagtgaagtacataaggttttgttgctcttacctatgcatcagggtgtgtttgtttctttgtcaactctcttcccaagctcattgaatctgcatctttccttttaggttgaagaagccaacaaagcagaagaggtaaaactgcctcttacttctgtgatgagtgtgatgtgtagaggccatgtttgctatctgcaagagcactttcctctcatgacttaatcctcggggctaggggccagttttttcacagacaataaatagttacattattagagaccaagtcataacagctcaatgggggtaatcaggcagggaaataaattctatggggctacttcagcgaccaaaccctttaatatttgccttttattttcagaatggaagtgaggccctaatgacccttgatgatcaagctaacaaattgaagctggtatgttggtgatgttttctgattcttactcgtttgaacatgggttttctgtagatgttgctaatactggatctatattgaatccataggaaaattcaattgggatgctgtttttatgtgatatttctattagtctataacatagtattctcagtaggtcaccggaatctaatacagtacttctttaaggtgtcaaacagggctatatgcctgggaacaagcctacactgacacaagcagcctgatatcaaatctgtatgaaatcaactacaatccaatcgtgacaactgttttctatactttaggacacaaacaattacagtgatagacaaagtaactgtctttagtagacacatctgaatctaatccaaatacttttttaagggtgttgaccagatggatttgtttggggacatgtctacacctcctgacctaaatagtccaacagtaagtgtttcgtttttaaatttgcaatgtaattgaaataacacctatactccaaatttacaattaaccagagagcttgagcatatcatggaaacttggaatgtcttgacttttattcatgaaatagaagtgattactagaaaaataattgaatcttaagtggccataggaacctattattactaattcagatatattagtatagaggttaaatctgtgctactatacagtcaataaaatccttcttggtaataacttgggatcagaaggaagagctgaattaaattcttggcataagtcaatttgaaggaagtatgcttattaaatgttaaatcctaaattgtcttagctttttcatttttttctgctttcctttttttctaatttagcagtatgagtttgacattaatagttaactaagattcatttgatgactaacaaatgcctttgttttagaaaattgcccatcattatagaacattatgatatagtaaacctactcatcgatgaatctgtgacttattcttcagatcttctataagacagacctcagacagaaatatttatgtcattttgaatgacttccatcaacttctactatttatttcctagtttcctgaacacctgctattggcaaggcatagcagcaatcaagacacacatgggtcttatcatcaaccattctggctaacagggagtgtgctgactagtgacagagccaactaaatgatgctaattacagtatgttcacctagagtgcagattcagatactgcttctaaagaaggaagttcctagactcgaggatgacaaggcaataactagatgagcaaagacttagtacttattcaataatggggagaggattagtacatatacaataatgggggagagaattagtacatatagaataatgggatatggctggctaagacttccacatcaagtcttcgtgatgtgcaaaagatctcaggatctgaagtgagtgagagaaagagagagagagagagagagagagagagagactgggaaagattctccctccccagagtgctgcagagaagtccagcaggcagaatctaactgcataagcccaacagtcggccaaagcatggactgtgtgcattctcctctgtatacctatgtgggaattgcactgtgcggtgccatctcaaagtccttgcagagcctacaatagaggagttagaatgaccggatagtctttcaaatagtgagtccttcctgactcactcgtccgtgggatctttcacttttttatagtgcttcttcactgttttcagggcaagacctttgatgggctaggctagctgatcgtagttctgggctgttttagactcatcagcagtcttgacaattcttttattagtagtagcttcctccttggaggaaatcaatatctgtgggagtctacttcctaaatgtcactctgaaatgggcactccaagagagaggaaggtactccatacatgagtggaatttcagaggaagaagcaagaaggcgctgattgcttaattggcttttgtgcacttctgaggcattctggcagtgaaaaacatctgggagaagccttagttttatattccattccttgcaaactaaaaatgtttttaatttgtagaaactcaagttttagtttaagaaataagttaaaataatacatttaatcaaagtaggtaatctctggtaagttgttgctgttgttgttgttgtcgttgttgttgttgtttttagctcatggggctaattatgtgttggttagatttttccaacgtgttctctcacattgcctccatatgcagaggtcacaaaatagatgttcctctgactggtaaaactagcatgctctagatttttttttttcaattcttataacaactgctctggaaaatgtgaagcctaggaggaataaaaaaatctaagttccttagactccctcagttatcccgagcggctgtaccttctccaaaattgatgaacagaactttatgcacttcaaataatgtattggcatcccttagaacataaccttttgtaaaatgatggaagcattgtgtttcatgctatttaagaagtaaagagaaagggagagaagacgacacagagacacaaagacaggcgaagagtgaaggagggaaagcagaaaggtaggggtgtgtgatgaccttgaactttaaaaacctgaccacttcaaagactacaggaaatgatccagcatcacagagagtaaacatgacgtgagaggattagattaaggtaaaaagtttaaacagtatatctatatacatgtgtatatagatacccccataacatggcatggggtaaacactggtataaaagaaatagaagtatcaataagaaaagcatagagaaagatctgaatttgaactgggtgattgaagtatacagggcacaatgtagtatctagggtaaaagcaagtggggtcctaccatgtaagcagtctgaaaaccgatctaaagaagctgattttaatgcacataaagaatagcagaaagccaacagtggggttgaggcctggcttggtaaccatttccgggaagctagctaccctgctcacactcccttgctgaagtgacttgcttcactttcacagctgtctgaaggtgctcggtggtagccaagagtaccaatggtccagaccgtccaacgaagccctgatgaagctctgaccacaggagcagactaagagtctcctggccatccactctagtcttttaggtagacttacacttggatcaacaacaaccctcacctgaggagagccttatacattttgcttgtagggtgactgttcagaagtctaacattgtgactcctgtttggtgtcctaagaacaacttctgaagtgtctggaaaggagaactctgccaactgagaacacccaactgtgctaactgagaggtggctcaaaacaaacaaattctgaaatcaagcttcccaaatgcatcttaccccaccttttgattgcttaaaatcccctcattaagaagtctcccattcatttgtttgattaaaagtttttccatttaagctctttcttgtgatgaattcttctagttgcaaaatgaaaaccagcctttaaaaaaaaaaaaaaaaagaaagaaagaaagaaagaaggaaagaaaaagaaaagagaaaaattgattttatattttgcagcaaagaaagtaaaattgattaaaaagagagactatagtttgggcctgattttgttgcctcttctatggtcacaaaagagaaatggaacattttctttgtttaaaagacgtttgaagtccctttgtcctcattagtttaaaaggttctgatttctttaaagttgtgcttgtcccagtgatcaaaatagtgctccacccaggttaattctagatgtctacttaagcttccttcccagctggacactgtttattgtttaaaatctatggctgatatagttaagtatttaatgaatcaaagtcaatcgaaaaggtctttcccaggctaaatcgtaattagctatgaattggaataaaaacacgccaaattgattaaattggtagctttgatgctaacaattttcataagacaagtgaagagcccaaacaattaccatctatatttttctcatataatagagaagaaatggaattagtatagttatgcatttcacatgctttgaagatcccaccctaaaacccatattttttcttagtttattaggtgactttaatgctaaataggtaagaccactgccacaactgagctatgtattaaaattatttacaacaacatgaggttagtgtgtgattgattagatgtgatccctattttgactgtcatgttcaaaaggtatgtccaagaccagatgaagatggtaaacatgagaggtccaatttagctagtaccgttagtaaggtctttgtctgttcaaagagtcatacctacagatcaacataaaaagggagaatcttgttttcccccagaggaaggaaagacacttgactttaaacttcatcccaaccataactagagttttgacatataattcagtggtagaatgtttaactagtatattcaaagccctgagttcagttcctagcactgtacacatacacatatgatgcacatatgagcattaaccattgaatttgctcacttaaagaagtaattagttagagacttctagaagtacaacccaggactggtgactatgtttctcagataggaagccgggccaggtttctgaagtcagctcatctgtccaaacagtatattcaaaccatttagagtaaatcttaattaattcaaagatatcagttggaccaatgcagataatgaacccaaaccatttgaatgtatgaactaaagagaatgtatttgtttttaacacaatttcatcaaaggaaaggcaaccccatgggaacttaggtagggagttgatgggagatggtaatagtcccaaattctaataggaaccctggtagtccttgtcatattgatgtagttttctcatttggattataacatggactaacactgtctctctctttctctctcttttttcccccaaatgtgctaggaaagcaaagatatcctgttagtggatctaaactctgaaatcgacaccaatcagaactctttaagagaaaatccattcttaacaaatggagtcacctcctgttctctccctcgaccaaagcctcaggcatccttcttgcctgagaacgccttttctgccaatctcaacttctttcccacccctaaccctgatcctttccgtgatgatccctttgcacagccagaccaatcggcaccctcttcgtttgattctctcacatctccagatcagaagaaagcgagtctgagtagctcgtctactccacagagtaaagggcccctgaacggtgatactgattactttggtcagcaatttgaccagctctctaaccggactggcaaaccggaagctcagggaggcccgtggccctacccaagttcgcagacccagcaagcagtgagaactcaaaatggggtatctgaaagagaacagaacggcttccatatcaaatcttccccgaacccttttgtgggaagccctcccaaaggactatcggtaccgaatggcgtaaagcaggacttggaaagttctgtccagtcctcagcacatgactccatagccattatcccacctccacaaagtaccaaaccaggaagaggcagaaggactgctaaggtgaattgtcttttccgcatatccattagcagagtgcatgctcgttaccaaagggtggtgtgacgcaagcgctcttccttgctgcttttttagtttcctgtgtggctgtgacgtagaaagtgggatgaggcacatcggtccttcaggaaaatgcccctctagccaacgttcttcctaagcttcccagctgtgtttgccacatctgctttccgtttgcatgtcttgtcacttaatactaaactaaacacaagttgttgttgttttttttttccattgttaatgctgctatgcttctgttcctctggtaagtttaattgtcatgttttgggatgggagggcgagagttcttgtgatgattcccttggtcctgcccccacactaacgccacgtcccgcacacccctcatcgctgacgtccatggtggtggtgaaaaactctcaagtctgtctcctctcttaaatgtaaatgtcgattgagtaacccattgacttagaaacttacaagaccactattaccaacttcattcaaaagcgactccaagtgcagcgtctgtaggagatttttttttaaaagcactcataggaatgtgcagattgacctaataacgaaggcagtgttgtctctgtccaagctaatcaaatagaaggattgtaattatttaggaagcttacattgcgctttctttcccagcttcacgttttttagccaatacggagaccagactgacacaaaaggataaaatgagaaaagtagatttcattttgcaagtccaagatggtatccacttctctacccactgaagccatgtgtccttatccctctcgcccccaacccccacctcacctttggtctgttatttacttcgatagaagtaatcacttgccagtaataataggaggttttcctttccgtggtggttagctttgggtaaacagtggaagacaggcagaagctgtgttccctcctcctgaataactcttctccctccttctccattttgtcagtcttcagcaaacgacttgcttgcttcagacatctttgcctcagaacctccaggccagatgtcccccacaggacaacctgcagtcccgcagtcgaactttctggatctcttcaaaggcaatgctcctgccccagtggggccccttgtaggtctaggtatgttcctcgagttggaattaaacgtgatgctgttaccgtcacccataatgataatgcaggggaggaaggcacttcctatgttgggtgggcaaaagtgggccatgtcaagcaacgctcctcgtgctgacccctgcacagcccacacccctgtgagagtcctgccttgtaggtgaaattcagctctctgagctgccacgtggattgcatgtccctgaacagctagctggcagtggctttcagaggacagttttgtaaaggattctgaagtctggctggcttcaatggtaaaaggagataaagtgagagagccttgggtgctgtctgagttgcaaacgtaggactatgcatactttctatgccatttgccatgatagacagaggtctgtctcctctcagaccccgttatgaaccccagaatgggtgtaggttaagcttgaagccaggctaagtcataaagaaaaagtctgtctgacttctgggctctgctccccacgtaggtctgagtaagcccatctggctttgaatacttgtatctttgcaactcacaatcaatagtttttctagaagagcatctacgtagagatagaaggagaaatactaggggaaaaaaaaaagctacatctagaaggaacatagatggagttttcttagacagtgggatgttgctgggtacattttaaatgtattttcggcttgccagatccaccgagcctctgctgtaggatgctgctgaaggggccttgattgaaggctggccctgttactctttctccacagcctctggctcttttcaggctgcatagttcagttttcagaagccctaacaatagtcttggccaccctgctggggactctcctttgttgtttgcttcttggcacctgtgcaacctcaggcagaatccgacttgggaggtagggggcaccatggatcaagccggactctctggctctttggtaaaattggaacggcgatcatggctttccctacgctctatggaatcagcagtcacaatcttttttctcttcctctatttcttttgtactctccttggctatttttctgcaaaggagagcagtttgagtctgccatgataagtctgtctaaacgtgtcaggagtaggggtaagataaggagatgttactactgttgagtgactgacatccaggtgagtctgagaagccagtagatgcccggcttctgctggatgctacagcaccaagagactctttaaatgcctttaccttttggaggcctcctttggggcgttgttcttttccccgtacccacagtgaaacagctagtatctttccttcatagaaaggcagaggacttgcattggggcctgtgactagaccacatcccaggagcaatgccttgaagaattcttacagccaatatttaacaagtcagcctgaagatacagctggaccttataactgttaatttattcagacgaagtgaagctttttggcgaggtgcccctgttgaggccttggggtatacaactgcagaatactgatgattcttccaagtttggacatgaaactcaaactgagccccacagtgtagcccctgtccattggcagggatcctccgccaaaccatggaaggttgtaggtctggcttccgccggacccagctggggaaccgtctcctctggagatcttgggggcgggtaaaaggcttacaggaagctgagccctcagctttgacttgtaccctgtgttttgatctagcttcagaaggtagtaaaattaatgctttatgtccatactctcttattcctcagtccttgcccgtactttctctagctgggccataaatgtcttaggagcataatgggttgataggaatgacggctggcacaaatgcagacctgccaagcacttaacttcctggcaaatgtaatattgttctttcgtcagaatggcactcccattgatacgatctatggctaaacttaagcagtttcacaaggaaaggcaaatacatagttcaggatgaaggatgataaatgggtaatttctctcatttatttatttatttgtttgtttgtttatttatttatttatttatttatttatttatttatgagacggtgtctctgtgtagccctggctgtcctggaactcaccctgtagagcaggctggcctcaaaactcccagagatacccctgcctctgcctctgcctctgcctctgcctctgcctctgcctctgcctctgcctctgcctctgcctctgcctctgcctctgcctctgcctctgcctctgcctctgcctctgcctctgcctctgcctctgcctctgcctctgcctctgcctctgcctctgcctctgcctctgcctctgcctctgcctctgcctctgcctctgcctctgcctctgcctctgcctctgccgcccaagcactggaactaaaggtgtgcgccaccactgcccagcttatgtatgtatgtatgtatgtatgtatgtatttatttatttatatttaatggctgatattattagtaaatgatccctccttccattcacaatattaatttatttttgaaacattgtttaaactttgtttaaattaaacccacttttaagtcttatataagaaaatctaagcaaagccttgtcttggcttttctgactgtattctgtaatgcaagcaaatcctggctcctgtgtctatgaagttagtatgtggattaacttatcactgcacagtagtgcttcttgtgccttgctatgaagaggtcaaaatgggagaataaggtgctggagtcagggccaacactctttagtttgtccctctaggcatggactgtgaacttcctgatttgattatgttcttgattcagttccctcactgagaaataggcatgttgatcaagtgaggtgtcccttctgtgtgaatggagcaaatgtgttcctagttagatgccagcatttgtgacagtaaaagaatcaaatgccagaaagattaagagagagctccctaaatcaggtatagccatatatacctgagcagaccttggatgctggctccacacccagttgcccaacacccattggaggcctgggtttcctgaagaatacatgacatggaggcagacactagagataacagtccctgactcaggtcaccattccccaggaagaggctctgctttcagctgctttatctcctccacatttcttataactcctcaaccctaacttctggcaaagcgtagtgagcgacaggtggcaggaagcacttttatttgaagcagccttcccaggataatagcctttcctccattcttatatgtaagtctaaaactacgttgacctcaactaaaatttatcttccctctgtatcggtgtgtcaactcaggcagtgttcaaaagcagagagactttgaaagaggagagacttttgaggccccatgtccatttgtgacagctggttttcataagtgcccagcaggaaccaactgttagatgcaaatacaaaacaatgactgggcacagcggattatcttaattaactacttaataatcattgtaatttgcatacgtaaatctgtccacttaacaaatctgtcttgctattgaaaaatcctattcagggtacatccatacatgtttgataaatatttttgtttttcatgatcaggaccttataggggtatattactcttcataagaaggaaagtagaaaggtatggtagaaagaatatgcacaaagcatttgaaggctagctagacagtgctaatgagctaagtttctgagagatttaatgtcttagagtcattatttcagagccagtttcataacttcataaagtattttgccttgggagtgctctacaaatacgcccagaaagtcatgctttttttaaaatttaagaatccttgtcatagggttgaacacagccaaagtatgctatatggatgcttgaaaatgccatgatgaagcccattatttcatacaatcagctcatcattataaaaaataaaataaaagaatcctcttcaagtttgtctcctgataacttctttctccctcttccttcaggtacggtcccagtaacacccccccaagcaggaccctggacgcctgttgtctacagtccttcgacaactgtggtcccaggagccataataagtggccagcctcccagttttggccagccactcgtttttggtacaaccccagcagtacaagtctggaatcagtctccatcatttgcaaccccagcttcccctccaccccccacagtttggtgtcctaccacatctgtggcgcccaacgcttggtcatccacaagccctctggggaatccttttcagagtaataatatctttccacctcccaccatgtccactcagtcctctcctcagcctatgatgtcctctgttctggccacaccgcctcaaccacctccccgaaatggcccactaaaggacattcccagtgacgctttcactggcttagacccccttggggataaagaggtcaaggaagtgaaagaaatgtttaaggacttccagctgcggcagccacctcttgttccctcaaggaagggggagacgcctccctctgggacttcaagcgccttctccagttacttcaacaataaagttggcattcctcaggagcatgtagaccatgatgattttgatgccaatcaactgttgaacaagattaatggtaagtttgctcaagtacctgccaactaatattcagccccatccatatagacatatggcccaatggggagctcagaggaccttctttgttcatcagtagtctacctcctgcttcctctggcactcagggctgtggaggtcacttaaccattcaccttagagccctttacctcagccaatcccggggactggcccaatgctgccctctagtgactgttctcaaagggctttcaagagccattgaaagatggattgtgactttccgagagctgaatgattatcccatatgccatgactacaaggaagggacctgtgagtgtctcctgtttcagatagtgtatatatgtaactgaatgattatctaacccatatgccatgactacaaggaagggacctgtgagtgtctcctgtttcagatagtgtatatatgtaactttctgttctgtgatggagagatagattcctggtgtatgtggtgatttctagctcactggggtaaagaactaagtttcaaagctaagccatcaagtgaatatgtgctgtgtgtgaacacagcttgtctactaactacttgggttctttgccttccagaaccaccaaagccagccccgagacaaggtgtcctcttgggtaccaagtctgctgacaattcactcgagaaccctttctccaaagggttcagctcatcaaacccctctgtaagtatcaaatgccacatacacctatagcttcctgagcctacctttcctgtacattaactctttgatgagaatgcctatgtggctgtgatgtgttcttaggaaacttcatagtataaacatcccatcaagctggagtgagattatgtttcatgggcactatcatcccctgaacttgaggaataataccatcaaaacctctcctttgtgcttcacttaatctgtcttatgcaaacattgatgggagaagctgaatcaaaatagactcttaagaacctttaaagattaaaattcttaatctcccattgatcgtccatcaaaaacaattcttccaagttgagggagacaaatgcaattttctccccagcttttaacattgtctgattggcttaccatctaactggtgcttaaaggaaattgggattctattatgtgtttttgttatcgctataatagtgtttgttctgtttggcttcatcccctaggtggtttctcagcctgcatcttctgatccccacaggagccctttcggaaatccttttgcctagcttctgtaagtggaagagcctacttagtgttgtcttggagtaggtggacggtgagagatggtgatgtagagggaaaagcatgagattttatttttagaattttaaggaggttgagtatgtgtaatttaagagtagcagatatggaaatcaatgctctgataatttaataataaatattaagtattttaaaaatatttttgcagtcataatctagttaggagatgtaaaaatttaggttgtatgttgattcttcagttctatgtggaaataaattcaatagaacatatatttttaaccttctacattttttttttcatttttgtgacaaggtttcacatatctctgcttgacttcaaattctctctgtaatgggaaatgactttattctgatcctcctgcctccacctcctaagtgctaggattacagacgtgtaccatcacacccagttttctgtagtcctggagatgaaacccaggcttcatgaatgaagccctatcccagctaaattccaagacttacctttaaaagaacgatgttcaaggagaagcatggataagtcagctaaacaaagaacaatacgacatctctgccatttctttcttcaatggtgatctcaagttggtctctgtggtgggatacatcactctaacagcagtgactgccggaaatgctaccttgagaagcagtaaacattcaaaatgagtcagaggcttgggtgttccatctctagtggaagttattctagaaaagctgaatctctgccagggtgtcatgtaatctgttcttttcaacaataaatgacaacagttgtgttttaatattataacatcaaagtgaagagaaggaggaagctatataacactatatataggaggcatagcagaaaggggcaaaataagacaaataaatccaaatcccttttattccaatatttcctcatccaaacaaagctaatctctattttgattcatatataatagataagttcctcacatatatcaatcataagatatatttcccattatccatggaaaatgcatttcaaacttccatgaggatttttgaaaccatgaatcacagactagtgccaaccaacttttttccttatacataaatacctaaattttaattgataaattaaacagagattaacagccaacatgaataacaacaacctgtaaagttcatagattgggtgaagaatcatttttttttttttgtcgtgttgctgcaacaaaatacctgacacccaagaggtaaaaggttcatggtccaagtccatcatggtagagatggtcatagtagcaggaactttcatcattggccaacaaacagagagatatgagcactgctcagcttgctttcacccccttacttaactcaggatcctatcccaaggattcccatcctatatttagggtggttcttcctagttcagttactctgatccagatatagatgtatttggtctaaagccacactccattctttaaactagccttgatgttattatatagttgtgactagctttgaacccattctcctctttccttggccttctgaatgttgaagccatccacatgtactatcatatctggtgtatattactgtcttgttcaatgtttagatcagttctgggatatagtatcattaacccctgaaaataatgttttaatatgcagtactttgatattcaacccaaatgctttaaccattattttccatgtttctctaggaagttgtaatgatgactatccagatgagcaaaagactggctttggtcaagaatgaagcagacagccagaaacatgttgacctctgtcctcgctccagctttgacgtattatctgttaccctatttgttttggcctcttgtacttgtaaaatgcctttcattttcctgtctaggctaaagctaaacttaaactatggctttacgtaaattaagctcctaaactctctagctccaatataaatgaagtagcttccctatcaaatccttgtctgttgtgcccccttgaaacttccagaatattctccattctaccctccatttgggaggagcggctacctttacccttaatatcacactgccttgagtcaatgtccaaatactcatagctctcaaagtcatttggggttcctggtgtgcggcctaaacctaaagcatcctattaatagggaagtaagacaccttgcttcctatgtccactcagaaagaattttatttaataaaatgaaagcaagactaacttctcaaatccacccaaggaccattttgagatggtcgtttctcagctaactgcaccatttaccaatcctgccccaagtggtgcttacatttgacttgaagaagagaaagagctaactcaaaacacaaggcattattcaaagctaataaaacaatttctccctggggccccacattgttttcattccagatacgttgcagctgtttgaccctgatgacattatgccctacattttccttgaagatcctgattttatttcatgtgatttttgtttctcaataaagatgattattgtgtgcattactaaaaaataataaagtataatttctctcattctggtgatctctcccaggacctaggctgttccattttcaatctcttgctggctgttttaaatgagaggaaagcattctttatctctccctgtctttctctctttctctttcagttcattttgctcctgggtttatataaacagtgcctcccttttaccaggaatggatttttcacggggcaaaaagcattaaatgtttcacagatctgaagtgcacgcacccactccagtcattgttagtccaggggctagacttctggaaggtgcaccttcttcattctccctatggcttgggggacttagactgaagtttcatagagcaatttaacacagtaggggaactggattctgctcagcagtgaaggactgtattctgaaagctaaatgtgactatgctagacacactgggtccttactggatgactaggcctttatcaagtaactggaaaactttcttgaagccacaatcatggacaaatatttggggttatcattgaaaaatctgcctgaaatatattcctcatagccttggaaacctacacagtacattttcatttccaggctttttgttatacagagctgaagggtttgttcctgccaagttgtgtttttttttttagtttatgttgagtatttttttttcaatgttatctcttgacccaaaatgctcaggtccttgtgggtgttagtccaatcttaccttttgttggaagagaatgactgctcaggttttaaacaaggcgctagccttgtgagcctctgttaattagccccaagtgatccaagctgaagtcctgtgggtttctgtttaatgctagtggttaattatctatgatatgtgtttcttttttcctgtctgacttcctactcagtcattatgaacagacttgaaatcatactttaaaaatttcaaatacctgaagatgtgctaaagtgaaggtaactctttctagatagtcgagtttttgaaagtaatgatcagccacacaactgttttgtatgtacttgtcttcttgtgcacttttctgtatgcaaacaaatctataaatttacgcattcaataaactggaatgacaaaaattt

SEQ ID NO: 23 - DNA, 235505 bp, Homo sapiens
gggtctaaagggctttatgcactgtctggagggtggggactggcgcgggtagaaaacgggatgcctcgggcgtgggggcaggcttttggccactaggagctggcggaggtgcagacctaaaggagcgttcgctagcagaggcgctgccggtgcggtgtgctacgcgcgcccacctcccggggaaggaacggcgaggccggggaccgtcgcggagatggatcgcgggccggcagcagtggcgtgcacgctgctcctggctctcgtcgcctgcctagcgccggccagtggccaaggtaagagcccagccagagcctctcgtggagcccccacttccccggctgtggcagggtcgggtccgcgggaggccggaggggagagcgtccgggcaggggctagggccgggcggcggcgcgggagctgctcccggtggggcgctcaggttgcttcgcgaagccggagcgggagcgcccctcttcgctcgccaggaactgagcggcagcaaacttgagaaagcagccccgccagtttcggtgacagcgcaccccacggagaccctgtctttgttcccacgggcgttggtccgatgctcctggaaagcactttgcgggagaacgaggttctccgccgtttgcagcctgccctccctagcggagttctctgctgggcggcgcggtcccgggctctgctcagagcgcagctttccacctgcagcgcccctcccgggatcccttcgcgcgcccagggccgcgggccagagcactcctcccaccaccggcgaaacttggtcccgcggtgacccccagagaccgctctcaccatacagatcatttacgagccaagataaggccgggaggtgggattggccgagagagtggctgagggactggagtcttttcttgaagttttcctttccagctgggagctgggggcttttgtgttgatgaatggggcccgtctgcatggccagagttttggggatcgaatgcagaaagtttctagtatgaagtgctttaaacttctctcaagttgtccgatagtttatgttttaacagaaacagagaagagggaaagagagggagaaagaagcggagagaataaaactagtaagaagggaagaggagagagcgtaagagaagcaaataggaataaggaaagaaggagggaagagaacgactggggcgggagaagagagagagagaggagagagaggagagagacagagagagagagagagagggagagagagagagagagagagagagacagagagagacagagagagacagagagagacagagagacagagacccggccgaggatgaatgggaagggcgaggaggaggctggaaccggcgagctctccccctggctttgcgttgctaggtagcagccgggagctgcgtgtgaccgaccaccagacagacagaggggacgctgctgccaccgcagggactaatctgtctgtggggatgggagagtcccccctttcccctcctgctccttccctcccgtcggacaacttaattgccctacaatgaaaatgaaacccctattgttgtaggattagccaaagcaataaattgattttcctggatcacatattggggttgatgggtggggaatgtggaagcccccatttacggaggagtgaggggagggcttgtggatgggccgtggcatgtattcaaatggttaatctgctttctttcctcaattcttagcgtaagctccttagagggaatcaagtaagtaattatacagcaactcctagcagcacccatttcagacttcctgggaagaagtttggaaaccctaacaaaccccacaggtcttgcaaaagtcttcagaaaggcaggagaggcaaggagagatcattaataaccttcctttgaacaccctttctcagtgttggtaacgcagaaagagggtttattattattgtgcagagtttgcacaatgcttagggttgtatctcatgtcctaaatatagctataggatttactatatgttcctgtcagtgcctggcaaaaggaaatcttaccttgattcatctatgtccttgtacaaccaaaacagatattctttttcctgggttgatgatttagtcactaaataaccaatacctactcttcttgatagttttttgcacccatccatcttccattctatgataataatatataataataatgtgtatagtaatagtaacctagcatacacatatatgtggcaggctttgttctaagcactttatacttattgactcaattaatcttcataatatcccttggaagtaagtactcttattatcactgttttacagatgagaaagtggaggcacagaacaattcagtaatttgtctcagttcatactgctagaaaatggcaaactcaagggattctgaattcagagtctataattgctacagtatacagtgtctggttttctctctctctctctctcttttttttttttttttttttgagagagacagaatctcgctctgtcacccaggctggagtgcagtggtgcaatctcggctcactgcaacctctgcctcccaggttcaagcgatcctcacacctcagcctcccaagtagctgggactacaagcccggggcaccatgcccagctaatattttgtatttttagtagaggcagggttttgctatgttggccaggccagtcttgaactcctgacctcaagtgatctgcccgcctaggcctcccaaagtgctaggattacaggtgtgagccactgcacctggcccgatttctcttttttcttttgtacaaaaaatgtcatgctccctaacttactgtccatgtttgaggttcccaaagaagctgaggggcaatatgcaactcgtaccacctgctgcttcataactgtggatctttttccagaatctctcctcaggtttctaagaccagaacccaagtctccccattcccagtcttcctacttgatcattttaagacgcatttcctctgaatgtcctctgcctgatacgttgagatttctagaatcctgttgtaatgatcctgacttaatatatgaagtaaaatccaatgagattgtaacagcctttatttaagcactaccttttaggtaggctaccattgcaaacttcgcatcactaaaaattggaggggaaaaaaaagagctctgagtattctatgtttagtctttgaaaaaaattataccacatctgttgttaaaaattatttgcattttccttatcttttgtgtaatgcttttcaagaaaaaacattttgcagagtctgaactcgagtcaagctgttgggttccaacattggctttaccactttctagctgtgtgaccttgggaaagtcaaccaactttgcatagctcagatggcttatctgcaaaattgacaagataataagagaatttacccaatgacatcttgtaagcataaagagataaaatatgccaagtgcttagcatggtgtaaagcatatagacagtgaaaataaactagaaaataatctaaaaatacaatatttttattatatttatcaacccttaaagtaacatattgttttgcttcctattcctatttccatttccaattttcaaatatacaaaggaaagtcttctttaagcatttttcactaacagttctctgaagacttctcagaccctagcatgtgattggaagattttttcttttttttttttttttttgagaaaatcgtattggccttaaacaaagttgtattctgtttactaattaaaaaaacttatttttcaaaaatagaaatggggtctcactgtgttgcccaggctggtcttgaactcttggcctcaaatgatcctcctacctctgcttcccaaagtgctgacattataggcaggagccaccttacctggtccaacattatattctttaatccaataaaaatgtggtaatgtttttaagagttagtatcagcttttatgacaattacatcttcacatgaagtttatatgtttaaaaggattgtgggggcaatagcaaacttgtatcgtttttattccatcacaactctggaacctcactgctgctttaatttcacagttgttggcttctctttctctacttgaaaaagtttctctttaccagtcttcataagacttctgcctgaactcccttcagtcatgcacctgtctcattttaatagaaactcagactttttacagctagagggaaccttagatatcaactggtctgcttgcattttttttttcttacagataagcaattagcccaggagggagaagaaaggggctgagaggatgaaagggaaggcggttaataggtttcttgcctaaggacatctagcctgtgacagagctaagatataaatttgcagtggaccattttttagattcatgccttctgaatgtccccagcctgtttggttggttgagatttctagattccttttggaatcctgacttgccagataaggcacagtctgataagcagatgaatcttaaaaacaattggatgggttacctgtccctggccaaagaggaatcctgtgataggttattacaaccatgtaccatgcgctttcagcttggtccagaactgatgccatgtcagtgcccctactcccaaagaccatacctccagatccatttttcaaattcttgagccatcaaagcgcattcctgaagatctttgggttttgtagtgcaggctgctgtaagactaggttttcagtcttactaaaggtaattattaggtcataatcattgttcatgttctctagtcaggcactgtaagaacactgaaaggtttttaaaatatttaaattaaaattttaaattatcatttaaaaataatgataccaggaacctagatgtatttcctgtgtaatcagaagcaagtgcattgtcatattggctttggagtttctgttaagtcctagtagctagaacaaggtaagtagaaagtagaaggtgctgagctgggcgtgggggctcatgcctgtaatcccagcactttgggatgctgaggcgggaggatcatgaggtcaggagatcgagacctgcctggccaacatggtgaaaccctgtttctatttaaaacacaaaaattagctgggcgtggtgacgcacacctgtaatcccagctactcgggaggctgaggcaggagaactgcttgaacacaggaggcagggattgcagtgagctgagattgtgccactgcactccagcctgggtgacagagcaagaatctgtctcaaaaataaaataaaataaaataaaataaaataaaataaaataaaataaaataaaataaaaataaataaaaaagaaaaaaaaaagaaaagaaagtagaaggtgcttatgaaagagtgttgaatggataggaaaggggttctcaaggttgactgcacgaatctagagcaactaaaaaaatactaattgtgaagccctattctagcatggaaaaaataagcttgatggaacctttggtataaatcaaatggttctatcgtatcctattaactttatagtcttgagtaattaaaaatttttaccactattgtgtattctgtgaatgtttattttattttttccatgaatatttattaaatatcaacagtgtgctgatgagtcaatagtatcaatactacagaaacattaaggaagatgagaactgaaaagaggtgtctacatatctcgcaattaaaatggactgcagttttgcatttaagattctgaaatagtcattgactcattcctaataaccctgcccaggatctcaccagcattagaaagattggagatgtttcagcatccgagttctgggatgcttcttgataatgatcagctagtagttgttttgaaatgtcaagagcatttctgtggttcttcacatgttcctaatgcaaatgtttccgaagtaatttcttgacagttacagtgttttgagatgaagtgggaagggcttgtgattttgaagttggaggatcttggtttgattcctacctctgccatttattatctgggaaatccagtaccacacatgctgggtgctctggggcagttttcttatctgtaaaatggacatatatctacctcacggggtggttatgcaaaggcaatgaatgtgaaatgtttaataaactgtgaagtctcatatagatttccattcatcattattacccaatacgagaattttactttttccaaacttgagaggaggaagatgttgcagtattttggtatcttctttaccgtgggtctgagaatgatgcacctgtgcatgttgttacatccttacagtggctaccacaacttcacatgttattcagtactgttatgttggtgaatgtcacaaaactaagttaaactgtctgaggcaaaaaaggaaggttattgaaatacatagttgaggctgggtgtggtggctcatgcctataaatctcagcactttgggagtctgaggtgagcggattgcttgagcctaggagtttgagaccagcctgggcaacatagtgagactccatctctacaaaaaatacaaaaaattagccaggaatggtggtgtgcccttgtggtcccagctacttgggaggctgaggtgagatgatcgcttgagcccaggaggtcgaggctacagtgagctgtgatcatgccactgcactccagcctcagcgacagagtgagaccctgtctcaaagaaaataaatacatagttgaaaagatacagataattaggttgatccatttgagattgattttttttcctatgcagaaatagtcaaatattggcaatttcatttggttcaacctaatataaaatggaggctcaaactatgtcaggccaatcttgtcttttttccgtctcctggctctgagatgactccattcttaaacatgttctcctttgatgtaaagcggctgtcagtggctctggagccacctcctatcagatcacatccactgggaaagaaaaagagtttttatcttagctattcccagcaaaagtttcagttgcatctcagggtctctacttaggtcataaactcattggagaaccaaccactgaatcccgggtcatgatgtgttcccatggcttaggcttgggctgtatactcagtctttgagatcatgtatgaaggggtggagtccagagagaaatgggggtaattattgggagaatggtgaacagaggctgggatgcaaaaataacaggtgttcagtataccttatcagataaaattgactgacgatgttattttcattttgtatgtgaagacacacttgaaaaagctacagaaatttctcaagagctggcagccctggggtaacttacagaattgaaaggaataaagtattggaaacattaagaaaaaagacatggtgatctgtgcccatgtgaccatgttgcaactttaagtttagaaggagaacaggagaaagaaggacttttagaaggtttatttggatcctaaagttttcttatttggagcagagctttgtgatagacaggaaagttctggaaaatgagctgagcgatcagactacaggatcccttaagtctggtgcagtatttcatttttctgtgaatcttaggctcctactccttttccaatttacttcactccaatgtttatgttcctaagagtttgtctgttttccaagcactagtcctttgctataaggatggggtagagagaaagaagcttaaagagtttgcagacaggttaagatgcttctgtggagacagaacacatcttggtgcacatctgagtgtccttagcacttcatctatggacttctttcataaatggtagaacacgtatccatcacaccttattggattaattcagaaatgccagatatatgtactctttgctgatggttactttgttggtctctaatttaagtcttatctctaatcacattagctgagaaaatggagacattatcattctaaaaataagatggttaacttttatattaggacacttctgatttaggatagcactgaaattcagtgcaaagaaatgtaagtctttcctagataatgacagattagacaatttgaagtttcacttttggtcattagccctcaggtcatgcctgacctcaaggttactggaaacagtgagaaatgaatgaaaggaggaaatgtaattaccattctgtgcattgaatagttgagccactgttaccatggatacaatggcgcatttattgtccagatcttgagatccaagtttgtaagcaatatccaaggtctcctttaaatttatgtactatcagcgaataacacatgaagattcctggtaactttgaaaataagtctttcctcactgatctactgattcacattaagtaagagcatgtgtacttttgaaggtgttgaggaaacctgaaaaagacgaaaaggaaagtagctacacttctgttatgctggacattcttggattcctctataaaaatattctgtcttatactgtcagtgatttgcttgtcactttgggcccagttctttggtttttatgtcattaacaaggagaaaatttcctgagtaaaggttgaaaaaatcaaaatcgtttatttttattttttgagacaaggtcttactttatcacccaggccagagagggtctcactttatcactcaggctggagtgcatggctccctgcagcctcaacttcccaggctgaagagatcctctccgcttaaccccacaagaagctgggactacagacacataccagcactcacagttaatttttatattttttgtagagatgaggtttctccatgttgttcaggctggcctcaaacccctgagctcaagtgatcctcccgcctcagcttcccaaagtgctgggattataggcgctagccaccatgcccggctgaaatcatttattttgtcaggaaattcttaaagttgaatttaagaatgaaagtattttatcagaaatatggcaatcctacccacattttaatctcactagaaggggggtgatacatgctagcatgtacttccacactggtttaattttgatgtggggaagggtgtggagaatactttttgttgcaagaaacagaaaacccaactcaaaatggcctacacaataaagggtatttcttggcttatgtgagtaaaaaatactgaggcagagtggggttcaggcgaggtgcagtcagggctccagttctctttctttgtgttttccttgaccctactcccccctaagtttcacctttgtgtgcggtctggcttcccatatgattctgatatggctgccagggcaaatggggctacgtgtttccttgatcctatccagggggaatccaactttgagaaggttttagttatgttctcaaaagtattatttcatcacaataacttacagattgttagaatttctaaggaccctagacaaagtcagctagctccccaaacttgacatatcatcaaaatcacctgaggaacttaaaaaagtatagagattcttaaatcaaaactcacccttactaaagcaggggtatgaaaatctgtgttttttaaaaattttattttattttactttcagttctgggatacatatgcagaatgtgcaggtttgttacataggtatacatgtgccatggtggtttgctgtacctatcaacctttcatctaggttttaaggctcacatgcattaggtatttgtcctaatgctctcccttcccttggcccccaccccctgacaggccccggtgtgtgatgttcccctctctgtgtgtgatgttcccccccctgtgaccatgtgttctcattgttcatctcccacttatgagtgagaacatgcggtgtttggttttctgttcctatgttagtttgctgagaatgatggcttccagcgtcattcatgtccctgcaaatgacatgaactcattcctttttatggctgcatattattccatggtgcatatgtgccacaaccaacccaaatgcccatcagtgatagactagataaagaaaatgtggaaaatctgtatttttaaaagtttcaaggtgattctgagggctggaccaatttttgggaacgtgtgatctaggtaccctctcatttttcagttttgtaaacagacttagaggtgaactgacttaccactgcaaatttcttcagtggcagttaaatatactctgttaaatctctttcttttggatgggaatgttacaagctagctacaacaagaaggacaggactcttttaagtctgagggtgacatgaagtactaccctcattcctggccacctccttttttggccagcatggcaggtcctgaacctctccctaaatatgccactgtttgtgtcttaattgtatgttttgttcttaccttggtcacctttgaagttccccccagaccctcctaagaacgttggattcattgaggtaaataactgttgcaggtcttctaatcttttctcacctgaatctgaattcatctcagaacacccctgacacagcccactggcttctagagaagctgtctgttccatgcttggaatggaagtattgaaaaacttcatggctcatttcctttgtatcccagcctcaactctttgttgacctcattgggacttacagtttgttgatcctaccgcctcttcaccatccctcaaatccctcacctatttacttcctcagcttatattttatggccatcattaatttcacttccctgcatacatacgcgctcagcagcttggcccctttatctggctctgttgtgcttggcaaggccctgatcctggttaaatccagttctccacatctgcaactctgtagctaaacatggcaggagaaaaacacaactatactgactagcctcgcttgacattcatgaagccaatctcaagcttaggacttgcttcctagtctgtctattgcctctcttgcttccttatatcttctcctctttcctcaaacctctgacatcaccttctcacatgtagagtgagctttttaaaactgtgaaaatggaagcaaccagaagagaattccataaacttctataactcaaccatcatcatttgaacttcgtcttatatcttctgtctttcctcctattactctggaagaattttcccagttcttaagtccaaccatttcattcatgttctagatctcattccctctcacctctctgcaattgtcccctctttcttttatgaaatcctctgttccacattaccttctaactatcactctattttttcggttccactttacagtaaaattcttgtacagatgtgcctatatccactgtaattacctttcaattttttctcaaatccatgccattttgctttagccctcatccttgatagatatttttttggtcaaagtcactcatgacttccatgttgttaaatccaatgatctattttcagctctggtccttatttaactggttagcagcatcacacacagtgtatcctgacttcctccttgaaacacttagttagattttcaagaaactgccttctcctggtttcttttcttccttgctggcctacccttggtatctcatgcttgttcctgtctatatccctgacctgttttcatctctagctacactgcctccttggtggcctcatcctgtctcatggccctctttgaagcagggagtggtttcccaattcagggaggcggcatggactctggtggaaagaacatcacatgtcaagtcaggacattcatggatcttgttcctgaagaaagaaggaaaaataggcacaaccaaagagggccccaggctgctgaaaaggacccagggccacttgtcctctggggatagtctctgtcatctgagtccccactttttttttttttttttttttttgcgatggagtctcgctctgtcacccaggctggagtgcagaggcgtgatcttggctcactgcaacctctgcctcccaggttcaagcgattctcctgcctcagcctcccaagtaaactgggattacaggtgcacaccaccatgcctggctaatttttgtatttttgtagagatggggttttgccatgctggtcaggctggtctcaaactcctgacctcaagtcatcctcctccctcggcctctcaaattacaggcatgaaccactgtgcctggcctcagtccccatacttttgaggactccatatatacttctttaccatgtacatgctgacaactttcaaatttatgaatctaatccagaccactaccctatagtctagacccacatatccaactgctcatttgacatgtccacctggctggccaatagtcatctcagacttcacatgtctgaaattgaactcctgatctccactaatgtccaaacttgctttccatgtggaatttctcatctcagcaaatggcttcctcatccttgctcaagcctcaaactgtatcctactttgacttttcttttgctcctctaccccatatagaattccttagaaaatcccattgttttgatcttcaaaatacatctagaatccaactacttttcaccatcttcacttctgccaccctgattcaaccgactgccctctcttgcctcgacgattgcaatggcttccatactgatttccttgctgtagcaacttttttagaacatcagtcagatcacagcacccctctgctcagaagctcccatggtttctgtcatactcaagttgggttgcccaaaaacagacactgagatggagcttggagtatataatatttattaagatcaatgcgtgtgaagggaaagggaggaagcaggatgggcagaagaagaagttgaactctggcagctgttggtcaacccagaggaagctctggagcaagagttgcctgttagagtgtcctatgtcaggctgaaatggccttgcttaatcactggatgtggcctgtcctggaaggacacgaccttgggcaggtggctttctatagctgaggcagaccccaaaggagctgattgcaggaagaaagtccttcctcatagctggtccttcctataaggggaagctgcatggcacaactctgggtgtaccactgcttcccatctcatgaagagtcaaagtccaagtccttactatgatctacaagaccctaaccatttggccttcacatcacctccctgacctcatttccttctcctctccccatgcacagtgcaccaggcacagtgatatccttgttttccctgacatggtgagcacttttgggcctttgcacttgcccccctttttcctaaatgctcttgcctcagatggtgcatgacttacttcctttcctcctacaggtctttgctcataggtcaccctctcagtgtggccttctctgattctttcccgacctcttctttcctgatttactttctccattgcgcttaccaccatctgacataaggtatgtaacttagttagttgtttgtttatttccttacttattatcttcccttccctaagatgtaaatggcacaagggcagggattttcatctcttttatccattgctttccctagtgtccagaaaagggctaaataaatgaatatacattgaataaatgaatggacagatgtcaccatgggtgctaagaaggggcatcctcagctcatcaccattccctggtactaccagcccttaattcctcgaggcccctggaggcccagtcaaggtcctgatggagaaaaaggaaaattgctgtctctatcaaagcaagtggcttagcaacgctgtttctctcgatctgactccccccttttctccaccccagtgcctcccactcccgccctgctggtgattcccaatgcatttgagtagttgaatctgcatccttctttttaacttccatcccagatacttggttaccctgtgagaattcccctgtacatacagaatgggtcattctgctatttttaggacagatttgatacagtagcttttacaaaaagataagccaaagtttttagacttcgtgttagtggactgtcattctgtatttaaacagaacacaaaagaaagctgtctgagaccatgacacagtgaaaacagccttgatcaaacaaaaggccctctttgaagaggggagtggtttctccactcagggaggcagcatggattgtggtggaaagaacatcacatgtcaagtcaggacattcatgggtcttgttcctgatgaatgaaggaaaaatgggcacagacgaagagggcccctgactgctgaaaaggacccatggccacttgtctcctgggcatagtctccctcatctcagtccccattcttttgaggactccatacgtaacaaataggttggaggcaggagaatgatggaattccacacatagatgagtagagaagttgggaaataagccacaataaaagtgactaaattatttgagtgctttctataccaggcattggcctaagtgttttgtaggtattagtttacctacttatgtagtaacagtaaaaattttatggataaaggaccaagacaatgacaggtgaggtaatttgcccaaagcaattcagttactaagtggcagagccaacatttgaacccagaacccttatttgtatatgttgtcaccatggataatttggagcaagtggaagatagtcctctgtacgtaatcaaatgaagcctcatttaatttctcatattatgatcagatgacctcatttcagaggctggtaccattgcgacccaacttttggacatttttttgctactcttggcagttcattcattcattcattcattcaatatatgttgcagccttatcatgctctaggcgtgatgtaactaggtactgcagagtatagacagagaccttcaacataggccacatccaaaacaacttactattgaacagagtatatttccacttccttctagaagactagaagactgtactttttaggtacggattgatttctctctgctgggtttctcctatattactatttcattatctgggaacaccttttttttttttccctctataattatgtgtcttttaattcaaaggacccttacctaatcagagagttcaattttaaccttccgttagggacagcagtcatctataaattttcagaggttgttgttgtttactactaatgaaaaaaattattaagttctcttatttaaagtcactgaagaaaaaaatgaacaaccaagtgagagctgagtttctttacttcccggagaacactgctgttgtagagatggagaagacatttcctatgtgctggatgtgcttaaaggtctcttggtcccaaagtatctctcactacggccaaagatctctgctctgtcattactaaagtcagttcttcggagtaagacattctttcctcctgaaactcctattacaatgtggaaatgttcactcctgtagggtaaagtagttagttgagatagtaatgcacagtaaatgtttgtcagagcaaggttcagagagaaggagacacaaagctggtatgttttaatggggatgaaagagggaaagaaggtactagaggtgtgatatagtcttgaaaataagccaacttccttttctggggaataaagggttattatgcttgtgctttttcttagaatggctttatggggaatttcagctgtgatctattaggaaggcctcaaagatagaacttaaaagcttctagtatggctgtccttcctctagttagcaattgaaactgagttgttacaacaaaaggaaaagttgtcgttaaaagcaacacagttgcaagactccatcaaccattccttggggattcatcagtgcctggtaagtttgagaagagacccttggattttaatatacatggcagttataatttgtctagaccataatgattactattaatagggaatcctgtttttctatttttaaaaaaatttagagatgggggtctcactatgttgcccaggctggattcaaactcctaggctcaagtaaccctcctgcctcagcctcctgaatagctgggactaaggtgtgtgccactgtgcctagctctgtttttctttaaagttactgtgtaataaaaaaagaatttgcaaatgcataaaattgaatatacacatgtcccaagtcaattgtcaaatgattggtttttatgtaccaaaattctgcatttttttttcaaggtcacttctgatataagaatttacttcttccctaatatttggttcagtgaagtgttgaaagaatttgctaagtaatcattgaaagctaagattctagtgaaaaacaaaatgcatggtttaaaaattgaacatactaactgaaagacagtggaagttagatgcttcttgctgtaaataattaaacccaacagtgcagacgagagaacatggcaccaagagggacttgggctaagaaggatcatattgtattgaacactttcgtttccctgtaagggaaatcaaaagggtctttaatagttgttgctgattgtgaatatgtgcaacaaaatcccactgtaatccagatttatttttcaagcattttgctgtgattgaaggaaggagaaagggataggaagaggatggagttttattaaagctgtagttacttcttccctttaggaggtctaagtgtgacttgtcacagtgacctgggactttgattccctccagggccttcctgttctatgggcacattggtggatcaaagacaattgacttttgttttgttttgttttgttttgtttttggagagaagcagtggttctgctaactcagaacaagaacgacaagagtcatgtaggatgtttttctgagtttctctaacagtgctcgtttttttttttttttttgaccgccccctcttttccttttgaggtggggccaaggggtcaaacctccatttttctatctgtaaaaaagagaatcggcctttatgaagtgctttaattttaaaaattaacataggctaaaattgctgtgtgtgtgcacagttctgtaaatgttagtgcatgtatatatttgtgtagccacaacctcattcgggattagaacagttcaatcacccccactaactcccttgtgctactcctttgtggccacaccctcccaataaagtgtgttttaagttccttttttgaaaactgaccttcccagatgaatgtctctgttgccttttatttgttcatttttatttacgcagtgttccttgctcatttttgaagtaattcaaaatgacactcacggtaagcttgcaaggctgcctttcctttactataacggagaaaaaattctggaaagaaggcagctctttcagtatagtcatataagaacaaaatttccccaaacttggcttgtggctagattggaatccgtaaagaaaacacactcaagaaatctctcttgaagaggaggacagaggtttattttttatttaacgatttaccccttgacacctgggaaatgattagttgatgttttcaaagaagattaagtcagtgtggttaattaactgtggtaatcaggtgacttaaatcaattaactccttgttaacaatttccatcaattttgtaaataaatgactaaatcagtaaattgtactcttaagattaaaggctattttctgatttatttttttgatgacaaattagagtgtttccttctcatctcagtcactgcctgccactcttgctcttaatcataagccagttttagtttgagaggagcacaccagggaaacttttaatatatggttttaaggaaaagtcaggcttaaggacacctttgctccttcatctcagcacatttggaaagaatgatttagtgagagcagtagttgggggtgggtgtagaaagcaatcctgaaacacactctaggataagcttttattattaagtcacttaatgtcttgttttatttatgttttctaagttaaaactcgatgagggatataataaaatgaaacagggtttggctcttagctaaaaataaactttaatggatgtcttacatgctctatttagagggaatttcacaaaatattgggatatattgactgcattcatttgtaaagcttgattgcattaaaaataccatacaaatatacaactaaaatgttgttactttttagaatctttataattgaaaattctcttccctgcttacataactttattatgtctttgtctccaatgaaatatgagctggataaactaacacaagaacagaaaaccaaacatcacaggttctcactcataagtgggagttgaacaatgagaacacatggacacagggaggggagcatcacacactggggcctgctgggggttggggggctaggggagggatagcattaggagaaatacctagtgtagatgacgggttgatgggtgcagcaaaccaccatggcatgtgcatgcttatgtaacaaacctgcacgttctgcacatgtaccccagaacttaaagtataataataataaaaaaagaaagaaatatgagctggaaaattataaaaccatatcctatgcccctgaatatgccattgcattctctgaggattttcactgtaggacagatgatataggtttatttatggtttcttcaagaagggatatttggcatcttgaataacttttgaggagttagtaaatatttatgtatttgcaaaaattctatgctattctcacattttataaagagaaaatttctatggcttcctttaaggtattaaggatagattaaattgtgaaactgagctgaagccactgttgtaaatttaaatcactggctgccaagcaaaattctgggctcttcctattattatagaagctttctggccataccccaactaccccttcccaacttccctggacatagttaacctgtggccaaaccctttctggtactgggacatggtctggaatcacagctcagagatttagctcgactgctttccagatgtgtacctctgaagctctctgagcttcagtttcctggactatacaatgggtgttagtaatttctaccttataggtacctgggaatatttaaaggatattgtgaacatgcaaggtcctggcacttggtgagcattcagtaaacatttggccccacagggaacctgatattaaatcattcatagttgaccagctcttggttaggtcatgcagcaaagcagccaccatgctgtgattttttgaaataaagaaaccacttgtcaaattctctatccatagaaattgctggggaaaaatacagctttttaaagcagatgaaactactagacaaaaaaatgttggaagacaggcctggtcacctgcctttcttcccccaagaatgtttggttcttcacctcccaggtcttgaaggcacagatccaaatgtaaagttgccaagaagttcaaacgttggtggacctggtgtttccattttaggtgtcctgtgcatgctttctgtaacttggttttatgcagaacttgctgatgatgtctctgtaactctgagaacaggaatgatggaagcatgggtctgagtggaggtcagatgtgtcctctgggcaaggagaaggatttgcccagggaagactacacttgaagaggagcacttgattttgtgagaggttttagacagagcatgtaagaatcacagtcaatgaagagttttctctcttgcaaaagttccttattatttcatgaaactacagaaaggtcagtgagatgttcaataggtgagaaagctgtcaagctagacttggttaataattacagttaaaataatcactgatgtatttctttcacacacgtttattgcaagctttttttttatcaggaactgacatgcatagatgaataagacatgcaaataaacaattgtgctacagggtgagaggtctataatagaagtttgggagcacagaaaaggcagtgatgtagtcaactagacctgagaggaccaagggccaaggaagaccgcacagattgccatttgaactgagtcttgaaggagttgggagagtggactgtggaggattttgtatgtcaagctaagaagtttggtgcctttgaagaaatgtaagctgggaagtacaatgctcagattttcattttgtaaaaagaatacttgctgcaatgagagaaagcagatgaactagttaagttagaggattactgggattatctgggtgacagatgatgagggtagaactagacttgtgcacttggaagtgatgagaaaaggagagagtcaccatggaacaaagagaaagcttttatttgttgccgtttttgataattcttgttatttgttttataagttggcatgttttatttatgggaatattagacatgtcttttcaatgtatgtgtatgttaattacattcataaatattcaactttttttttttttttaattttcctgcctgaaaaatttccagcttgctgtctgtctgggcatagcgtgtgacattttctttgttttagttcactgattcctagttggttcatctccctcagggaacctttggaaacatatagtagcattttttgattgtcacaatgcctgagtatccctgccagcatttagagggcagaggacaggaatgctaaaccgttgcaatacacaggatagttccatactacaaagaattgtctgggcttaaatgccaatagttcttttgttgagggcccatcttggttgataggaagtgaatagagaggcagaaagggatgctattggtaataagagcggtcatacactgaaacttattatatgcctgatatatagtcaccatagctatagcatttgttcttgtgacactccagggaggtagataccattactattccctttttactaatgagtgaactgaggcagagtaggatatttggctctgggcctcacatacttaactctaatactctgtttttccacatgctttactttcttgtaactttaaattaataataagaggaaaaggagaaccacacttgctttgtgctttacagtttgttaaatatcagaatatacctcctggaaacatttctgccagtttagtagaatattgacaagttatcgcctccaagcatttttaaaaatatggaaaatatttgatgaaatttttttaaaattaggatgcctttgtagattggaagaaactcttatttgatggaaaaacagttggtgctccataaatgcctggggaattgaattgactctggaggcacttagtgtctttagagggtgtcaaagatcttgcaaatttattttaattttaattttaatttttttttacttcacataaaagagaatctgcctcacgtatgatctttgtaatttgaagacgtgccagtgacattgatgaagaatgtgactttttcttggacatgccttgcacttccctgtttctgtgccagttctagtttgtttcctctgtgaggcgtcccctcccctcagatccatctatctgtagcttaaatgcacctttctctacaggacctttcttgatatccactgaatgttatctgaacctctcttacagcatgtctcctcatgccatgagatacaatcatttgtgtatgtattttatctcttcctctagaagagtaccaccttttgggagaggcatagaacaggaccactgatgctaagagtatgcctagctcctctggtctcttgtgtctggcacagtgtcaggcataagcatgcactcaagaaatttttgtttaatagaaagtcaaaagaacagcatgtgttatagtaaagcaactccatcatggtggggaggtaataggcatgctctactctgggctcctgtcgcagagaggattttgtttggcttgaacaagacaaacatttaattctctcttacataaccagcagtggaaggctggtctggtggttccatgataccattagagacacaggctccacagtcctctgctggtgactcccattcctgaagtcacctcattgtccaaaatggctgctgtagccatagccatcctttctctatgccaggtagtgggattgcagaaggagaaaggaggacatgccttctctgtttaaaggagactttccagaagtcccacacaacactactgcttgcatttgatctcatcgattaagacttagtcctatgatcacatttggctgaagtttggaaaatgtagctttttagctcagcacatagttcacctgagtaacactgggttctattactgaggagagagaggcaaatgaatgttaaagtatgccatgactgctcctggccaaagctggtcgggtgacactgcacatcttctcttcagctttgaataccacattttgggagaggcatagaaaatttgaaccttatttgaaagagagaaacaagaatgatgagaaaactggaaacaatattatgggggaatgatggaaaaactggagatgtttcttttggacaagagaataggggaacaatggttagctctccaaatatttgaggaactattatatgaagaaggataaaacttactctaaatgactctaagagatgggaaagaaattgtagatatatcgtatgcaccaaaagaatgctggaatttgactttagggtcacttttaacctttgaccttatatagtacagatgcataccatatagatgtatccataagtttgtgcttttgaggttaaaatattgcttattctctggttacttcatattggaattctctttactgagggttgctatggtgataacacccttagcagtctgcattttgaaaagctttggacttttccttttgtgagatgtggtctctatgtttcccccatgcttggcgtttttcaaaatatcatcaagtcagaaacaatttccaaatttatcagagtgaagtgaggagaattttaaaattgtagatactaataacaggggttagtaattctatattgtacaactcagtgattcaataaatattgtcactatcaacttctttggattaagatagctatgtttaggcaactggttagtgttatttagttaagcatgtattttttaattattactaaatttcttaaacacccttgaaatataattgttgaaaatgtcttaaaaacacagctagtatcaaccagagaaataatttagcaaagagttaatttatttcactaagtagtgatatatttttgaacgcatgtggaatagatgtgtgcctataaacttgactttgtgaattaagttttatttttctagttcagttttactttgaatatggatatgttgttgttttgtgaatcttagacatcagaaagatttagttgggaagagaagtaataatgtaaaataaaagtaataataaaatactcaaatttctgtattaaattagcttttgggggaattagctacataattaggttattttaatagattttcaaactgggttgcagatgatgaatatagaagagctatatatatacataaactctcatataagcaaatatataagaagcaaaaaaaaaaccctgtagaattgagagggagacaatatttggagtttaaaggatcagaaaacactggcctaaaaatagtatcagtaatcaatttttattaaacacttactgatatgccagacccataatcctcactctaccctcatattaatgttatgagtaagagctcttattatctccgtttttagatgaggaaactgaggcacagaaattaaaatggctgtcagatagttagtaagaggtggagcagtggtttgaatccctagtatatgactagaaggacttcaccctggacagttacttggcttctaagcagtcttcgcgtgctcttccccttccttgcccttctgtaatattatagtagtttcccagtagtatgcagcatctggctattcagactttgtctcttaaccttctgtggaaaagctgttgacttttagacatgctgggcagaatggaagaaggaaaatacagactgttatacttggagaaataatgatttcatatgtaacagtagttgaatcaataggtggacaaatttattgaaacttcttgagttaatccagtgatggtaaacaaacacatggccaaatgagcactctataaagcatgccttctggaatgcatattgtcttgtcttgtctttttccttccttccttccttcctttcctccctccgtcttcctccttttttcttttcttttcttttctttctttctttctttctttctttctttctttctttctttctttctttccttctttctttccttctttctttctctgtctctcttacattctatctttctttctttcttccttccttttttctttctttctttctctttctttctttgtttttctttctcccttcccttcccttccctccttccttccttcttcctttcttttctttcttttctttctctctttctttctttcctctcctcccctactccctctcttcctccttccctacttccccccatttctttttctctttcttttgctctgggtttgctctgtcagtcaggctggagtgcagtgcagtggcatgatcatagctcactgtagcttcaaactcccgggcgcaagcgatcctcccacctcagcctcctgaatagctaggactacaggtgtgcaccatcacacctggttaatttgttttgtttttgtagatactggctctcactatgttgcccagggtggtctcaaactcctgggctcaagcgatcctcctgcctcagcctcccaaagtgttgggattataggcgtgagctaccttacctggcctcaagtctgtttcttgatcagtaagcctggtaatattgggctgtcttgtgtgcatatatgtagatgtacatgcatgcatacacatatattccactttgggtggaatggatgaatcttttgtttccagtggaaggagttctttgagttacaaatagtagaataagggctttcagtttaaacagaacccacatgagtgtttcattaatcatgttcacgtgttaatggattctcttgaggcctttggagtcattgtttttgcaatatttccttagggcctttttcttcagtccagattaatctaaaatacattgcactgatccagagatgtcaccaaattctcctgaaaagccctttgactgtatttgggctggcctgtgcttttatggaaaaatgctatctcactgctgatgaggtttctggcattagcaaagatggccttatacatggtaccacaacctatgtggtacgatgttaggagccctgataagatactctgttcccctacaatctgctccatcaagccagtgaggaaggtatgtaggcattaggaatgcctaaaatgccacaattagaaaattcattccttggagggcttctgttttctgctgaaagtgcaaacacccgtagaaggctttaagaatctctcaaaccttcccgtgaataagttcacctgggagcagatttttggggtcagggtcgtgagccatggaaactctggccatgtcatggggatctgagggagagagaaggagaggatttttagacagcggtgggggaagtcaggcggaggtgggaccatttaactagataaggctctaatcgtctcattcctggactatcagaacagccttttaagtttaagttgcttttccctctttgtaaccttacccaccaaactttgtgaagtgttgagtgcttatagtaaacagagtgaacataactcttcccagggaagaactggctgactttagtttcttggtttctggaaggagatgggatagttttattggcttgcttgaggatagccaaacggttgtggacaagagggcttgtttcctgacaagtgttattctgccttaagaatacaaagataaatggtctaccagagcttcagtacctgtttgttgcgttgcatttagtttggagtgtttgctctgtgcagtggagaatactttggagggtggtaaggtctctctgtttcattactggaaaagaataggagtggggtcatggcaatggggtatttcattcctctgtgcgtgtgtgtgtgtgtgtgtgtgtgtgtgtgatggagtcttgctctgtcacccaggctggggtgtagtagtccaatctcagctcactgcagcctctgcctcctggtttcaagtgattctcctgcctcagcctcctgagtagctgggattacaggtgcatgccaccgcgcctggctaatttttttgtattttcagtacagatggggtttcaccatgttgcccaggctggtgttgaactcctgacctccagtgatccaactgcctcagcctcccaaagtgctgggattacaggcatgagccactgcgcctggcctcattccttcgtttgcaggggctggatgtctaggtttatggaaatctattctcattcaaacagaaatagggtaacaacttaagataataaagtttttctttgaatgaattagaaaggcattattgtatgttattttagtcaaataatatttttgcatttattgcattcttctgttatataagagaaagtttagagaattaggatagtgaatacttttaatgcttgttttttttttttttttgagatgaagtctcacttagtcacccaggctggagtgcaatggcactatcttggctcactgcaacttctgcctcctgggttcaggagattctcccagctcagcctcccaagtagctgggactacaggtgcatgccaccatgcctggctaattttttgtatttttagtagggatggggttttgccatgctggccaggctggtcttgaactcctgacttcaagtgatccacccaccttggcctcccaaagtgctgggattacgggagtaatccaccacacctggcctttcatgcttttaggaaaaatttgaaattcttttaaacgtgggtcctggagaatcgctgaacttcctttttttttcttctattgagacagaatttctctctgctgtctatgctgattacagactcctgagcttaagagatcctcctgctatggcctcccaaagtgctggggttacaggcatgggctactgtgctggccaaactttttgaatggaaaactttttagcttggtttcagttgattaatcctcaatttctttatgtccttaattctatggcttatgccaaggcatgagttgaggtcaacagaaatccttttatgatgatagaaagataacgatgtccaagtttaatgtacagtataatgacttaaggtcaattctgggaaagcctgtatgtttatcatcaatttctttttggtgatggaattatacacctacagtatttcatgtaaaactccagaggatcacctgaaatatgaatgatttacaatggacaaaataataaaaatgctcatcgtaggaaaatacaaaaatatataaacaagaaaataaacataaaaatgcataaacaagaaaatagcaagttgggagcaagcttgcttttgactctagtttgacctgtgtttctcagaataaatcttgattttcactcttgcccttgaccgaagactgggccagtggaggcaaccaccaccatctgtgctttcagtgttgagcatcctaccaagcaaggtggcttagattttgaaagttttctctcagtcagatagtaggggaacaactcttagaatgttagaattagatgagtagtgggaatgccctggaaggaaccacccttcatggagggacggctgtgcttcaggcattgtgccagaggtttacagggacctctttaatcctcaccgtaacctgattttgcaggtcagaaattttgtaggtaagaaaactgcatactgtatcagtttaaattcaggttcatcaagctaaaccagttcagtaacaaatatttattgagtgaaggttcagtggtaaatgagacacaaacagttcctgccctcatggaacttagagtttggaatgacacagggacagtcagtgctttgccagagttgaaagccatgcatctcttggctttctggcgattgctttttccattggtattcttattttagccattcttactgaatttaatttaaattttacttaattattataatgcctatggatccatgttctgcatattagctcactcatactcatccaagactgtaactataggtacccaacacccagaattgagatggccactgaaaactctattcttgaccaacactctaatatcattttattttctttaattgcctttgtaagaagtataatacaaacaaaactccagtaagcaaatggctttaattatttgtgtgtcagttagtagagattttattgtatatattttctggtatagtttattactgaagccgtacttctttttagcattaaaattctaaaattttatatttataatagtgacaaaggtttttactgtaattactaatgatatttaaaacacagattaggcaaaatcttaggaaatataccctgctttttttccttccatttctggcaatcactgcagataaacttgtaattttattcatgttgctattaatatggggacattataaattcatcatgtctgtgcagaaacctgaacaccactttatcacacgtgggtatcagttggtgacaatgtaatattgttgattctgtgtcaacaagctattgaattgtttcaagtcatcacaatcacattataacgtgaagtgataacattgacagagcctgaaagtggtttggagacctcctcatgctatttgagcccaggcataacaaaccagggccaaaggactcctggtgcaaagataacctgctggtgaggcatgttctgaagttctttttgctcagtctgttaaaagcaatccagtaggggagacacaggaaatttaaggtcattctaccatgagagtatttgcaaatataataggtccttctttacagatttacaaggcaatgatttggcattacatttgtttctctatagggaaattaaaatcatgattatgctatattagcaaattgcttataaaacaaattacaatttttgattgtaggataagaagtactcttgtagccccctccctccctccctccctcccttccttccttccttcgttccttccttccttccttttcttccttccctccttccttccttgtagatctctttgtcatcttttggacatcatcttagtttcacacatatattctaacacatcatatatagttcgtttattgagggtaggctgggtactaggaggtcctgtaacaggccctgggaatacagaggtcgcttagtctcatctgttctgttccttatatttcacatatccaggtcgtggcaggagaattttgaactttctgcttataaaatcatttccaaggcataacttgtcactaaaggggaaaaatacaaaaatattgtgtaaaacatcagcaaaaccagtttttaaaaaagagaatgacatattacatttttattaaaaatgttgacttcagtttactagatgattaattatcagtacttactgcccaagaaaaggcttttaaacttattgttggaaatcttttggcactcttgctgcacaatatttcttaatagtttaagaaaattcttactctgttggcagaagccatacatgcccatcactaaatggtcaaggtcgaggcatgcctgtgtgtgcaactcagttattcatctaacgaatgaactgtgaataaagtttagtgtttgtgtgaataacaatgcaatgagcctcaccatcaccaagcataaacatttctgataagagttgtcatcagagttgcttattgatgttgaagcattggtttcgttagagtaaattatgtatatatatgtgtatgtgcatgtacgtatgtgtgtgtatatatatatgtatatacctgatctctactttctgaaaatttacacatttagaatgggaggttatttagttcctagcatgtaacttgtgacttataaacccacttagcaattacatactgcttcaatctgaatttgggccatagctaaataagggtgagttgccattttgtaccaaattgaggttaaggtgcaagatgccaggtgtcatttaaaccaaggctaggatgcaagatgctaggtctcatgaaatttagtgtctggacactgattgctaaccttgacatctctcctttctgccctctttttctctgtctccctttttctttttctccctatttttgcctcttctctctcttctcgtttctttagagcttgttgttactattgcgatagtcaagaactaaataatatggagttagggagaaggaatacagcaaggtgtttataagattcagtcaagaaggtccatttagtagttataaataatttagcctatgactatggggaattaccaaatctaccaattgagagtcaatttcttctcttcttgttgctattgtcataatttgcagtatccaactattgttcacttgataacctggtgatctcatctgattattaagatgaccaaaatgaaagtgatgtttatagctttaacatatccatgtcagtttgatttatggttcaacacttggacctaattaatcaggaaaaccctaatttgatgctgtctatcaatgctagtctgaaacaccattcaaaagccttaagcaagaaagctgcctttctaaagtctctcttgtcatttatttctcatgaatgtccattttcttttttagtgtttgattccactcaaccattttccagtaatttatattgctaatcaaaaagccgtataggaattctctgggtgactgggactggaaatgtgctctgaaatgggaatgatttgtagtttttgcacagggtgtgtcaaatcatgaggtgctgaagggcatgttattcttgtaagtagtttgattcattgggtccttatttacctgggcaggcaggccatcttaaattttcttctgtttggatagtgttcttttcaacatcctgtaagtgtagctcttttaccatgaaagatgtaaataaccagttagtctctagtggggattggggccagaggagaagaaagtcttgagcttagtttccttccacgtgtagggaaggttcctctccaggaacctcagtgacttagctgatagaggaggcactgcatgagctattcagggggagcacagaaaagactggtacaaatacactttcagtgctttgatgctggctaacaggaagttttcattgctcagcgttcttggtaaaaacttggacattcttttgaatgtttgagcgcttaagtgattgtcaatttatatttttaattttttgtgaatgtatgcagttgggatggggagaggacatttggagaaattatttttttgctctgataatgaatacggacgggaaaagtttgcaccacaacgcagaggtgcttatgactgtttttcatagccacaatcctttacattaatgatgaactacttgaggatttcagatgcttgtgtttttctagtgtggtcccctccccttgaaggggtagacctgtggacgtgtgatggaatggagcattccagggtgaaacaggccttcctggaaattagattctttatcactctcccaggggagttcatttcaagttgctggtactagcagctgcagcgtgagattgcccaatcctaggtgctcttattgatgggtgggaaggagtgggattgctgtttaagaaattttattatctttagaagggaagaatgtattatgttttttttttttagatgatctctttcatgtgggctaagataattttgagctctgactgtccaagctgcttagaggttctgagttgttctccactgggggtggtactgccactctcaagcggcatagatgtgcctgggagtgtttttgtcaccgtgatgtgggggagcactactggtgttccacaggtgggggtcagggatgatgtacatactgctttgaccaggacagttctgcaagatgagtaattgtcccaccccaaatggcgatagcgtcctctgaagaacctctgagaagtgtggctttgcttataatgttctgtagtgctgatggactgcctgattgtagaggtgagaggtgcataatgaaaaaacaagtgggatgtaagagccttgggggagaaagacaggtgactagtgtttaaatggaaatggagaagggtagctcagttataaatggctcagtttaaatctctcattgctcagaattgagaggctgctcaagtagtacatctcattctgctgccatttggttattggaaaggcactttattttaattactaagcaaatatttaagtaatctttgagatcaactatcttgagagctgactggattctgtggcctggatactcagaaacatccagcttggagaggatggtgggggctggtcactaggatgttgttggcaatgccctaaggcagcggtccccaagctttttggcaccagggactggtttcgtggaagacaatttttccatggacagcagggtggtggtgggggagggatggtttcgggatgacactgtttcacctcagattatcaggcattagattctcataaggaatgcacaacctagatccctctcatgtgcagtttacaacagggtttgtgctcctatgggaatctaatgcagccactcatctgacaggaggcggagctcaggcactaatgctcactcacccgcctctcacctgctgctgtgtagcctggttcctagcaggccacggaccagtaccagtttgtagcccagggactggggacccctccctcatggaacctgttcgtagtttgccatgcaagcggacctgctttggatgcttctggggcagctggaggggctgcaaggtgagacccttctctgctagcagcctcttgcctgcacctaccagcctgctcactgggctcagggttggggtgaggttctggggattgaagtggagctccaagctcttttcatggtcaaagtctgtatgctagttcaggctttacctactcagagtgatcttcacttttaatgcagttattgtctgagtaatcaccctcatactcatttgacaggcactctttggcttggcactgaaagctctttttctccatcttctcagccttgttgcctaccactctccaagaggtcatcactgcttgggtcatacttattagaccctcacccatgctaagcttctgtcaagtttttgttcttttttttcttagagacaggtttcaccatgttggccaggctggtcttgaactcctggcctcaagtgatctgcctggcatggcctcccaaagtgctgggattacaggcgtgagtgatcacgcctggcctgtcaagttgttttgaccctacacacaaagcctggtctccctcttcaccttcccaaatcctgctcattcacaaagacccagtgtagtcttataattctttgtgaagacttctctgatgacaccggcctgtagtgttatttttttcgccaaagtcagttagtttttattatctccattgcttatttggaaccaaattgtctgttgtcagaggcatagctttggaatcagactgcctcagtgtaaatctgtgctccactacctactagctgtgagatttgttcaagccttgtcgtcctcatctatgaaatggggccattgataccatctcacaaagctgttgtgaggatatgtaaggtaatgcatgggaagcacttaaaatattgctggcaagttctgggtgaacaaatgctgtcatttgctttgcaggacatgaaatgatgaaataagtacaggctctggagtcacacaggtcctggggctaaatcagacttcgacattttctacctttgtggcccttgggggagttggttaatgtcactgaggctcaggttccccttctattaaataagtataaatctcacatcatacagttctgagaggatccagtggatatgtataaagctttatatattgtataacacatagtaggtactcagtaaacaatatcagctgttgttattgcatggatatttaatttataacatataaatcacttttgcccccaataaacttataggctctgtcaaaaaaggaccatatctttttatttatttatttatttatttctttttttttctttttttttttttttttttttttatcccggcccgttctcaatgagctgttgggtacacctcccagacgaggtggtggctgggcagaggggctcctcacttcctagtaggggtggccgggcagaggcgcccctcacctcccggacggggcgtctggccgggcggggggctgacccccccacctccctcccggacggggcggctggccgggcggggcgctgacccccccacctccctcccggacggggcggctggccgggcggggcgctgacccccccacctccctcccggacggggcggctggcccggcagaggggctcctcacttcccagtaggggcggctgggcagaggcgcccctcacctcctggacagggcggctggctgggcggggggctgaccccacctccctcccggacggggcggctggccgggcagggggctgacccccccccacctccctcccggacgtggggctaacccccccacctccctcccggacggggcggctggccgggcggggggctgacgcccccacctccctcctggacggggcggctggccgggcggggggctgacccccccacctcccttcccggacggggcggctggctgggcagaggggctcctcacttcccagtaggggcggccgggcagaggcgcccctcacctcccagacggggcggctggccgggcggggggctgacccccccacctccctcccggacggggcggctggccgggcggggtgctgatccccccacctccctcccggatgggtcggctggccgggagggggctgagccccccacctccctcccggacggggtggctggcccggcagaggggctcctcacttcccagtaggggcagctgggcagaggcgcccctcacctcccggatggggcggctggccgggcggggggctgaccccacctccctcccggacggggcggctggccgggcggggggctgacccccccacctccctcccagacggggcggctggccgggcggggtgctgatccccccacctccctcccggacggggtggctggcccggcagaggggctcctcacttcccagtaggggcggctgggcagaggcgcccctcacctcccggatggggcggctggccgggcggggggctgaccccacctccctcccagacggggcggctggccgggcggggggctgacccccccacctccctcccggacgtggggctgacccccccacctccctcccggatggggcggctggccaggcggggggctgacccccccacctccctcctggacggggcggctggccgggcggggggctgacccccccacctccctcccggatggggcggctggccgggcggggggctgacccccccacctccctcccggactgggcggctgccgggcggagacgctcctcacttcccagacggggtggctgccgggcggaggggctcctcacttctcagatggggcggatgctgggtggagggtctcctcacttctcagacggggcggctgggcagagacgctcctcacctcccagacggggtcgccgccgggcagaggcactcctcacatcccagacggggcggcggggcagaggcgctccccacatctcagacgatgggcggccgggcagagacgctcctcacttcccagatgggatggctgccgggaagaggcgctcctcacttcctagatgggatggcggccgggcagagacgctcctcactttccagactgggcagccaggcagaggggctcctcacgtcccagacgatgggcggccaggcagagacgctcctcacttcccagacggggtggtggccgggcagaggctgcaatctcggcactttgggaggccaaggcaggcggctgggagatggaggttgtagcgagctgagatcacgccactgtactccagcctgggcaccattgagcactgagtgaaccagactccgtctgcaatcccggcacctcgggaggccaaggctggcggatcactcgcggttaggagctggagaccagcccggccaacacagtgaaaccccgtctccaccaaaaaagtacgaaaaccagtcaggcgtggtggcgcgcgcctgcaatcgcaggcactcggcaggctgaggcaggagaatcaggcagggaggttgcagtgagccgagatggcagcagtacagtccagcttcggctcggcatcagagggagaccgtggaaagagagggagagggagaccgagagggagaggggagaggggagaggggagaggggagaggggagagggggagggagagggagagggagagggagagggagagggagaggcagagcaaaaaaggaccatatcttatttttcttttttcttccactgatcctaggacaattgcatatagtagttatgaatttatttgtggctttagtgaatctggcatcatattcttttggtccttatttatttattcatttatttttgcacttaaatgatgtgtctacatgataatgcatcaatttgcattgtgggttttgtccccaaatctttgacttcttgaaatgtccttatagtattgttttgctctaagaaaacatcagggctctgaatcaataattgggacaaagcagtctattcagtggtttgtaaactggattaaaaaaaaaacccaaaagaattcctgccacctatttgatgatctgtaaggaaaaccagacagttaaaatgttgcacagaaagagactagcaggttggtttgctgttcctgtcttgtttcagtttcattaactgaatccttgactattctatcaatttgacactagacagggtagagtgctccatacaatttgttacccttggctatcatcactatagtgtaaagttttggaaataagcaggtgactctaaatcttcaaaaggggactggccttgtttatgtgggcaaggtatgggaattgtagtgaactgtcagccaacttatgaatatcagaaggatgtctatccataccaaaggaatcaaaattaagtatagaaaaagtgaagcaaaaattatggataagttaaggaattgcctcttaaatttgtttgtttctttgagttcagtgaaggtggaactattaaaatgtgatttactcatacaaatttttaaaaagaggactgtacctcctcaggtagaccaagtgtttggaaggaccagcatgtgttaagaggatctagcggggaaataggatttgccacagaaattaccttactctgttaactttggacaatgttccattgactaccacttgtctttgtcttataagaatagaatttatggaaggagaaagaaacttacaaggaacgggtaaaagaatgaaactgctattaatatgactcaatgtttttttctttctttttttttttttttgaaaaaaacttctagatattccccttttttcagattattccagattccatttttctttctatggatttaagatggtaaatttctatttaaagtctcattgtttgctctgatagctttctatatctctgatatataatggtctcagcaggctgagttttacaaagagaattctacacttcctgacgaacatgcattagctattccataagcacccggtgctgtgccagaggctgtaaatgacacagaggaatgctctcaatccagtgttgttccttgctgtggaaaacaaacaggcaaatgactcctcttctctgggcgctatctgttactctaatatcttatcttaacacattcttagtccaacacttacccaggaagcttgggatatggctacttatgaagaaaggattactctttttttttttttttcccctagctttgggctctttatgaggttggaaaacaagtttattcctatgtctaataaaattttactaccgatttcaaaacgcttaaattttttttgcattgctttcaattgctgcaatttttcctaagcccaataattttttaatgctatgttagtcaccaagtaaactactctttttctccaactgaagtatataagcactatggattctatgccagcccaataatgaactcaattaatgttaattgagagcagctttgggggaaaaaaatcagatttttacattcattcttgagtttagtggaataaacttttttttttggtgaaagggaacatagagtagtggtcaagtagcacgaatgctggaatcagagctgtcagattcaaatccttgctttgcacatatttgctgttggatcttgggcaagttaccgaattgctctgtgcttcaatttatttatttgtaaaatattcataataacagtatctatttcatagggttattatgaggattaaatgagctaatgttggcagagcacttagaatggtgtgtgccatttaagtgctatatgagtacttcttttcatctttgcaccatctattctgattgatgggacagacaggggctagtgctggagagatagggtgttcatttggttccgatggttcctttgtgatgattgcctggttcttaacaaaaggtttttatttcaatgtggattgtattttcctcctttcctccttggtttttactagagggatttttttttttttttaatcaggcagcccccaaaccagagaggctcctggagaatgttttaaagttacataaatgattatttgcaagattacttcttggctaaaactggattggttgaatgtggcagttttgagactattttctgaacaaagttttaaagctggttctatgtagattttttttttctccctgtgggtggctccaatgtatgaaatcatccccttagctttttttttttttaaatcttcaaataaataacaaaatgtagataatatctagataaaacttttggagggcttgtgagtaaaggctacttatttaaaacaaaacactcaaaataaattgcatatagactaattgaagtaaggggcacctgcaattgttattagacctaatctagaccttttcactagtggtttatttttggtttatttttaaacaacacatattccctttatgagagaatgagcttctgaggccagtgaagcattttggctgatggctgagaggtcacccagcaatgataaagtatcagtttgttttttctggagagatatttccaaacaatagtcgtttgggagttataaacaggcatcgaagttactactgaaaaggtgaatttgacaaatgaattatagatctgttgataaattgagtaaattggatttgatatattagataatggagtgaggagatcaagtgtgaaaatcactacctataaaaattagttaattgcaacatttccccatcagtttcatttttcatatgtgtgattttaaataattgactttgaagtgttttataaaatgacttttgagtctctattttgtgttcttttcatgatgtgtttaacttggtattttagtttggcaaaaacaaacaaatccccccaccccactcctcaaaaatgggacttgtaataaaagttgcttaagaaatagcattaattatatatattttcaaaacaggcaatatatattgttctgataatttcctcctaaatactcagtctctaaatttatatttttcttttctccatagcaatatgaaactgtctgtaagaggactgttctttatgattgttataatttttcaaccagaagatactacctttacaacctcagatactaagggagacaaatgtactgaacttacaaatgtattatgttggattactaacaatagacctaattgataaaagtgatttaatatatgttgtgttaatagctaaacctccaaagcccctaatctcccatggaaatattgctttgtagaacaaaatccaatgagaagttctgggattccagagtgaatttgtacattccttaggggcatttttgcaagggaggttgttgtgttttaaaggtagttgataagagacctgcaccaccaaccccagacctgcaccaccaaccaccatcatgcattagtctatagaaggtatttgggtgtacgtactcctgtaccactcggtaccaccatttagccaagcgaagtttctgaccatttgcagcatacattataaatcaggatgtcactaccagacaatcagatttgaacattccatgaacaaagtagcctatataccctagaaatagatcacttaactatgtttatgtcatgctgttgatatgcctgcatttacacaaatcaggatagcacattgcttatttattttaggagtaggtacttgatctgtatatttacctaattttggttaattagccaaaaattgaaatgggtaatttagcatgattgcttaaatacatggggaagatataattattcttccaactgcaaaaatttctcctttatcccttgggtttgtgaaagaataaaataattttgagtcttctctaagtggggctggtagtggctgctttctttgaaaaatttttctatgtggcacataatgcttgggaaggtcactggccaggtatttggggaactttgtcccttggggagacctaggaaaatcacaggatatattagttcagtgaagtgagcttgtttaagttatattgtccttccagtatcactagggactatcactgccacttggggtgtcaacttttggtgtcaagtttgtatactcttgttggctgcagagattttgttttgttttgtttttggctctttggtttaaaaaaaattgtttgcagagatgagcttatagatctggcaagttataatttaatttttaaaaattaagacaaaatattagtctgaatctaagaatgaaaggccataacttgctatatatgatttagtaataaaaaatcacttaaaaaataaggtgaggaactcaagaaagtatagtcaagcaaatgaaaagttactcacgatgttatcaatcagagataaccactgttaacattctggtcttttttacgctttttttttttttgcatatgtaactctgttatcagtaaaaatttacgtccttgtttttgttacattaaattataagtatttctctaagtacttagaatttctccataaccattttttaagttactaatatgtcaatataaagatgtaaacaaatttaatccttttattgttggacatttaggaggtttgcaacttcctttgttataaataatgttgcgatgaaaatctttatacataaatctttgtctacttctttgattagttccttaggaaaaaaatccttgaagtaaaagtactaaattaaagatcaagtatttttaaaaagcaagatacgtgttgtcaaactgctttcccaatgagttccatcaagatacacactaatcaactgtgtatgaaaatcactttcttcccacggatgttcaaataaatatttttatattatcattgggagaatgtttacctaattttctaatttgcatttctttgattatctaattagttgaataatttttcattttatcaaaaatttatatttcttcggttaaatatctgcatggcataagtttttaaaatttctgtctattattgcagaatgtgacagtgcgcattttcgctgtggaagtgggcattgcatccctgcagactggaggtgtgatgggaccaaagactgttcagatgacgcggatgaaattggctgcggtaagtgaggaggggccaggctaagttctattttgagtaacctaagtgcttcctggtgatttcagctgtaacaaagagaagagctatgccttttagtgacagagccaggtctgggcccaagtcttttgagatctgtgtggttgaatagagaactgatggcattaacaataatttcactcccttctgaggtaggggttcaattcacattgatgatagagcatcagtttctatctcacccttatcccttgaccacaactttgatatggaaacatatttgggtgcagttttctggagtctgtaggtgattatttctaatattcactctgtaaattttgtgtacccacaagaacaaacaaaaaataatgttatctgaactactgtgatttgtaagtcaaagaggagtccatttttatgtaaaggatgtagaataacttgtgtcaattaccataaagaaatcacagaattggttagtgtgatttatgttttttaaaaattctagttttaaaaaatttgaaaaatacgataatgtagtaaacttcaaatctaattaattataaaatgactttcacattcattttgtcatttagttttctcactaatcttctgaggtcggtttcagattagtaaattgagactcggagaagttaagtcatttattaaagttcttacagttggtaagtctatgcacagatcccattgctcttcccaacttcccataggtgatcaatcatacatctgcaatttccttcatcccagcaggtgaactaatgagggttatctttcaaaaatcaggaaagcaggtgaaaaatttttgttttgaattgttggccatgttatggcataccatagcagtcaaactttggtgtgtcatttagatgacaacgcatttgaaaatgggaggaagggtaaggatggggttctgtacagtgctcctcaaatactcatgcacaaatggatcacccaggagctcattaaagtgcaaatttagattccatattttgaggtgggacctcagcttctgcgtttctataaacttcctgatgatgttgatgctgctagtttgtggactgcactttgaacaagggactaaactatatttgtagagacacaatcatgtgctaactatttgcctcctctgggcttactgagttcattttgattaaacaataaaagcaaaaaggcaagggcagtgtatctggggtaaaggaataagtgaacagctatgccaacaactcttcagagattgttacctgtattatattttattgacctgtaaaaataataacaataacaacaatatcaatgacgatagtgatagcaagtaacattacatggcgctttcacatacattatttaacttatttttcacaacaaacagtgagatgagtatagtccccattttatgatgcatacattgaggttcagagaacctgccaaagatcttaaaggaagtaaatcatggaaataataattatttgattttgggttttctttcccaaatctcatgaattttccagttcatcatgatactttactattagttattatgaaacaaatagtttaacagtaactcacagttaatgtttacttgaatgaagcttttaatctaatacctttatcataatttttttgtgtgtatgtgtgctgtttgttttattctctgtgtttttaagttgctttggttcatgagtttgttgtgatgctgttgctgagcttatttgacagtgaactctgactggcgtccacagactctagtataagggttgtttactatttgccttcaaataaattgagcaggagtttacatgatacactcttctggaacaagcattgcttgctagtataatggggaggatgattgccataatgagtcctcttttggtttgttttagctgttgtgacctgccagcagggctatttcaagtgccagagtgagggacaatgcatccccaactcctgggtgtgtgaccaagatcaagactgtgatgatggctcagatgaacgtcaagattgctgtaagtgtttggagaggaatcttgctttggctttgtggacacctaaaacccaacctgtcgcaaagaagttacacacaatgggatgattctttataaatgtggagcagggccttaaatcataagggaacctatgccagcaatctcattcaggggttggatgatattgaaagtacggatgtactgaagaattatgaatataccccagcaatttggaagtgagataggttcccaatctttaattttgattatgttatgctcaagaaaggaaccaaatatttattggagtgtatagctgggtgtcttcatgtgtgtggttgacagctgaatgagtcctttggctctgtggcatactttgtattcaaaccttccactccttctgccccaatattaaattctcttctttttgactgagtggaagtaggtaggtttgttggagggcttcttggtggttacttcagtgactgctgccacagccaccatagggagagcttgaacaagaaagaaaatagtagcgatgaagcggatcttggcaactgcggcatccctggacattgagggggtttggttcagtaacctggaaaaaacctttaaattctaatttctttggaatcagactggaaaagactgttttaataggtctaacaataattttattttatttatttttattttattattatttttagagtcagggtctcactctctcacccaggctggagtgcagtggtgcgatcacagctcactgcagcctcaaacaccggggctcaggtaatcctcctgcttaagcctcctgagtagctgggactataggtgtgcaccaccatgcccagctaatttttaaattttttgtagagacacgatcttgttacgtttcccaggctggtctggaatcctgggctaaagtgatcctcctgccttggcctcccaaaatgttgggattataggcatgacccccccatgactggcctgaaaataattttagatgagaagtaatgttgggtaaatataagatggcgacctatgagcaatttgtctatcacatgtatcattccattcctttctctattaaggatatttgtataatttaaaatcattcttgtatcattgtggatgtttttggctgcaaggaaagaaaacacaactcaaaaaagttaaacaaaaaggggatttattatctcacataataagaagcctaactatagggttgttccagggttgattaattcccagctcagaaatattatccagctttttctcacttttttgctctgccatatttatcctattggcctttcttgattgcataaaagctgctcaagtctcaaaatttgcatcctgaaggcctgacattctctcaggcagagaggaggttcttaatagatagatactaaatgcataaatgatgggttgttcatctttaggctatatagttttgagtctattttctcttactcctctcacagagtgggaagaaagctgagctttattttgcgattcaatgtgtggtggatgaccctttgctaataataatactttacagaggggattggaactactaagggcaactgcttgggaaaagagactggagataagtttatagcagtcattttaaaacaatattgcatatcattttaaatgactatacatttcatgaggcaattctcccatttttaatgatataaaaattctccattagatatcttttaaccacaaacaaaatatgccacctctgtattcactaaagttaccagataactcctgattgccaatgggcacttttccttccttctcacactggatgggcatttagattgcacttgactctggagaccattcctccttcttgacaccactcccttggctgccatgactcccagcagtcctggctctcttttgagctgctttggtcattccattttattttcctcttctactcagcccttgagtattggtgttgctcagagccctgccctgagcagcttttctcattctggacactctcaggatagtctcaccattctcatgactttagtgaccctctgtggcctgatgagacttaaatctgtgtttacaacccagatttttgcccacacttgagtcttgtatactcaactacctttggacctctgcaagttgccttgaactcaaggtgtcccaactgaaaataatcatcttccctcctgaactggattttccttctatatttgctagtctacatattttatctttattaatagaaatagcatttaacccactatgaggcactggcagaaaatacaaaatcagtcttaaactattggaaataggcagatggaggctctcttacttgttgaatttgtgaaacatatttcataatgaaagtattttattagatgaagaagaaagattgctgtaagtgacaggaaagatataatcaattaacatgaaaaggctatcacaatcccctaggcacccacgctagaaacttggaggttattcttgattccttcctctttttcactgcccacattgaatcaccaactcctgcctaatttgcctcataaatatttctaaagttaatctcttcatttctctctcttttatttttattttttggcaaggacagattttttttttttttgagacagggtcttgctctgttgcccaggctggaatgcagtggtgcaatcatggctcactgtagccttgacctcctgggctcaaatggtcctcccacttctcagcctccagagtagctgggactacgggcgcatggcaccatacctggctaattttgtattttttttttttttttttttttttgtagagatggggttttcccatgttgcccaggctggtctccaactcctggcctgaagtgatccacccaccttggccccccaagtgctgggatgataggtgtgagccaccatgtctgacccatctctttatttctgctcccactgccaacatctctcatttgggtgtcagcagtagtctctgggttggcctccctgcctccagttctgtggatccttagattctctctgacactgatgctgatctaactaagattctttggtagctctccattaattccaggagaaagttccaattccctaacacggtttacagtggcttccaagatgtgactagtgcttattttcctatgtctatcatttgctattcttgccttgaagtggccacttgggcacagcagtgcttttagttcctgtgggtgtgccatgctgtgtcctagccttttgtctccgtgcaagctggctgaatgctgaatgctcggttctagacagtccttctttgcttttggcctacctgactgctgcttctttaagacccagggaggtgtcactttttcaaggaaactgtccccatccatgctcccatcccagagtgaattaagttcctggattgatggttctatcattcctgtgtgcctataatccactttcataattgttttctaattactccttagtgtcccctagaagactatgagcttcttgagggtagggattgtgccttattcatttgcagatccccatattgctatactgtgtggtacattataggccctcaacagatgtttgtgtaattaatgaatagatgaatctcagcattagataggttgatggaattatataattttaatttgtttgctctctacatttgaatgagcttttaattgcttcttcgtaagccctttgaaaacctaagcacaacatttagaattatttgggcttgacgtaaagaagaaagccaaggtaattgaacgagcactgatacctgacccaggttcttttcatattttgtttgagacaacccatgacttgccttctcgggaataaaagaaagttctttaattttatgtgaaaattggcaatatatacttaaataaattatttggaaatttaatgaggaagtattaatctctttaacctttttcagataaaattgtgtctctgccatgggcagaattcagacacttaagtgccttctggaaaaatctatctattctgcctttattaatagaagtaaaattggacccacaggtataaggtacttagagaaaatatgaaattatttagtgttagaagtaggctgacttgaaaaattttgtttgctgttccagaattataagacaccattttgctaattaaacagaaagaaggaacaaaatgacaaggaagatataatcaattaagcatggagaagggtgttaattatggttttataattattatatcttatcacatgataatttctatatgtttgaattttcaagtaccaccttgaaaactgtcactgtctacttatcttttacatatttttttttttttagagacaggggtcttgctttgctgcccaggctggagtgcagtggcatgattatagctcactctaactacataaaaagagaagttttttttggctcaagtgatcctcctacctcagccttccaaatagctacgactacagctacttggaagtgagccactgtgcccagctaaatttattttttttttcttttaagatataaggatctcactatgttgcccaggctagtcttgaattcttggcctcaagtgatcttcttgcctcaatctcccatagctgggattaaaggcacgagccactgtgccaggtttacttgtcgtttgaaaaggtttttcatgttaagttttgggggtacattccttaacagatctaattttatcagaaaaccaagttttgctgaacctaaatatctatactacatataagtaaaagaagctctgtaggctgggagcctcggatccctgacagttttgcagaacgctgatatctatggactctaaaatagacttcatttatagatacccacggaccactaatggacaaaaacatgaatcaatatgtattgtggcattcaaatcctagcgctttgggagaggagggaggttccaagatggccgaataggaacagctccagtctacagctcccagcgtgagcaacatagaagacgggtgatttctgcatttccaactgagctttgaagagagtagtggatctcccagcacagagtttgagatctgagaatggacagactacctcaagtgggtccctgacccccgagtagcctaactgggagacacctcccagtaggggccgactgacaccggatacggccaggtgcccctctgagacgaagcttccagaggaacgatcaggaagtaacatttgctgttctgcaatatttgcagttctgcagactccactgatgatacccaggcaaacagggtctggagtggacctccagcaaactccaacagacctgcagctgagggtcctgatggttagaaggaaaactaacaaacagaaagggcatctacaccaagaccccatctgtacatcaccatcatcaaagaccaaaggtagataaaatcacaaagatggggagaaaccagagcagaaaagctgaaaattctaaaaatcagagcacctcttctccttcaaaggaacgcagctcctcaccagcaacagaacaaagctggatggagagtgactttgagagttgagagaagaaggcttcagacgatcggtaataacaaacttccccaagctaaagggggatgttcaaacccatcgcaaagaagctaaaaatcttgaaaaaagattagatgaatggctaactagaataaccagcatagagaagaccttaaatgacctgatggagctgaaaaccatggcatgagaactacgtgatgcatgcacaagcgtcaatagccgtttcgatcaactggaataaagggtatcagtgattgaagatcaaatgaatgaaatgaagtgagaagagcagtttagagaaaaaagagtaaaaagaaatgaacaaagcctccaagaaatatgggactatgtgaaacgaccaaatctacgtctgattgttgtacctgaaagtgacggggagaatggaaccaagttggaaaacactctgcaggatattatccgggagaacttccccaacctagcaaggcaggccaacactcaaattcaggaaatacagagaatgccacaaagacatacctcgagaagagcaactccaagacacgtaattgtcagattcaccaaagtttaaatgaaggaaaaaatgttaagggcagccagagagaaaggtcgggttacccacaaagggaagcccatcagactaacagctgatctctcggcagaaactccacaagccagaagagagggggggccaatattcaacattcttaaagaaaagaattttcaacccagaatttcatatccagccaaactaagcttcataagtgaaggacaaataaaatcctttacagacaagcaaatgctgagagattttgtcaccaccaggcctaccttacaagaaatcctgaaggaagcactaaacatggaaaggaacaactggtaccagccactgcaaaaacatgccaaattctaaagaccatcaaggctaggaagaaactgcatcaactaacgagcaaaataaccagctaacatcataatgacaggatcaaattcacacataacaatattaaccttaaatgtaaatgggctaaatgctccaattaaaagacacagactggcaaattggataaagagtcaagacccatcagtgtgctgtattcaggaaacccatctcacgtgcagagacacacataggctcaaaataaagggatggaggaagatctaccaagcaaatggaaaacacaaaaaaaggcaggggttgcaatcctagtctctgataaaacagactttaaaccaacaaagatcagaagagacaaagaaggccattacgtaatggtaaagggatccagtcaacaagaagagctaactatcctaaatatatatgcacccaatacaggagcacccagattcataaagcaagtccttagagacctacaaagacacttagactcccacacaataataatgggagactttaacaccccactgtcaacattagacagatccacgagacagaaagttaacaaagatttccaggaattgaactcagctctgcaccaagcagacctaatagacatctacagaactctccaccccaaatcaacagaatatacattcctctcagcaccacattgcacttatttcaatattgaccacatagttggaagtaaagcactccccatcaaatgtaaaaggacagaaattataacaaactgtctctcagaccacagtgcaatcaaactaaaactcaggattaagaaactcactcaaaaccgctcaactacatggaaactgaacaacctgctcctgaatgactactgggtacataaagaaatgaaggcagaaataaagatgttctttgaaaccaatgagaacaaagacacaacataccagaatctctgggacacacttaaagcgtgtgtagagggaaatttatagcactaaatgcccacaagagaaagcaggaaagatctaaaattgacaccctaacatcacaattaaaagaactagagaagccagagcaaacacattcaaaagctagcagaaggcaagaaataactaagatcagagcagaactgaaggagatggagacacaaaaaacccttcaaaaaatcaatgaatccaggagctggttttttgaaaagatcaacaaaattgatagaccactaggaagactaataacgaaaaaagagagaagaatcaaatagacacaataaaaaatgataaaggggatatcaccaccaatccctcagaaatacaaactaccatcagagaatactataaaaacctctatgcaaatcaactagaaaatctagaagaaatggataaattccttgacacatacgccctcccaagactaaaccaggaagaagttgaatccctgaatagtccaataacaggctctgaaattgaggcaataattaagaggctaccaaccaaaagaagtccaggaccagactgattcacagccgaattctaccagaggtacaaggaggagctggtaccattccttctgaaacttttccaatcaaaagaaaaagagggaatcctccctaattcattttatgaggccagcatcatcctgataccaaagcctggcagagacacaacaaaaaaagagaattttagaccaatagccctgatgaacatcgatgcaaaaatcttcagtgaaatactggcaaacccaatccagcagcacatcaaaaagtttatccaccatgatcaagttggtttcatccctgggatgcaaggctggttcaacatacgcaaatcaataagcgtaatccatcatataaacagaaccaaagacaaaaaccacatgattatctcaatagacgcagaaaaggcctttgacaaaattcaacagcccttcatgctaaaaactctcaataaattaggtatcaatgggacgtatctcaaaataataagagctatttatgacaaacccacagccaatatcatcctgaatgggcaaaaactgggagcattccctttgaaaactgtcaccactcttattcaacatagtgttggaagttctggccagggcaatcaggcaggagaaagaaataaagggtatccaattaggaaaagaggaagtcaaattgtccccgtttgcagatgacatgattgtatatttagaaaaccccatcgtctcagcccaaaatctccttaagctgataagcaacttcagcaaagtctcaggatacaaaatcaatgtgcaaaaatcacaagcattcctatataccaataacagacaaacagagagccaaatcatgagtgaattcccattcacaattgcttcaaagagaataaaatacctaggaatccaacttacaagggatgtgaaggacctcttcaaggagaactacaaaccattctcagtgaaataaaagaggacacaaacaaatgaaggaacattctatgcttatggataggaagaatcaatatcatggaaatggccatactgcccaaggtaatttatagattcaatgccatccccatcaagctaccaatgactttcttcacagaattggaaaaaactactttaaagttcatatggaaccaaaaaagagcccacattgccaagacaatcctaagccaaaagaacaaagctggaggcatcatgctacctgacttcaaactatactacaaggctacagtaaccaaaacagcatggtactggtaccaaaacacagatatagaccaatggaacagaatagagccctcagaaataataccacacatctacaaccatctgatctttgacaaacctgacaaaaacaagaaacgggaaaaggattccctatttaatacatggtgttgggaaaactggctagccatatgtagaaagctgaaactggatcccttccttacaccttatacaaaaattaattcaagatggattaaagacttaaatgtcagacctaaaaccataaaaaccctagaagaaaacctaggcaataccattcaggacatagacatgggcaaggacttcatgtctaaaacaccaaaagcaatggtaacaaaagccaaaattgataaatgggatctcattaaactaaagagtttctgcacagcaatagaaactaccatcagagtgaacaggcaacctatagaatgggagaaaatttttgcaatctacccatctgacaaagggctgatatccagaatctacaaagaacttaaacaaatgtacaagaaaaaaacaaacaaccccatcaaaaagtgggcaaaggacatgaacagacacttctcaaaagaagacatttatgcagccaacagacacatgaaaaaatgctgatcatcactgagcatcagagaaatgcaaatcaaaaccacaatgagatatcatctcacaccagttagaatggtgatcattaaaaagtcaagaaacaacaggtgctggagaggatgtggagaaataggaacacttttacactgttggtgggactgtaaactagttcaaccattgtggaagacagtgtggcgattcctcaaggatctagaactagaaataccatttgacccagccatcccattactgagtatatacccaaaggattataaatcatgctgctataaagacacatgcacacatatgttttttgtggcactattcacaatagcaaagacttgggaccaacccaaaagtccatcaatgatacactggattaagaaaatgtggcacatatacaccatggaatactatgcagccgtaaaaaaggatgagttcctgtcctttgtagggacatggatgaagctggaaacgatcattctgagcaaactatcgcaaggacagaaaaccaaacaccgcatgttctcactcataggtgggaattgaacaatgagagcacctggacacaggatggggaacatcacaaactgggtcctgtcgtggggtaggggagaggggaaggataacattaggagatacacctaacgtaaatgactagttaatgggggcagcacaccaacatggcagatgtatacatatgtaacaaacctgcacgctgtgcacatgtaccccagaacttaaagtaaaataataataataaaaaaggaattataaaaaaaagaagttttgtaaaaattgagagcaaatcttttttcttccattaggggattatattatattttttagatgatcacgttttcccccaaagctctttgtatgtagacaatttaaaatcccaggataagataatgttaccatgttatggtaattcctgcctcagatttacaggatagctttcacatcatgcttgcgggcatcagttcactggattttatctgttttatccggaggcaaatttcatgaactgctgatgccctgctttcacctatactaatcaacatgggatgaaatcaagctagcttaaatttttttctctttataaaattgatacatggtcaatgtaggcagtttatagaatagaggaaactatatagaaaaaaataaaatcactcatattcatattcacaccactctggaataactgctattaaagctttggtatatttccttcttgtttatacaaggatttcaatgggtgggttgggggtccttggttaatacctatacttgcaaaatttttatttcattaaactttttaccatatagttttaaaatctatattgtattctttacacatgttgataacgtaattgtgtacatagcatgcttgagtgtggacactattctctgggcattttgataacattatacttctgtttttgctttgtaagctcagcttggtggtagccaggtactttaccttgtgtccctatgaactttatgctttccaatatccttgttaatgacaatagattagtctgtgtctagcaataattataaattaagtaataattttttctcttcgcagcacaaagtacatgctcaagtcatcagataacatgctccaatggtcagtgtatcccaagtgaatacaggtgcgaccacgtcagagactgccccgatggagctgatgagaatgactgccgtgagtctgttttagtccttgcactgtatttggtttcacccttgtccctttggcattttaatcaatttgttagatttgttgatggacataaatgcctacaatatgcctcttgttattgcaatctcttggcagattcttttgtggattaggggtgatgttctgataagagtctatttttaacaagacattctaagagtgtcctgccttagtgcatcaagtttctgtattttttatagtaagaaacttttaacatgaacatagattctgaaaggaaggataattaaatacattgagtacagaatcaagtttggtaaattttaactgttattacacagctatagtaagtttctaggtcaaatttctcactagttttcctgcttttatgaactcaacatttttcagattacctttggaaaagtgttacattttgaaaatgtcttttcctataacagcagcatactatatctctttgtaactgatcaccacaaaataagacatataaatcatagtattctatgtataatgtataaatattaccacaccaaaataagaaagtgcaatcatggttcattatctagtaacaggtaagtaaagaacaatcttcctctttcgaggcttatatagaagtgttaggatatgagaagataggaattagtctgctgtgtcagtcctatagtccatataattgtctttaatctcaggcataccacagtttctctctctttctgttttttattttttatttttgagaaggagtttcactcttgttgcccaggctgagtgtgatggcatgctctcggctcaccgcaacctccacctcccaggttcaagcgattctcctgcctcagcctcccgagtagctgggattacaggcatgcgccaccacgcccgactaatttttgtatttttagtagagatggcatttcaccatgttggtcaggctggtgttgaacttctgacctcaggtgatccacccgcctcggcctcccaaagtgctgggattacaggcatgagccactgtgtctggcccctagtttctctgaaaagttcttacaagtctagcgtttatgaatttttccagaagttccttgagtttttaatatatatatattttaatatatacatataacatatatttctgacaggccttttcgtgcagtcctgcatttcataaatttactatgtgctgtataaagatatagtcatgtgtcatttaatgagggggacacattctgagaaatgtattattaggcaattttgttgttgtgtgaacgtgatagagtgttgttaaacaaacctggatggtatagcctactgcacacctagggtaaacagtatataccctaggcatatactgttgctcctaggctacaaacctgaacaccatgttcccgtgctaaatactacaggcaattggaacacaatgttaagtatttatgtagctaaacatatgtaaacatagaaaaggtacagcaaaaatatggtattataatcttaggggaccactgtagtacatgtagtccatgcggtctgtcgttgaccgaaagagccatatgcggttcctgactgtacttccttttgtttgctcttaaatttatatttcaaacttcaagaaattatcccagtattccattaattggtgagcagatttttgtgtaccttagaaatcttgatcataaacttttcagttattatgtctccaacggaagattcaagttttagcctattctcacgggatatctcctctattgttttataattttgatttaattttagttctctggattgtctctaaattccttcctttgatacaaatggtttattttatgctttctgataaaagaactatcttgtgtaaattttgctaaacttcccaatatggtgctgtgactagggtaggagctaacatacattgattatggcaagcaaattgtttctagtcactgtacatttcaaactatactgttcatggaagatatacttgtatatgtgcaaaagcaagacctatgcttccatccataccatgaccacatggtgcatttttaaaaacgacccttctccagtgctttctcccttgcatgttatttttctttgggagaaatgtctgtgctatttgccattgtctctccatttcctagcagagttcctagtacagttctgttctaattttcatctgaaatattcttatttatctatttatttttaattttactttaagttctgggatacatgtgtgacgttcccctctctgtatccatgtgttctcatcgttcaactcccacttatgagtgagaacatgtggcgtttggttttctattcctgtgttagtttgctgagaatgatggcttccagcttcatccatgtccttgtaaaagacatgaacttgttcctttttagggctgcgtagtattccatggtgcatatatgctacattttctttatccagtctatcattgataggcatttgggttggttccaagtctttgctattataaatagtgctacaataaacatacatgtgcatatgtctttattttttgaaagacattacagtgtttccactttggatttaccttcactctggaaattatgcaaagaatttagactaaactctggcaagtttagagatggtagcgtgtgtctggatgccacagaatagcaagtttaggggtcaaagattctcctttcagtgctttgtaaagcacacagtaggttcttcatttaggcaaatgaagaagatatttttgattaataataatgataaaccatatgttatattttgtagcattttataaatttcagagcattatataaattctagttgttactattaggttcctttatgaggacaatagggcaggcactattataatctcttatgaataaacaaaaacttcaaagagaagcgtgacttgtttgaggttgtatagtagagatagggcttaatttgtcttctagttccaagtctggtgattgctcttcatggagggctttatttacagaaggagaaagtcctatcttgtacaagttaagagaccaccagaggcctgtaccaccagccaaaagtctgtgtctttatcccttatttacaagtagatgaaaatgagtgctttattgcaaatgcagtgggactaaaggaactgctactttggggaaaataaaagtcagctgaaacagaatgtttgcagccaagactaaagtcactaatacaaccggctcacaactttgccaatgaaccttctggcaaaaacctggcaggatacgaatatgtaagtagctgctgtaaaagggaacgaagcagaggaaatgagctttgtaagttattatatctgggcaggaatttttaatcaagtttttttttatttaaaaaaatttaagtacaaatagttggtgaaataatgattcactaaggaaagaaaaccaaatttggcttactgtttctggaatcatacaagtcatgaacccttcagggcacactgtgacctaaaatgaatcacatgcatgtaagggattttgcagtgaggcattctttcctatttccctctaccttgtttatttatagctaagtttcatttatggagcagtgtaaaaaaaaaaacctcagaaatcagaggaaatgtagaaaagaaacttcttattcttttgttagtgctttgatctggtcacagtcagatatatacaagaaggaaatgaatggcctcgatcaaagtccttagaaaatgctagtataggggatgggttgcaggagtgatcccattttgttttccttctttgtttaaagctcttgtggaaagtgggaaagggaactgccagtcaccgagcaccagccaccaccttacccacttttcacgtcaatgctgcaaggtgggtatgaggaccagctctgttttacagagattgtaaagattatcaagatgtaagagtaggggagccaggattttaacctaggtctaaaccatatgcctgtgctcttaaaagattttgctttaggaatagaaacgtataacttatttttgtttaaaggttacttagctattttattatttttacatattattgtctaaaccttttttagtatggaaggttttttttaacatatacaaaagaagcatgaagtgtatagtgaacccctttgtatgcatcactcaattacatcaatgatgaactcataactaatattgttttatttattctctttattctccccattattttgaagtatttcttagacattgtataattccacctgtaaatatttcagtatttatctctaaaatataaggactgaaacataatcataatatcattatcacacctaaaaattaaacaactcttctttaaaataatcagatattgagtcagtttttaaaattccccaatcatcttgttattttttatagtttgattatttaaatcaaagtccaaataaaatctttatgttcaagttagttgatatgtctcataagcctttcaatttatggggtttccttctatttctgttctttaccccttgcaatttacttgttaaaaaaaaaaacccaggtcacttgtcctggagtttcccacagtctggcttgtgttcattgtgtcccctgatgtcctttaacacattctctgtcctctgtatttcttggcaattagtagctagacctggagcagggtttctcgaccttcacactaatgacatttgggaccggacagttctttcttgtgcattgtagaatgtctaacagtatccctggcctctatccactagatgtctgtagcattgcccagtcgtgacaatccaaaatgtctctggacgttgtcaaatgtcctccaggagccaaatcatccagttgagaaccactgatttaggggactgaacaggtgcaaggattttcttggtggggaaacaagggaaggcaagagtactttttatataaatctgtgtattttcattaggagacacaggatagctagctgtctgtgatgtgagtagccattgatgatcattgctgaaatccatttagtcatagcagtacttagttattttaaatgttgcattagatatataacagctgttattagttgctttaaattagaatgttttcatgtgatcaaagattaaatgaggcttagccagaaatcatcttcatgagacatgacactttattatttctgcagtgacgatgcatggaaatcattacttgtggacaaacttagaattagcctgtgaatggggcttttgtttttctatttctcagaaatagaatggcctataggaatgaatatattaggtacctggaaaccacctaaaaatagtaatggatgttggaaaagctccaaagaagggctcaattcttccctctaatattcaaaaggattagggagcttgatgttgtagtttgtagccctgcctgtcattccagacccctaggttgtagttcataccctttcaagcttctaaaatcaagacactgagctccaagacagagtaccttgtgtccattccgggcattcctttacagaacaaagagtggtgtgtaagagtcctctcagggaggcaggcagggagagaggaggtgagagaatgttcgagatggtgaggaaggggaggatattagggtctcaacaaaaagattatttttgagataaatgtggtatagtatgagagattcttattgcgtttggtctttttatctgcttcatctttatatgcataaggtattggtggttattttacccttttagaaaaatttttgaatatatatatattaaaacctgtgaaacaggtaaaagctcattttcccccttagttcttttattattcaatctggtcatctgtaaaatggcatctcatattaaacagcttgtcaattaacttttttttttttttaaggaacagagagattcaaaactgcggtccattttacttctaatgggattagcatcaaggaaaaaccactcatgcagggtctaagataaacatcagaacaatgcagcaattataggtcattcaattaatatattgacgtgactttcagttgctcaaaaatagtacagtttttttctgttaagtgaaaagattattttgctttttcaagcaccatattagaatgattttggtgtgaataaaactattgctaattatcgttggtttgcagcacttctcttttgttacttaggaatgccaaagaaagggtaaaatccctgttacaatgaaggctttcttgctggtaatcagcagtacttggtctgcctgcaactggggctgctttgtcccagaagttttatttctattgactttctgctctttagaatttaaacatttttctttatatctttaactgctgaaactccagctgagggaacagtgggaggggaataaaaagatggttaaagtcattttgtggactgtgagggtgcatgaagaacatgttcttcaaactcagttccacatttaagctgcccagcgagccttgcccttgctattctctctctccctgaagccagaaagaagaagcaggcgactctccaaaggaccccatcttacctgtcacatcacagatgtacctttttagcattctcacaattgagataggattcagagccctgaaacctggaggaaggaaagaaaactctcttttatttagtttccatcatacaaggatgttataaatatcccccatctttaaaaagatcctaagatccctcttagctgttgccaattactctgctcccttttacaacagagtttcctagcattaacgttaatggctgtttccgtttaccctcgtcctgtttctttctttaaaaaaattttttttacatatgtgatatatccaactgattgtcctttttttagaacccactgaaaatagtccttcatcttcaccaatctcctgaaaatattctttcaatgctaccaatgactgccattatgctaagcctaatggttcttgttcaaatatcacttctcagagagctactccccacagttactctttaccttttacccagctctatttttgcaagttttttttcccattgtgacatttactttaatagctgtaatttcactctcccaaatagaatgtctgttccatgagaaatgggattttatttcattctttagtaccttgcacactataggtgtgcaataattatttttgtatggattgattaataaaatgctgtgggaattgctacttcacttgtaattttgtttaccttttaatttaattcttagcacagtatctatgaagtcagatttcaataaatacatgttgagcacaagagaattctaattaagaagaaggcagcactctgtagaataactggtttctaggatattgacattcatccagcaatgatttgctgatgagtattcaaattatttggggctacatttccagcagggaggctgagccacaccatttctagtgattggaaagtggctactcttataatgctggggtgcagctagttttcctgtctctttgattagattttgtcttttgttctgcccaggtgggtccctgggaataactactaaagtatgaaaccatggtgttgtctggctttcaatgaaaacatgtagccccgtgccactaaacatgatgtacattataaacatttgtttaccccttagaaggcatcttacttctttgtactattccttggagcatttgatgcacatttttccatcttgttgctcggtcacttttgtaatagagcttgtgtgagttttttttttttttaaggaatttagaactatgtcagtttttatctcctttgcagtttttggtgatagctctgttatgggaagaaggcagtgctgtggatctggactccttggagcaaccctctcaggcacatttctagttgaggtctaagattaggtcactgtggatagagaccagcaaggaatctcaggcttaagacccagttagtacaaagggagtgagctaaggaaaactagataacttagtttatttctctttttcctttggcttcctgaaagccacccagactaaacttgatgttagttcaattctacaagtcctcgggatgaccatattttctttctctttccaaggtgctgaatttctttctttctttctttttctttctttctttttttctttctttctttctttctttctttctttctttctttctttctttctttctttctttctttctttctttccttctttctttctttccttctttctttcttctttctgaatttcttttttaataaatctggttttatataactttttattgaaagcttcttcaaattacttttggactggggaaggatatgcttctctgtttttttccttgtatattactgcattccctaagagctagtccatgatggcagtcactttagggacttgaaattcaccaggaatgggggtttggggagtcgtggtggtaccttcatgagactaactttatggcctgttttttggtattgactctcctgtttgtcctggtactccttctggaaagttatttttcctgtgtaggtttcctagaattcctagattatatcatattgaagtactttgttaactatgccataagttgtgggaaactagagttggcctcacttttcccttcttcctaatgtggatgggaaactgactggcagaaagaaaatcttccccccttcctcttgggtttcttctttttcttttcataatctcttttaagaattttctattaccatttcattcaatttctttcttctttaatttttcgcttcttcctgttacttactctgcagcctataagtggtagatgtatctgtggtagtggttagtaacctgggttatggagccaggttgattggatttgaattctggctctccaactttaccagttatgtgacctttttcaaattccttaacctcttaatgctcaggttcttactctataaaatgggagtcatcatagtatttacttcatgaagttgttatgaagatgaaatgagtttatacatattgagtactttgacacatgtctggcacatagtttttaatacatgttattgatgatgatgatgatgatgatgatgatgatgatgatgattgcttgtttaactttgtgggtagcgcttgaagtaagtgctggtggccaaactggtagattctttctggcaaatcattacattgactggattaatctgtcttggagccagaggaaataacataaagtaacttataaaggatgactctaggaccttgaaaagtcccaggtgtctgggctggacttgtatcggtaatttcttgtgtgtgtgtgtgtgtgtgtgtttcccaatcttggcttaagtttcctaacctacttttaagattccttcttcataataatggttttttctatgttgtcctcagccatgttgtcaaattgtgagaataaaacatgtctgcagtcttcctgtcaagataataatgaacagtgccttatatttgtatcttactctgcttaaaatgatttccattctaagaggtctacaagatcttcaaactacatttctacaccctcctccctgattatgtaaacagaactatagcatagaaatttcttgcttcaaaccaaatcattaacagtgaaaaaatataaaaactcttgtctgcataattttggggcagctcccaattatgggggaacaaatctgaacatgtatcatttgggattgggagaaagtaaagaaaggggaagcaaggagtggtatgaggaaggatattctcacctttttgtgttagaaaaaaccttaaaggtctgaggcttaatttatagctacttgttgatctttccattaaaaccaaattcagaaggaagagtttccttggtgttcttatatatggtctcctctcatattgcactttaccctatacttaaattcttgcaggacattatagccacatgatggatttgctctgtgggaagaaggttagacttaggcttgccaagcaaatgaaccaaaaaataagactttagatatctcccagttggaagctcaaaggattgtgaattattgttttctggagtagattgaaactcattaacatctttagcaatggtagtagaatccattcatttctttctttgctcagtgttgacagtttggacctgttgtctctgtgtgggtctccaaagagggaaaaccattcagaaacagattttcaggtattttcagtatttggtggagttagggagctctgtgcaatctttcctatgagtatacatcccaggttaactatgcaccgaagagatcaaggtgtgcaggggttgagaggggtcctctgctgattgagagtgattctttatcagtgtggatggagacaagaaagctgtgtgttcctcattccaaaagtcaaactgctgacctctggccatcacaataccctccctgatgatatcaagctgggcttcttgtttgttgggtggggaatgggccttgtcagtaaacttgtagtcatgtcagtggttacagttttaatctttcccctttcaattttctggcactggctctcaaaaagcaggatgaagaaaacgagagatccatccagcacacttattccagattctttatatttataattatcaccttaaatgaagtagccaccgttcaagcccagattaattttcctccagacagatagcttatctattgcaaagagctgggttttctacgagtttttcttctgcttgctgctgctcttaaaaggctagataacacattgactctaggagctatctggctcacaggggcaaaggaattgcttgctgacctcacctggtcttttgcatctcttgaagggagaattaataaacatcacttgaagggagagttgtgtgactcatttgaaggcacatttgtaaggcatatcatctcagcgaggaaagacgcaataactctaggcactggctcacttttggactattaaaaaacaaaataaaattcagaaaaaattttaaattttaaccagctatttaaaaatgccttccattttaacatatgattgactatatgtaactctggcaattgagatatttaaggacacttaataaactagctttgaacctctggagatgagaagagttaggcttattcctttactataccaaaaaaaagatcattggagagtccatttttttaaaaagtgcaagttgttaacatggcacaagtttagtacagtttcagcacagaattttgtgcatggcttctgcttgaaaagacttgggactatccaaagaattatcttcaatatatttatatctctataaaatctcaaattgggttcttaagtgcaaaattgagactcaaagtcaattaagacataccttttccttggttaaaaagaaatcagaagatgacctgataatcactacaaaaataatctttcatgaagaagatggtcagaccaaggaagatatccacatttgtgaaaaggagggtattcaaaggccataaaaggcagaacttcaaaatattttaaaaagccgaatgaactaaaatgttcacctgtgataaataatagcaacattgaacatttctcaagcacagagagtaatgtcccacccctgtactaagtgtgcacagtgagaaatgtcccacccctgtactaattgttggggattctaaaatgagtaagacaggatccttgatctcagggagtttcattatgtcatggcggaaagagatcaaccatccacagaataaagcctccagtaagaagtcatgagagacaggtggtccaagtctggcaagtagagaggagggacagatagcacgttattcctgtaagggacttcctgattttcaactgtgacctagaaaaccaggtccagtgagtagcagtgaggtggtcatatgtacataacgtggcaacaacaatttgtgctttgaaagcacattatgcttttcaacatgctttaccagacatggtcttttcaggccgctctaccctgtgcagtaggttatccaaatgtgcagatagggaagtagcaacatggagaggacatgaagcttgagtcacagtaaatagctgcttagtggtacctctgggccgccagggctcctgaactctaggcctgctttctttctgcaacccgccagtggaagaaatggcctttcttttttccaagcttgtgcagtggtactttagtttcctgggatgttatctgtatcatgtaaaagaatgtttgattttgaactaaagttaaattctttctcattcttcatcttttggctcaaaagtcacttcttcaggggatacttttctgggcccccaaatctctctgctatgcagtctcacagtcctctgtactttccacattagcacttatcccagtttgtaatttaccatttgtgtcttatttgattaatgtctgtctcccatgtccagccttactctccatgaagccagggagcatacttcttttgtgtatcaatatatgcatttagtgacttgcatatagtaatcactcaataaatgtttgctgaaggaaatttaaggtttgtttactgtttccttttcctttttttttttttttttttttttacaatagagtacccaacatgtgagcagcttacttgtgacaatggggcctgctataacaccagtcagaagtgtgattggaaagttgattgcagggactcctcagatgaaatcaactgcagtaagtattgtgcacaagatgtgcagttgtgtgctgaagctggtttatactggtttgagagagccaatatgtacatctcttcccaagttcaggttcagtgaattcatgttggtagtttgaagtcagccgttggtaggagtatttacacactggaaatcggcaaacactacaaaccagggcctttttgttcctggataactggttcttaaacagttaccagcacaccactgcttaataagaatccctttttaaactggagatgctcttcctttgagattaaatggctacaatggagttaacttctctcttttctttcccttcttaactttctgttgcagctgagatatgcttgcacaatgagttttcatgtggcaatggagagtgtatccctcgtgcttatgtctgtgaccatgacaatgattgccaagacggcagtgacgaacatgcttgcagtacggtgatttctttatgctgggtcatgttgttgggagtgttttgttttgtttcggttttgttttgttttatccccccgctcccccaccaatgtacctcttttttcaaggagaagagtcactacgtttgatggcagatggaatcagacggtcactagggggtcttggcacaagcctttgtggtgttgctcgacctgggctcctttattttccaaggatctgtgtagatgtaaagggctggtgatggacagtttgccttctttccttaggctccaggggtacaggatatattgtatcactggattctcaaatgacccatacctctgacaaccttgatagtagaatgagagaagtgtttttaagggaaaggaagttcctaggagtggctctaactctcctctttactttgaaatttctgctgcattaaagttggagggtcaggaaagtttctttttcttcgttttctttttttggagatggagttttgctttgttgcctgggctggagtacagtggcgcgatctcggcttactgccacttccgcctcctgggttcaagcagttctcctgcttcagcctcccgaatagctgggatcacaggcatgcaccaccatgtctggctaattttgtgtttttagtagagatggggtttcaccgtgttggccaggctggtctcgaactcctgatctcaagtgatccgcccgcctcggcctcccaaagtgctggtattatgggtatgagccaccacgcccagcctgaaagtttcagtgtggtataggtggctttcttgcctccacttcttcacgctgaccttgcttttatgtccatgctgttgcctgcaatgcaaatgacctctcttattgttgccacctctccacttatgttttttggaaagagtaaagttagaagactctgtgaaagagttttactatgttcagtaagttggcagctttgcgtggtgatttatttactagaatgtatgatttccctccacacctcttttgattggttggtacccatgccttagggtgttgttaaatattttcgatatcaccctaattttcaatgagccatgcctgacttcctttctggaacctgggcttatttcagtgacagagaattaaagagaatgtgacatcatggaatggtcgactcagaatcatttggtcatagattagcaattacggagcttgtagtaaagtatgagaacgttggatgttgtcatgtctgcagcatctttgtctgcattttctgttctgtgccaacgcattgcaaaccatcttgtttttaattttttttttttttttttttttttttgagacagggtctcactctgtcacccaggctggagtgcagtggtgcgatcttggctcactgcaactccacacacccccaccaggctcatgccatcctcccacctcagcctcctgagtagctgagactacagacatgtaccaccatgcttggctatttatttttatttttcgtatttttggtagagatgaggtctcaccatgttgcccaggctgatctaatttttaatcttgaaaaacagaaaccggcacctgagttcatttcctggacccaaagctgctgttatcttcttctttctctctcttttttttcctcctttttaaaaatttttgtcaagatgtctaagggattaaattgatatagaaatttcaatttctaggagtactgcttaggcagtgaggtgagagcactttcagtttttcccggtgatttgtgtctttggagtgcagctgttgctttattccagactatccgacctgcggtggttaccagttcacttgccccagtggccgatgcatttatcaaaactgggtttgtgatggagaagatgactgtaaagataatggagatgaagatggatgtggtaaggaggggaagagattcctactgaaaagcattttcttcaagtgttttccagcgcttgttttttctcctttcctttttagaaattttgtgtgacaagcaagcctcaggattggctggagttgaaggggttgtttaggaacttagtgggtggggaagacggaggtgactgcgctaacttctcctaagaagattcagaacacaaatacagattaaattataatcctctcccttctatctttaaggcaaaataggtaggacagtctctgtctcttctataccccagtctgactttctccctgtaagactgcctgttttaaatagatttaaaactatataaaactaataggctggggaaggaaagaaaatagggaaaatgtcatttgtcttagaccttacaatctttaaaaatgactttgaaccttggtaacagttcagcttatttttttgttttggttttgtaaattctgattcccaaatgagtcactgacactcagtggtgaaagagaggccaccttgggaacacgtgggttggagctggggatggtaagtgtaggagaagctactatccagggaagtgcttaaagattccgtgagaaggaaattgccagtgatattcacccttttatgttgctgatattgacccttttatgttgctgatatcatcagcagtacctccaacaatttagcagttactaatacccataccctacagcaagttacctgcaccattccaatcccaggtatgataagggaaatgcttgttaaaactatgttttatgtttttatgttccagaaagtggtttttctacatttgggttatggtttttcttatactgttgacatttcactaaataaacaaagcaaatcaaaaagcccaaccacaaattcaagtaattctggacctaacttgatggccctaattctataattcatgatttaaataactacatcttttcttaggggatcatgaatttagtttgtcgataattgaggcccatatctgcttcttcctcttataaccctactgggggctgccttttccaggaaaagtggagtaattccattatgcctctccttagaatctcagtaaaagactagtggtagagttagaaatcactaacttattgtaaaatgtagatcatttatagatttctcttgttcaacttgctctacatcctctgtaaaccactgattaacaaagagctggctgtacctcccctatggcctgtaactctctctttttccccccacagaaagcggtcctcatgatgttcataaatgttccccaagagaatggtcttgcccagagtcgggacgatgcatctccatttataaagtttgtgatgggattttagattgcccaggaagagaagatgaaaacaacactagtaccggaaaatactgtagtgagtatagacatttacctgggtagctttcagataaagatatttctgttttctagaacagacgttcaaatacagtgtatctgttggcatttgcataacaaagcaccccaagacttagtggcataaactgagaaacgtgtcttatttctcacagttctgtgggttggctaggtagttcctctggcctgtatcagctcactcacacgtcaggatgttgcagtaaaagcttgggctagcctagccttgttgacccagaggctgaaagagcaaatcctagggctcaagtactttcaaggttctacttatgccaagtttgctcaagtcttattgtccaaagcaagacacttggccaaacccagagtggatggaagaaatagactccatctattgatgggaagagcctaacaattttttagcaactccccgttcctaatccctaacgcacacacagggaggattgtttcaatggcaattttgatgaccttaaagatgttctggagattttattacctggcttatacttatggaaaaaggccttgtctggctgtactaaaaaaaaaaaaaaaaaaaaaaaaaaaaagcttctggttcctgggttatgtaccttgagttactctccaatggcaaaactgagttggccatgcacagtgttgttcgattatgtcttgtgtgaccacattcatttatgaggaaactgactggaactagggattttttttctccttttttggggctgtagaatattcaccccaccaacaacccatcaactctgtggacagctgatggtcctgtaaggaaatgccatttaaaaccttgatttcatcaataatatactctaactaaatttgtgattgcctagaagtgcccatgtaactgcaaccccaaggttattttttgtttcctgacaaaaattgtacataatatttaaacaggcagagacctctatggcatttttttctctatttcatttgggagcccatttaaaaaagcttaaaaattaataagagatatgtagtcacagtatgaaagttggaaaataaaaattaaccaaaagaaaaaaatataatcacctgaaatcccatctcttgaagccagccacagttaatatttctagggcttattcttgctccagtcacttgggagttcttagccctttttactatgtagacacaaagatagacccatgcatgacctgatttttttttcataaataagacttttaatgacttatacttgcacatagttataactttaaaaaggagctttttcttttcttttgtttccactcaaggcagcctcttgttctgtcacccaggctagagtgcagtggtgcagtcatagctcactgcagcctccatcttttgggctcaagtgatcctcctgccttggcctcccaaagtgctgagattacagttgtgagccactgtgcctggctaatgcttttatttttaattttttgtgaatatgaggtgtagctacattacccaggctggtcttgatctcctggcttcaagcaatcttcctgtctcagttgaacttttattgcaaagttttgcagtaagctttgaagggtgacagatttttctgtacatctacttcatgcttactgagctgctactcatggaaaaagaagctattagattaatcagtcttgtccagaggtcaccattcatttaacaaagttcttttcttcgtttaggtatgactctgtgctctgccttgaactgccagtaccagtgccatgagacgccgtatggaggagcgtgtttttgtcccccaggttatatcatcaaccacaatgacagccgtacctgtgttggtaagtgatggggggcggcggctacttgtctttcattacagtacactgatgggtgccctgatctctgacatctaggaggttgcacttgtggagagtcgtcatggtctgtcataacaaagagcaacccagacctcacagaaaacctggcaaatagggaattttaactctgagaaggtttggtgtggtgtacaaggcaaaagaatggttctgtcatgagcgagttgactagctacctggaacctatccattacttgatgagggcggtagtccttttctgttttcttttcaagtatttggcatcaggattggtgcagccatactggttattgaatactgaactacttccatgaggttggtagatagctgctgcctgagcccagcaagcaccgctaccttgctcccctggcctcttctccaggatgcacaagcatccccaggatcccacaactaaagagttgttacctgacacagcagaggatcaccaggtcattgctcaggtgactacactggtgggccagtgcctttgctgggctggctactcattccactgattgtgacatccacttggaactatcattcaagatgagcagattctttatcatggtgcttccagatggtggctggcattaaactagacaccagtacaccaactatttcctcatatctctcctctctgacttcagaaatgatttctcccaatgagatttttgattttgatgccagctttatatctcactgtgattaggacggggccttatgatgggagaattagacttgaccaactatcatcagtttttgttttctcagtgagtttttggtgctctgatcttttttccttctatctgatttttgatacatgaacaacaaacatactagcaggaagtgatcacagagggagtttaaagaaaactatttttactgctgttgggaaaaggcatctggaaggcaattgaaactattcattaaaatttggtagtcatctatggggctccaaaatgattcagaattttcccaggatatttatattcttttgatattccttagaaatgtgaggtattctttagggcttttgggatagcaacaaacatgaaatgtgtaagaaatgcttctagaaaagtatttcttctgaaattattattttaatattattaaaatattaaaattttaatattaaaatattaaaattttaatattttagaactatttggtaacatttggaaaaaattattgaatatagataaacctaatgcagttattcagtctttagtctcagctcattgcttccaacataattatactttgtcaaatacagctaatcttaacaactactcatagccagaaaagcctttctttttttctttattattattattattattattcttcagcggaagtgctagcaaacagaaaaatgtattgataccagaaataaactctggtttgcaaattaaacttgaaattcttgagaaagtctgctcctcagcgttactgaaaactacaatcgttgggctcacttacctaccatatgccaaaaaaaattagatttttatatccagtaaagcaatccatttgagcttttccttgtgttcatagtgggtaactgtaggttcttaatatcaggaccacgtcccaaagttgcccatctaattgctcctcttaagtaactatattcaacaaggtactttaagatcaagtgacttaagtgaactctggaataatttaagaaggcccccaaatttctaatcattttaaaacattttataaataaaagttatgatctgcaactggacttaaataagattgcaggacacattttgtgttttattgttatcattaccattatattgggaatgcattcaagtaatttacagatacttttcacacgaatgcccttattggttaggtggtgacctgactctgggagccctgcctggatttcaggcagccctgcgcaaaggggcagcctcacttctgctcagagtggggctcgtctgtgggtgtgaggccactcctgtgtctttagcaaatgtcaggctccttttcccccctcactgctacccagctgccaatcccattcccagccttttagttctttaggcattttccttttctcttagtagaaaagaagttccaatagaaataccagaagccacattctcagtattacatcagcttttctctctttttcctttatcaactcccaaagaggagttggggctgagctgtcttacagttgaaacttgataggccatgaagtcctttcaggaaaagtgatttgttctttcagaatcgctaattcagtcttgtgatgccccacaagctgttctcagttttttgttccaccctagagcccagataacacattttccatattttccaacatataagtctgtggtgagccttgggttgtatttccaaatgtctagggttttctaaatgtcagagattcaggccacttcaattttcaatagcctctcacaaagcgaaaggctgtcataacaatgttcttgttttataaaattttgcatttaacctactagtgaatgtaaggcagaatattgcagtattatgtgtgcacaggataatttcaggatcagagaagataccacaattaataacacattggaagtagtgtgttctaataccggggcactaattttaagttccacaacagacatcttctttcattcccgccagcgcgtttctgggactttagtacagacaacctcatttggagataatctcaaaagtctacatttgagggcctttgtgaatatgaggcctcctgccacctgcagagaccttttctgtgacctttgctgtccttcaagaatgtgtcatttgcctctgagttttgaggctgggttaacatttatttcacatttgtttcaaagaagactgtatttttctctctttatagagaactctttaaatacatgacgttaggaaaccagttacacttgtttcagctgagctgaatttttaggggaattgttgctttggtttgctctctcaagcatttcatttcaacaaatactctctgtatggctataaccctctgcatggctgacgcattacacaggcttcaggtgttggaaacctatgcaacatttattatcttagacatggctccccagtgaatacctcggtggtaatcaagaataacattgaataatcctgacacgaaatcttgtgtctttctaccattcatctgcctctggtagtgttgacctggcagtggaagctctgaggcatgctgaagcagtttactgggctcattgtttctgattgacaggacatgctgtttgttgacagaatgacatcgtggtgcagagtgagggcagggaggtcattcagcatggtggggtttcacacagccagatggatcagagggtggccaaggggggctcagttaaaaaggggtttttgagtcattttcacagcagtatttgttggtgggaggagacaaagaataaaaaggaaagaaaaatagataaaggtattggagtgagagggggattgtaaagtagtgttttagtgttttgtgtggtttccactatcttttctactctcacgaaaaccctcaattctacttttatttttcttgtcttcactctggctgctgatggatgttaattaaccttcatattcctctatagtgatccaaggatacaatcttattgtcacaaaagtgacagcaattttatacactcattcaaatcctgtttttttgtgatagggtctcactgtcgcccaggctggagtgcagtggcattatcacgctcactgcagcctcccacttcagcctcccgaatagctgggactacaggcacgtgcctccatgcctggctaatttttttttttttttttttaattcttagtacacataaacccttgccatattgcccaggctagtctcaaacccttggactcaagcaatcctcccaccttaccctcccaaagtgctgggattataggcgtgagccactgtgcctggcccactcattcaaatctttaaaccacttgtagtgcaggtgataggaagggcatttgtgctagagaattcctagttatgacttctccacctttggtttccttctgtttgacatcagaacttctgcttagagtgactccagatccttagacgtggtctcatggatcttgcattcaaaatgaagttatgacattctgggggtttgagggagaatgtcctgtactttttttcctgctgaggcaaagccttaggtggagctttctcagggctgagttaaggggacagaagggattcatcagtgagggcatttcacaccctcatgtggcatttcacttggtagtgtccagatcggattgggttttttttcctctggttagtcacggtccttggaaagaaagatatgctggctcatgttgttatgtttaatctgcagggaaaatgggatcattagaagagccttcttggggctggatgcggtggcttacgcctgcagtcccatcactttgggaggccaaggcaagctgcttacttgagatcaggagtttgagaccagcctggccaacatggggaaatgccgtctctactaaaaatacaaaaatattagccaggtgtggtggcgcacacctgtagttccagctactcggtaggctgaggtggaaggatcacttgaacccgggaggcggaggttgcagtgagccgagactgtgccactgcactccagcctgggcaacagactgtgactccatctcaaaaaaaaaaaaaaaaaaaaaaaaaagaaaaaaaagaaaaagaaaagaaaagagaagaaacttggccttttggtgggttatggaatggtgggccacccagcaggaatggttgaacccaattcacaactctgacagttgctgcaaatgtaatcagatcatagaaatctggagaattctagacttgggagtgcagtggtttcagaaattataatctacttgagaacttcctgaaaccagagggtgtgggaactctattgttatagtttgtataggtcatcctcccagggaagcgaggagggtgaaggatgatggagagtggacgtggacttggaaagtcagatgtaccaatttctgcacccctgaagccttatagtctttaagaaagactcttctaatattttgttgtgttctcccctccatattctattgtttatgtcaattatattggaactatttttaaacagtagaactgggacttctctggtaatgaacagagctctgtcatgtaagggacttcaatgaacacttactaaatgagtgaataataagttaaccaataagtagaggagaagacatttttgatgtcttgaaaataagttcaatttaattttggttataattttttgacatcagaggaaagacagctgggtaaatagacctttccaagtactttattgcagtcatagatttgtttcttcctgaggggctgtctataggcaggtcttactttattcagaaatagtgctgtccaatagaactttctgcagtgatgtaaatgtgtatcttcactctgtcatattgtaaccactagtcatatgtggctattgagcacttgaaatgtggcaagtgactaggaaagcaaattattaattttattttattttaattaatctaaagatacatttagatagccacagggggttagtggctgccatgttggaaagcatagtattgaagggaaacatttacaccaaaatttatatatttgtagactaacattaataaatgaaatgcagtaccatagggctatgaattcaggaagtgttgtgcattttctgtaaagttatccttcatgtaggtttaaaaaatgatgtaaatgttctttttccttacatgaagatggttgttataaattctcagaacctgtgcctaattccagagggtgtttatttagacatgggcaacaccacattcttggccatcttatctaggatttttgtcagagagtgcttaataaatgctgataaccttgactacaaatgtgtattttccatatggcagagtttgatgattgccagatatggggaatttgtgaccagaagtgtgaaagccgacctggccgtcacctgtgccactgtgaagaagggtatatcttggagcgtggacagtattgcaaagctaatgattcctgtgagtaaattatggacacctgtgtctctgaacagtgaacagattctaatagcttctttccttccttctgatgacaacagaattatcagcatttttgttgttggcagggctttatcattacaaatcagggatggctcctactgcctagaaaaattggtcaacattaatttcatactttgattattaaggaccaatttgtcgactaatggtgaccattattaatattttttaattgattgattgtttactttgcctaggctatcatgtcacccacctttaattgtggaataaatgctatgcctacatttgattggcttggacatttaacttttaattaattacctaccacaaaagtaggcgacaactatctacagaaataattttcacagtgttcttgcaaaatttagggatatttccaaatggacatgctaaatttggattaacaattttttgaatgcactaactctgggtaatttgttggaatcagtgtaagagtatgaaaagtagagagtagtacagagtagtagagaaaagtcatggagaaaatctgcaaaaaatagatgagggctccaaagcattttgtcgctgttgatttctccggacgaaggtctcaatataaactcctattttccaatagttatttaacacttgattttgaagtgtctttggtgtcttctgaaacttaactgctcccatgactgaagaatggcccattttctacttgtttttgtgtagaaatacctgatttgctgtgtagtaacttttaggttcagcggatttttaacaattcaatgtgtttatttttgcataggtaacatatttatatgttcacaaattttaaattataagaagatatgtagtgaaatgccttcctccataactattcccctctgcatggttttcaccttctctttcctatgagtaattgccgtttctttattttagttctagagattttttaatgaataaacaagaacatacaaatatagatatttaactgtatttacatatctatatatggtagtaaactatatgcacagttctgcatcttgtgaatgtactgaagatattttccagagctttccatttcagcacatgaagttatttcttaattattttatttatttatttatttatttttatttatttatttttgagaatgagtctcgctctgttgcccaggctggagtgcagtggcgccatcttggctcactgcaacctccgcctcccgggttcaggcaattctctgcctcagcctcccgagtagctgggactacaggcttctgccaccacacccagctaatttttgtatttttagtagagacggggtttcatcatgttagccaggatggtcttgatctcctgacctcataatttacctgccttggcctcccaaagtgctgggattacaggcatgaaccaccgcatccggccttatttatttatttttgagatggagtcttgctcttgttgcccaggctggagtgcaatggcaagatcttgcctcactgcaatctccgcctctcgggttcaagcgattctcctgcctcagcctcctgagtagctgagattacaggcccccgccaccatgcccagctaatttttgtatttttggtagaaacagggtttccccatgttggccaggctgatctcgaactcctgacttcaggtgatctgcctacctcagtccctcaaagtgctgggattacaggtgtgagccactgcgcctggccttaattatttttttataatggcataatattccttcttttatgttcataatttgtttaactagtcctctactgatcaatttttatatcattccttatcttttgctattgccaataagactgcaattaataccttgttcatatatcattttgcatacctgcgagtaaacagacagaacagatttggaaccaccattaccatctttttcagagtgatttcctggtaatctttaaaatgtcttctgtgtttaacaaaatctaaagttgcacatggggctaaggtgcccataccatcaaggagtctcgaaaatatctgagaaatactctcctcagtgtcattgaaagtgcattggactagcatccagaatgcttgaattcttaccaaattcttcctaacttactgagattttggacgcttcattaagcctttttgtgcctcaatttgcccttctgtaaaatggatagaatgctagctatctgtctgcctcagaggtttatgttaaaatcaggtaagacaacctagaagatagcatttgaaaaagcagaaagcatatcatttgtaagctacttcaccatccttgctcatctgaaggagtggtgatgccttccttcttcgcatttagttggcgaggcctccattatcttctccaatggtcgggatttgttaattggtgatattcatggaaggagcttccggatcctagtggagtctcagaatcgtggagtggccgtgggtgtggctttccactatcacctgcaaagagttttttggacagacaccgtgcaaaataaggtaaatagaaatttcagtagctgaatggaaccctgagcacaaagtgttgatagcttttcacttttagagggagtagaggggaaagttcctttgttttctaacaaaaaaggcccttgagatattttatgttaatcagcaccttttccatgctatactattacatgtgacctattaaacaaagcagtctattatatggattagccttgagcaacttttaattttattcgaagtggagtccaggagcctaattaaaagaaatagtagacattctttcaaaactggatagatatttggtagtaatttttgaaatttgatcatttaaaatgtaaaaagcacactgcttttctggatgataaaaatcagatttttacctgcatcttctaaatggaactgtaattcgggatcgagtaacaaatattgacggtattttgtttaatggcccaaattttgtttcactgtcttatttggaaagtgtgatgggtttaatttcatcttggagtaatgcaatggagatttttgaaacataaatttcagaaactcttaaagagttatggaattttatttatttcttcttacattttattataccattaatacgattctcatttatttaaatgataacttgcatgaaatttctgaaaattgagaatttagatttttagcacttctgatttgattatagctaaaaaaaatcaaaacaaaccacgtagttagtgatgctgaagaaatataataattttggtttttctttcaggttttttcagttgacattaatggtttaaatatccaagaggttctcaatgtttctgttgaaaccccagagaacctggctgtggactgggttaataataaaatctatctagtggaaaccaaggtcaaccgcatagatatggtaaatttggatggaagctatcgggttacccttataactgaaaacttggggcatcctagaggaattgccgtggacccaactgttgggtaagtgatgtgaaaacatattgattcctgtatttttagaattttctctctccctctatacactgaacatctactggattaatcaaaggctcattctgatttcttttaggctgtatactctagaagccatgtctattttgtgcccttatttatagaagctttaagagagtttattaaatataatcctatttgaggacatgttacccaaacacacctagtggtgtactaaaaatacttgttgttttggggctatgaattttattcttagtgtttgccacgttttcctagctaagagattggattttgtgttctaactcaatctaataatattattacaactaaacatcacttatgcttcattattattaagatgattactctaacatgaattagctgtaaagatttttaaagatggaggttggaactattcctttcagaactttcttgatacaggctgggattgagatatcaatgctaatatctcattacaagttgttcagtctgaatcaatccagcaacaccgataatgcttttcttcaggtttaaatttaaatttcccaatcttcacatttgagaagtgttataggagacttagctttctcctagaatttcacaattgggtcttaggacccttggataagctttaggctattttagtctttgtgaatgatgattattcagttctacttcattatatcagctatccttccttgaaaatgacggaaatgttctctgtgcctcagaatggaaaactgaggagcaaaatggcttgatagcttcttttaaaaggtatttgtaagttttcctgggtgtaaaaaagagaagcaaaggacaaataaaggaaacagaggagaaagttcagaaggtgaatatgaattttttttttttgagacaggttcttgctctgttgcccaggctggagtgcagcagcacaatcacagcgtgccgcagacttgaacttctgggctcaagcaatcctcccacctcagcttcctgagtagctgagactatgggcaagtgccatcatgcccagctaatcttttaatttttgtagagatggggtcttgccatgttgcccaggctggtcttgaaacatgggcctcaagcaatccttctatgttggcctcccaaagtgctaggaccacaggcatgaaccactgtgcctggctggctgaatatgaacttttagactgccatattagtgcatcataatagttgctatttggaactgttgatgctcctgactgacccccacagtctctttaaaaaaaaaaaacaacttaatttccctgttgttttatactgtggttctctaatcagctggataaaatttccattgatccaaacacactgttaaaaaaaattcccaggttaacttgtaaaataccagattctttcatcttctgtttttcttttgtagttatttatttttctcagattgggagagcctttctggggaacctaagctggaaagggcattcatggatggcagcaaccgtaaagacttggtgaaaacaaagctgggatggcctgctggggtaactctggatatgatatcgaagcgtgtttactgggttgactctcggtttgattacattgaaactgtaacttatgatggaattcaaaggtaagaagtattttttatggcttatggctttataagttgcagggaaagtgcataaaatggctgcagagaaatatcaaaggaccagaattaaaatattgctttgttggtggacatgatagctttaatgacctttgtactgacatttgcatgaagtgacctgctctattttgttaacttttcttgtgtcccataacacaagaggtaaacgctcattaaatataacctccagcatttgttctttgatttctcctctccaactcttcccctagtcccacatgatgcacattattttcattcactcctgagttcatttgtgctttgtttctcaagatcactttcccttttaattttctaaccttcccccaataaatacatgttttattaggtatttgatgttgcctactgggaattaattggattttactctgctcttatatatttcaaatttcaaggagaaattctttgtattgtatttttacctggtatacaaagatacttaaacagcaatatttgaatgtagaatatggctttctttttttttttttttttttgagatggagtctcactctgtcacccaggctgaagtgcagtgatgcaatctcggttcactgcaaactccacctcccaagttcaagtgattctcctgcttcaacctccccagtagctaggattacaagcatacaccaccatgcctggcaatttttgtatttttagtagagataaaatttcaccgtgtttcccaggctggtcccaaactcctaacctcaagttattcgcctgcctcagcctcccaaagtattgggattacagatgtgagccactacacctggctgaatatggcatattttttttcatctttttactctgattagagctaactacaacttaatgtaaaaaaaattattttagatcctctccttttggtattttcaaaaattgggtaaaacatgttcttcaaattttgacccaaaatattattctttgtggattcagcaaataggctggttaacttaatttttcccaatgacttgattttattgttttctcaatgaaagcaatattatagttttgtttcctcttgtatttccattttgtaaggataatatcacagtttgccattggattatatatccttgggacaatctctgcttggttaaatgaagtattgtgtattaatatggtgacttcctatcactgaaactggcttccataaggagaatatgaataaattttatgaaaaaattagctaacccaataagtcacataaaataattgtgaaattgcttaaattttttctctttgggatgttttagcattatattatatagtctaacttttgctgaagtaaaaaaaagtaaagcataaaagataaaaatcaatggaatttcaaaaagatttgagtggtttgctggctgtgaagaaacatcaaagaaatattaaagctcacaagtacagctgaaatcataaagtcattgcctctcgctttgccagcaggtggcattcagggttttggaatttgctaactgagagagaaactattctctaatcttaatgtaccatgtcattatagaatgtttcaaagtgtgcactaacctgccaccttaggtttctttgtttactcccctttagtgtgtttcccagctttaatatcttcaagtcttttcttagagctctattgtcctttttagttttcaggggatgctaagatttttctttgaggtctttgtattacgccaaaataaagaaaataagagttttcccatatcaaccgtcctctgcctcactctgttcatgagtctaactgaatcattgtttatggagacatagtcacggggggcgttgttgatttcctctcttcgcttagtgcctaattttacttctgttttcttcccagttaagtggctttgggcctccattacaagtatgatcagttgatagttccatcaagcagatgcataagagtggtagtggcattgcttcttgctttccttacagtgacatcaggaacagatgtgggcgtttgctggggcttgaaccctaccactcactgtcctgctccctaattgctaggaaatgctcaatggtgcagtgggaaatagttggcaaaggcatcttttcccagacttccaaagtcttggtatactctttcacttatggtattcaaaatgctatttcacatcttagccttttagatgtggggcaacctaaaaggaatgaagaacaaaaggggaaacagtaaattccaaaaaagtctaggacaagctaaaggattgactgggactggaatgtaagtctcaagggtcttttccaagagacaacatgaaaatccttctatcatatgtagatggaaatatgtatacatctaaaatgtatcttttctatctattccgtatttgtgacaagaaattatttagcttttcaggcatttaattgaactaactacagctttaattataataaagcaaaactaacaaattgtatgatatatatgtgtcttttataacaggaagactgtagttcatggaggctccctcattcctcatccctttggagtaagcttatttgaaggtcaggtgttctttacagattggacaaagatggccgtgctgaaggcaaacaagttcacagagaccaacccacaagtgtactaccaggcttccctgaggccctatggagtgactgtttaccattccctcagacagccctatggtaagcctcagagcagtggtaaccatgcttggtaccggacttggtggaaaggttttctcaaagctttgaaagttaataatgaggggtcttatgtgatttgggtggcattctcaagtatatgaagggttacccagagtgttaaactctctgaaactggttctgcaggttaggagcattctgaagaaactgatgtatttcacagttaaatgccaaatctagagggaatttagagatttatttaacagatgtttattagcacctgcaaagatgcttgggggtatagcagctcacaaaccaaaccaaaatacctatcctcattctactgggaaagacatctatttcaaacttctaatattacagttaaggaaacaggtcccatagaagaaaatgacatgtctaagtgtccattttcggtagcatcagagccatttttttcttcttctctgttgcatatgtatggcacctgttctttggttctgattaatctgtcataggccaactgggtttggtgtctctctggctggtcacttattttaaaaaaagaaatattttgattcagacactgcttagtcttctcctgttattttaccacgtgattttttctttttattttttctgagatgggatttccactatgttggccagacttttctggaactccgggcttcaagcgatcctcctgccccggcttcccaaagtgttgggattacaggtgtaagccactgcacctggcctatcataagctttgtttatgtttccaggttatagcttgagctttgataagtctatcaggactgtatatagctcttttctgtatttgcttgtggatcaaagaaaaagaaacataaactacactacgttggtagaaagcttaatattggtgagcaataatttagaggaaaacagatttgctctaaaactcatgttaagtgatggatctatttaggatgaagaaagactgcaaagtaatgaggttaacttaacaaaagcccaaccactagaaatgacacattcagatgaatctccttcaatgtcatcatcctgggaaagtataaacttgtctaaaaatagatattttatctgaaaacatttttggaaatatctgttttgaatagtttttacactcaattcacaactaaactcacacctgccctcacattagatccattagatcaatgatcaatgtgatcactcaaattactattttcattatttggctcagaatgacatctgcctattgtttccccaaatcaatccacctgagaagataaagagaatattttaaagaataagtcaaaggctaaaaagacaattttgaaagcagatataaaatttctagctgtggcagtgctcttcctaaggtcactactttgagagtggcttttggaagtataaactggtttgtgttgcagacatttaaggttttggaatcagatctggctttgaatcctagtcaagctgtttagctgctgaataatgttgggcaagttatttaactgtttagattcttggtttctcctctgtaaaattggaggactaatacttacctcttagagctattggttaagttggtttacttacaaagtaagcatccagtgagtaatatttattatatcctacaaatggcaaaaaagcagtgaagtgtgggttttcttttgacaattatttctaatcatggaggatagcagacatactctgacataattattggggagaaagttgtaggagtcctttctttttttttgccaccgtctgttggagagtggatgggagagcagcagtgaaattgggagggttagtgtagccagatgtggatgtatccagtagtaaccagtagtaatgttttcaacacgttgctaatccattactctatttcacctataggtgaaaagggctagaagtggcttcatgtcttggataattacacatttctaattgcaatttaaccctgtgcatttttccttccagctaccaatccgtgtaaagataacaatgggggctgtgagcaggtctgtgtcctcagccacagaacagataatgatggtttgggtttccgttgcaagtgcacattcggcttccaactggatacagatgagcgccactgcattggtaagaagtctgttttggacgttgttggcaggtgacacaggtgtatgtgtgtccaaacctctaactagactaactgctactcttgaactggaccagctccctgtctaacttcttgactgcaaataagctttctgtagcccacagggcatcttccttggtaggcaccacttctactatacacagaactatgtttgaaaatgtaaatttctgtcttttgggattttgctttaatcccacatctaaggttttcttgggttcccttccccctttgtttcctgaagcctttttctcctattaactatgatcttgaaattccatatggttgaactttgagctcttttctatgctatgtataccttttccactttagatgttagccttaactttgatgggaagtactgtacttctccccactttgacttctcctagaccaccacgtatgcccctttcaaccaggtaatcacatctgaatcttatctggcttattttttctctctgtattccaaagtaaactcctgagcattggggtggctcagttactcacacagtttttcacctttcagttcaaactttcttgtatctgcctccatattcctgatttcattcttaccttgaaggtttcctttcttcctctttggtttcctacacatctattcacacttaagccatcgcctgggccccagctaatgatgaaatgcactcctacaatatttgtttttcttattttcacttctacatttctcctttctgtgcctgtgacaaattcttgctctccagatgttgcggtttctagcgtcgtatataaattatcttattctaacccagacacatttgttaacttcttaggtagttttagattcagaaaaatcaccctcattaaaaacaacatgtatttctaactattatatcaatagtgcgttgtctaataattttgcttttaaattccgttactgcgatttttatctttgtcttgggcatacctccttcatcttcttgactccctggcatcctgtcacagtctcctctttgctgttaaacatcacttcttcttacctatttcctttatccctccccttccttccctgctttcactcctttatatctttatatttctgattgctgttaattatcttggtatctactgtaaggttcttggtgtagatctctatgcagaagttaaaccaacttgaggattgttacggaattactatagagttcagctctgtatgatttttaaacaaaagattgatggcacaggtgagaaaggtttctgtgtgtgtgtgtgtgtgtgtgtgtgtgtgtgtgtgtgtgtgtgcatgttttgcctgtttattgtaatgatacttataacttgataattaaaactcagtatctaatttttaagcagtcctttttattttatttatttatactattttactttaagttctagggtacatgtgcacaatgtgcaggtttgttacatatgtatacatgtgccatgttggtgtgctgcacccgttaactcgtcattacattagatgtatctcctattttataaattaagcatatggatatcatttttcatataaatacattttaaggatacatttcttaggaagaaggaagattctaatacttgtatctccctcatagttgcttatctttttttcttccctgtattatttctaactatgctttccaaaaatttatttttacatttatttcagaattatattttataatttaaagtttgctctgtggatgcatttatctggaatttgggaggagagaaaagaaccatgctgtgactgactgtgctgtgttattcttcctacagctgttcagaatttcctcattttttcatcccaagttgctattcgtgggatcccgttcaccttgtctacccaggaagatgtcatggttccagtttcggggaatccttctttctttgtcgggattgattttgacgcccaggacagcactatctttttttcagatatgtcaaaacacatgatttttaagcaaaagattgatggcacaggtgagaaaggtttgtgtgtgtgtgtgtgtgtgtatgcgtgttttgcctgtttattgtaatgatacttacaacttgataattaaaactcagtatctaatttttaagcagtcttatttatttatttatttatttatttatttatttatactattttactttaagttctagggtacatgtgcacaacgtgcaggtttgttacatatgtatacatgtgccatgttggtgtgctgcacccgttaactcgtcatttatgttaggtatatctcctaatgctatccctccccctccccccaccccacgacaggccctggcgtgtgatgttccccatcctgtgtccatgtgtgctcattgttcaattcccacctgtgagtgagaacatgtggtgtttggttttctgtccttgcaatagtttgctgagaatgatgatttccaatttcatccatgtccctgtaaagaacatgaactcatccttttttatggctgcatagtattccatggtgcatatgtaacacattttcttaatccagtctatcattgatgaacatttgggttggttccaagtttttgctgttgtgaatagtgccgcaataaacatacgtgagcatgtgtctttatagcagcatgatttataatcctttgggtatatgcccagtaatgggatggctgggtcaaatgttatttctagttctagatccctgaggaatctccacactgtcttccacaatggttgaactagtttacagtccctccaacagtgtaaaagtgttcctatatctccacatcctctccagcacctgttgtttcctgactttttaatgatcgccattctaactggtgtgagatggtatctcattgtgattttgatttgcatttctctgatggctagtgatgatgagcattttttcttgtgtctgttgcctccataaatgtctttttttgagaagtgtctgttcatatccttcacccactttttgatggggttgtttgattttttcttgtaaatttgtttaagttctttgtagattctggatattagccctttgtaagatgggtagattgtaaaaattttctcctattctgtaggttgcctgttcactctgatggtagtttgttttgctgtgcagaagctctttagtctaattagatcccatttgtcaattttggcttttgttgccattgcttttggtgttgcagtcatgaagtccttgcccacacctatggcctgaatggtattgtctaggttttcttctaagggttcttatggctttaggtctaacatttaaatctttaatccatcttgaattgatttttgtataaggtgtaaggaagggatccagtttcagctttctaaatatggctagccagttttcccagtaccatttattaaatagggaatcctttccccatttcttgtttttgtcaggtttgtcaaagatcagatggttgtagatgtgtgatatcatttctgaggactctattctgttccattggtctatatctctgttttggtaccagtaccatgctgttttggttactgtagccttgtagtatagcttgaagtcaggtagtgtgatgccttcagctttgttcttttggcttaggattgtcttggcaatgcaggctcttttttggttccatatgaactttaaagtagttttttccaattctgtgaagaaagtcattggtagcttgatggggatggcattgaatctataaatcaccttgggcagtatggccattttcacaatattgattcttcctatccatgagcatggattgttcttccatttgtttgtgtcctcttttattttgctgagcagtggtttgtagttctccttgaagaggtccttcacatcccttgtaagttggattcctaggtattttattctctttgaagcaattgtgaatgggagttcactcatgatttggctctctgtttgtctgttattggtgtataggaatgcttgtgatttttgcacattgattttgtatcctgagactttgctgaagttgcttatcagcttaaggagatattgggctgagatgatggggttttctaaatatacagtcatatcatctgcaaacagggacaatttgacttcctcttttcctaattgaataccctttatttccttctcctgactaattgccctggccagaacttccaacactatgctgagtaggagtggcgagagagggcatccctgccttgtgccagttttcaaagggaatgcttccagtttttgtccattcagtatgatattggctgtgggtttgtcataaatagctcttattattttgagatacatcccatcaatacctagtttattgatttagcatgaagggctgttgaattttgtcaaaggccttttctgcatctattgagataatcatgtggtttttgtctttggttctgtttatatgctggattacgtttattgatttgtgtatgctgaaccagcattgcatcacagggatgaagcccacttgatcatggtggataagctttttgatgtgatcctggattcggtttgccagtattttattgaggatttttgcatcaatgttcatcagggatattggtctaaaattctctttttttgttgtgtctctgccaggctttggtatcagaatgatgttggcctcataaaatgaattagggatgattccctctttttgctttgattggaatagtttcagaaggaatggaaccagctcctctttgtacctctggtagaattcggctgtgaatccgtctggtcctggacattttttgggttggtaggctattaattattgcctcaatttcagaacctgttattggactattcagggattcagcttcttcctggtttagtcttgggagggtgtatgtgtccaggaatttatctatttcttctagattttctagtttatttgcatagaggtatttacagtattctctgatggtagtttgtatttctttgggatgggtggtgatatcccctttatcattttttattgtgtctagttgattcttctctcttttcttctttattagtcttgctagcggtctatcaattttgttcattttttcaaaaaaccagctcctggattcattgattttttgaagggttttttgtgtctctatctccttcagttctgctatgatcttagttatttcttgccttccgttagcttttgaatgtgtttgctctcgcttctctagttcttttaattgtgatgttagggtgtcagttttagatctctactgctttctcctgtgggcatttagtgctataaatttccttctacaccctacttcaaatgtgtcccagagattctggtgtgttgtgtctttggtctcattggtttcacagaacgtctttatttctgccttcatttcgttgcttacccagtagtcattcaggagcacgttgttcagtttccgtgtagttgagtggttttgagtgagtttctggatcctgagttctaatttgattgccttgtggtctgagagacagtttgttataatttctgttcttttacatttgctgaggagtgctttacttccaactatgtggtcaattttggaataagtgcgatgtggtgctgagaggaatgtatactctgttgatttggggtggatagttatgtaagcagagattttactaagcttcctaaatagttttagattgagaaaataaatttattgcttttttatggattaaggtaaaacaaacacctttcctttattttagaaacacgttatttttgggaaccgagacgggaggattgcttgaggccgggagtttgagaccagcctgagcaacatagtgagattccacttgtaccaaaaaaagaaaaaaattagccagatgtggtggcatgtacctgtagtccccactacttgggaggctgcaatggaaggattgtttgagcccaggagatccaggttgcagtgagctatgaccataccactgcactccagcttgggcaacagagtgcaaccctatctcggaaaaaaaaaaaaaaaaaaaaggttacaaacgtgtgtgtattttaacaatgaccaatgttaacataaaagaaatgtcacgtgtatgagagccattaacagattaattgactagacactgtttttcatactcaagcagccagattgattaaaggggaagacatctcttcagggatgctggactatgtaaatgccaagggtttggtttgtaatagtaataaaatttgtaagcaatataacataccaactaagagagccagcttaggagctacactgcctggttccaaattccagcttcccacatttcctagctttgtaactttggggaagttactcaatttccttttgcctcaattttctagtctgaaaaatatgcggttcatatattgctcataaggttgttgagagaatttttggctaatgcatgtaaacacctagagtaatggctagaaaatagtaaatattcagtaaatgttggatatcattttatctgttatcaatataaaaccatattgcccaccctcccctgcccctaatccagacctgctctggggagggaacagctcttttgactatttcttcttttgtttgtctccatgtttctaaatgctttgtttatacttctatttcttgatttatcatttttgatatttacttccttgttctaggtgagcgttttgctttcttacatcattcttctctcccagcttctgacttccctccccccattctccttaaaaagctagattataatttttggttaaattaatcatatgtgtttatattattaacataatataaatataaatattgttcactgctcagccaattagtattctaggatgacatttcttgacaatttttgacaattgccccattttcatttgcttagtttttaaatataacaatcatgtattttccccaaatgctctaatagctctatcaaatgcctgtacaaagacagaaaacaatctataattttttttttctttctggagacccctatcctgtgttccaattgggacttgtttttctctggcctggtgcacagacttctctttgccactcccctgtgctggaacttctgtttgtggcaggccatttatttctttttctagatttatttcctcattttgctgaaacaagttacatgatagcttcctgagaaacataagtaggtggcatatattttgagtctttgaatgtctgtgagtgttttattttgctctccatcttgactgtttggctgggtacaggttgcaagttaatttaaacctggaatttgaagacattgctctagtgacgtctaatatctagtgttgagtccagtgccattctgagtaccatttctatggatatgactttgatatggatatggatatgacattaaaaattaatcttcctctgtttccattttctctggattccttttccttttgatttcttttcaactttcttctttttgatggaagctttttccaagtgtctgagttgctagtttggtattaagggtgaggttataaaacctgacccaaaagtctgtacatgtggataggccttgtcagctggtgagcttcaggcaggaaggtggcttggttgccagattgctccccaaggcaacattagtgagtcttttctggagatggtcaatttctccttcatagatgcctccattttccttcatgaggtaaggggaagatgtggggagatggtggtctgttctgggggtgattaatttctcctccatagatgccttcattctccttcttggagtaaggggaagatgtgggaagatggtggtctgttctgggggtgattaatttctccttcatagatgccttcattctccttcttggggtaaggggaagatgtggggagatggtggtctgttctgggagtgggcagaggaaagggagctgagggcgccctttcagtattcctataatcctcctgtactcagttccacatccatctcagttctgtgttgaggactgtgccttgaacccatagccattctgcttcagctcctccagagaaaatctgtggtcccttagaggagatagaggagtggcgtgacactcaggatctgggagggacctaggcattggattgctccttatcttgctttatctgagccccttagttcctcgcccctgcctttgttaggacctggtgcctctgagtgtgagtgcactgaggcttctgcatatgtgggtgtgtctctcttctgttgacacttagtttgtagcattttccccttcttaactgagttatcactcctccaataccttacttttcaaacatttgttggaattactcatctgctgttattttactgtcttttaagtagaatttcggaggaagaggagataaacatgtttggtttgtcaatctgctattttgaatgagaaattatcttttttgaggacttagaatcaggcccactgagcttggagcactgcagtcgagcttagttctcaggaaaaggtagtattgggtttctagctgcatgcaggccaagtctcccacaggcacctccacaggtcagcttccttctgttttgttgatctggaattctcatagtatttttggtaaacttcaagttcgtatgctgagcaacctacctttttttaatttttttatttttatttatttatttattattatactttaagttttagggtacatgtgtacaatgtgcaggttagttacatatgtatacatgtgccatgctggtgcgctgcacccactaactcgtcatctagcattagttatatctcccaatgctatccctcctcccgcgccaccccacaacagtccccagagtgtgatgttccccttcctgtgtccatgtgttctcattgttcaattcccacctatgagtgagaatatgcagtgtttggttttttgttcttgtgatagtttgctgagaatgatgatttccaatttcatccatgtccctacaaaggacatgaactcatcattttttatggctgcatagtattccatggcatatatgtgccacattttcttaatccagtctatcattgttggacatttgggttggttccaagtctttgctattgtgaatagtgccgcaataaacatacgtgtgcatgtgtctttatagcagcatgatttatagtcctctgggtatatacccagtaatgcgatggctgggtcaaatggtatgtctagttctagatccctgaggaatcgccacactgacttccacaatggttgaactagtttacagtcccaccaacagtgtaaaagtgttcctatttctccacatcctctccagcacctgttgtttcctgactttttaatgattgccattctaactggtgtgaaatggtatctcattgtggttttgatttgcatttctctgatggccagtgatggtgagcattttttcatgtgttttttggctgcataaatgtcttcttttgagaagtgtctgttcatatcctttgcccactttttgatggggttgtttgtttttttcttgtaaatttgtttgagttcattgtagattctggatattagccctttgtcagatgagtaggttgcgaatattttctcccattttgtgggttgcctgttcactgtgatggtagtttcttttgctgtgcagaagctctttagtttaattagatcccatttgtcaattttggcttttgttgccattgcttttggtgttttagacatgaagtctttgcccatgcctatgtcctgaatggtaatgcctaggttttcttctagggtttttatggttttaggtctaatatttaagtctttaagccatcttgaattgatatttgtataaggtgtaaggaagggatccagtttcagctttctacatatggctagccagttttcccagcaccatttattaaatagggaatcctttccccattgctttttttctcaggtttgtcaaagatcagatagttgtagatatacggcgttatttctgagggctctgttctgttccattggtctatatctgtgttttggtaccagtaccatgctgttttgcttactatagccttgtaggatagtttgaagtcaggtagtgtgatgcctccagctttgttcttttggcttaggattgacttggcgatgcgggctcttttttggttccatatgagctttaaagtagttttttccaattctgtgaagaaagtcattggtagcttgatggggatggcattgaatctataaattaccttgggcagtatggccattttcacgatattgattcttcctacccatgagcatggaatgttcttccatttgtttgtatcctcttttatttcattgagcagtggtttgtagttcttcttgaagaggtccttcacatcccttgtaagttggattcctaggtattttattctctttgaagcaattgtgaatgggagttcactcatgatttggctctctgtttgtctgttattggtgtataagaatgcttgtgatttttgtacattgattttgtatcctgagactttgctgaagttgcttatcagcttaaggagattttgggctgagacgatggggttttctagatataccatcatgtcgtctgcaaacagggacaatttgacttcctcttttcctaattgaataccctttatttccttctcctgcctaattggcctggccagaatttccaacactatgttgaataggagtggtgagagagggcatccctgtcttgtgccagttttcaaagggaatgcttccagtttttgcccattcagtatgatattggctgtgggtttgtcatagatagctcttattattttgagatatgccccatcaatacctagtttattgagagtttttagcatgaagggttgttgacttttgtcaaaggccttttctgcatctattgagataatcatgtggtttttgtctttggctctgtttatatgctggattacatttattgatttgcgtatattgaaccagccttgcatcccagggatgaagcccacttgatcatggtggataagctttttgatgtgctgctggattcggtttgccagtattttattgaggatctttgcatcaatgttcatcaaggatattggtctaaaatgctctgttttggttgtgtctctgcctggctttggtatcaggatgatgctggcctcataaaatgagttagggaggattccctctttttctattgattggaatcatttcagaaggaatggtaccagttcctccttgtacctctggtagaattcggctgtgaatccatctggtcctggactctttttggcaacctaccttttaaaatattcctcatagtcagtggttaaactctgtatgctttgttgagggaggcattacattgttcttttttttttttttgaatgagtacacagtatatgcaggaaatgagttgtcagaaatcaaattagctaatgtggtggtgtggtgtagtgccagatacttgggaggatcacttgaggtcaggtgtttgaggctgcagtgggctatgactgtgccactgcactccagcctaggtaagacctgtctctaaagaaaaagaaaaagaaatcatattaaaagtcaggattagctgaatgaagccctcaggagaactccctccttcaatgataccttcttttttccaaattctctttttctactgacttttccctatcatcagatatgctcaagtttctcccatcctaaaaaatatgcaacttacccttcactccatgttcctctttagtgataaccccttctctgcatttcatggtcaagtttcttgaaaggttgttttgcactttcctatcccttcttccacatttctcactgattactcacctcttgcaatctgcccaccaggtggctgacacccctctcatcctggtcacctctaatccctttcttgctaaattaaataatgcctatcagtcctgtatttggtacttcagccatcttctctcaaatattctttcttccatgacagcatactcctggatttccttctatttcttgatcatttttttttttctagtgtaccctggagatcttttctttttctcctgttctataaaaaactgtaaatctgttgttcaacattggtcctcctctctctgaataatttcacacctttcctgcctttgattactatctatgtagcaactataaataattatggggagacttttataatagtgcatttactgagtgtttttcctcctaaactggggaatgagggaaagaccaagcaagcctttctgtaggtcatgataaaaatctctatgcaagttctctctctgaggttcagacccatagtgccagctgccttttggatacgtcacctggatatcctacaatcacctctaaaccaacatgtctaagtggatgcttcatccaacttctcacaggccttagaggaagggcatgaccactcaccccttccttggtgccccatccccacctggtggtcatcatgaacatctccctctcttttagcctctatcattaactcattaacctccagccacactcctagaacatgtagagttttcagtctctgtgtctgtcaaccaccccagacctctgctttgccatgtggcccattaggaatctgtgctctcagaccatcctatgcatctctccatctcagcactcattactcttttatttttgtctcttggcctagttgcctcctcctctttcaccacctcactatgaattaccttgagggtggtgtccacacttctttccagatgcttaacttctctttgacttggttctctcatctgtagaataggaacgatactaatgcctacttgattgagtggctgtgaggatggatgaatccatgtagaatacttggtccagtttctgccacctagtaagtgctcatttaatctaagctgtgattattaacactactaacaatattgtgttttctaaatatatagttggctttctatcacatagagaactttcttttcacaatttgctgaataaatgaagagaaaaagtagtaggattttttcttcctactgcaaaagaaagaggtatggctgtttattctgattcagattttctttagtgaaaaaaagaaaaaagagggtaaaagaaagcataataactccataaagaggaaagcgtttttttttttttgttgttgttgtttttaatcagttctgatttcctttctggtatctctgctggtgttttcaaaacttggcaactttgtggctgtggaagactgttgatgagagggttgggcgatgatacctcagggttaccctcaggtcgtacctggtggtgtcagcttatcagagccgtctccgggtggtagtaggtgaactcaggtatctcttcttcagatattctacagtgagaaatttttttctggaaggttggacatgggagtaaatccaggccataccattcctggttctgtttgtcagtatcatatctactctttgagatccaaagtttgaggaatggatagattctaggtttgtctcatgttattgctcagcagcttacagagtttttttttttttttttttttaaagaattccacatgtgttcctgaaatatgctctaactctgacacaaaatttcagtgtgcattagtaggaaaattgatgccttacaaaatatacttagcttaaaatatgtccatattttaacttataggaagagaaattctcgcagctaacagggtggaaaatgttgaaagtttggcttttgattggatttcaaagaatctctattggacagactctcattacaagagtatcagtgtcatgaggctagctgataaaacgagacgcacagtagttcagtatttaaataacccacggtcggtggtagttcatccttttgccgggtaagtgtgttcatgttttcctaagagcttgaaactgtatgtcttttacagtcattgaaaagtgatgccctagggatttaggtaagttcagcaaatataagattgaactgtataagttgaaatcaccttaaattttatttcttttttcctccaaaaaactttattctgggggagtaaaaaaaattgtttttaaacccaaaacatttcttctaacttttggctttctcagtcttcactgaagagtagtttttttcacagttgcagaggaccaaacaatgtgatatagattcagtagaaaaggagtgaataggcaacagaattaacaggaaagacccaaattctttccctgctttaatatatttatataaagcttagcaaaacttgcttaatcattcagtagttttcagaataaaaagtttttcagaccacaaagtttcatgttttaccattctataattggtggtgccagacaaggaaagacagaagagttcacagtattcctttttggttcctacttttcttatttaaatatgtttaacagctactgtgtttatttagaacaaatctgagctatgtgttgtatatgagtggaatgataaaaaagatggctgctaacccaccaatgcctgattacccagggaacatccatacctgttcttccgttagatatataatctcatcagcttccaaagctagtttgtgaaggaggtatgtgtaaatacccattttagagagaatgaatctaaggcgcagtgagataaagtgacttgtgaaagggcccgcagctattaggcaacagtcagtattcaaattccagacctgtctgactggaatgcctgtgtgcctaaaaaagtctgtttgctgcatctagagtatctgctttaatttcctctctgtaagataataaaagaaacacattttaaaactgatgttattattgataagaaatttcattgccctatagagagttaaacagtttagttttttaatgaatttgtcttaactcaaacttttggcctttggttttgaaaaactgttgaattcctttcctgatgactcttttgtttaaaatgatatgaagtagttacatttcagaaagttacattttggaaaagaataattttgattcctctggatcccataaaagagaaaaagttgtttttttattttcttttgttttttttgtgttttttttttttgtttttgtttttttttgcctctagacttatctttttcccactctttagaatattaaaaaaatgcttgggtcagatactgtttgcattgcattgatttggatgctttcttcatctgagatgaatggtttcctgcaaatttatcaattccttatggaagaatgactagaggatcctgaatgtttaatctagagagaaagagattgaaatgttttcttgctctgttcgttgtttattattttattttaataacgtggaatatttaataggtaacctgaattgtgtcttgttagagaatatgttaggcgacaatagttttagttcctaaactctgagacagtggttctcttctctcaatgcccatttaaatgccatttgtatttgtgactttggttacatgttaactaaattttaactgagaattacatgagttatacactaagtatgttaagttcaatagcatataaagaaaacaaaattaattgcagtatctggagaatctctgtttgttctaaatctctggaagtcatgtagtttgtcccagtgttaacagccttaatttactactgctttttctaggtatctattcttcactgattggttccgtcctgctaaaattatgagagcatggagtgacggatctcacctcttgcctgtaataaacactactcttggatggcccaatggcttggccatcgattgggcgtaagtaggaatcatcatccccgatacttagttctcttttactgcagaacacataatgaggcaggttgggtgatatgatggtgtaaggaaactggtactgcttgccctcgcggaattttaaataattaattggtgatgggagaaggatattgaacaagaacacaaaggacataaacatagttggccagctactgctggggtgaaaactaataaattcatgagtattctgagaaaattgctagagaaagctgaatgacaagatttagtggaaactcaagatgggggaggtgggtcccaagcagcatttaaagtagggtacagatttgttgaactgtaggcagtgtgtaatttcttacagggaacatcttgagtttaggaaatctttggagtcaattaatcaacaaatgcacctttgcttacatgcactttgggaggactttaaaagtataagctatggttctcaagaaattgatgatctatctaggaatataggaaaaggaatagagtaaataagcttataaagatgaaatgccaaggtaacttatgggagaaaaaaagggaagaaatatatttcaccttttaaacatagattactaccactgtttttcttaacttgttgatttcacaaggagaaaataaaatttctggctcaaagatagcaacattttaagttttctaagacaattgattgaaagccacttcatgaaaagtagccgtctctttctgggggacataaaactgttaaatttttaatgaatataatttaaattttaaaaactttgtttaataaatgtgtcaactgaccctactgtttttggatgccctttgtgtaaagggtgctctgatagtttttggataagagataactaaatattttattattttagtgcttcacgattgtactgggtagatgcctattttgataaaattgagcacagcacctttgatggtttagacagaagaagactgggccatatagagcagatgacacatccgtttggacttgccatctttggaggtatgttttaaagcaataaaagtatgtattgtttttatacattgcaagttacaatagtaaactcatcctcatgtggcattttcacaatcccagaaaagctggccactttaaaatgaaaaaatttaaaatggtgctatatatttagacaaaacatttggtttgttgatggtgtatttcatttttagagtgtgatttttgttttgtatatattcgtataatgttgacagtgtatatgggtacagcactttgtagattacatgtattatacaattcaacatcccaagtacttagttatacaagtatcacgtgaggaaacagtaaattactgccttcattttcaagaataaaacagcaagagctgtttatagtaatcattgtagcatttcattattctccagtgtttgtaagaatctcattagaaatccttgtggaaaaaacgattacacatattcatcaactatatgctgactgaatgactttgaaacttttttattcaaaatgttggagaactgacatcgtctttgttttatggaagtgttaggttatgctttatgaagaacagcaagacataattttttttcgtcaacctttccaaataatttcatgctactagtgaagattgctgagaagcatgaattctggggaactacagtcacaatgagcacagccagtgcttgcctgtcttctcagctccccatttgagtgcaggcatgctgctgtgagttgagtttctgggaataagaatgtagcctggtaccatgaaacaggtggtttgcttagtcttgaaaacaggagctctgtgaatggttgtatagcttgtgcactgcataaaaatgccaggccaagagggtgaggagacactgaaatctatcctgggtctgtttgacaaaccatgattactccagttagaggggtcatgttttgtttaagtctaccaaaagccctgtgtatatgctagttgtgtccctggttgaaacctcctactttgaataattaacacagtgcttgaaaagactagacactcactataaatcaaagactttctcacatgcatagaatgtatgtgtggaatgaatagttagtaagtatattgcatatcttgtcctgctgtctgtttatctgtggaggagtgtgtggtatttaaaaaatgctcatgagatttttgatgagttaattataaatactcctcccgtccccctcccgccgctgccatccatttactcccttttcactaatgatgtcagacacatgctatttgctgtcacatagaaacattataaaaagttgaattttctctgctctgggctgggatgttttgggattcgagaaaatgtagttttagtatcttttggtttcatcagtatgaaaaaaatttgaatgcatacccatgaggacaacacaacattcccaaaatagcaataattatttatttctttcaacattgctgtttttttttttttttattatactctaagttttagggtacatgtgcacattgtgcaggttagttacatatgtatacatgtgccatgctggtgcgctgcacccactaatgtgtcatctagcattaggtatatctcccaatgctatccctcccccctcccccgaccccaccacagtccccagagtgtgatattccccttcctgtgtccatgtgatctcattgttcaattcccacctatgagtgagaatatgcagtgtttggttttttgttcttgcgatagtttactgagaatgatggtttccaatttcatccatgtctctacaaaggatatgaactcatcattttttatggctgcatagtattccatggtgtatatgtgccacgttttcttaatccagtctatcattgttggacatttgggttggttccaagtctttgctattgtgaatagtgccacaataaacatacgtgtgcatgtgtctttatagcagcatgatttatactcatttgggtatatacccagtaatgggatggctgggtcaaatggtatttctagttctagatccctgaggaatcgccacactgacttccacaatggttgaactagtttacagtcccaccaacagtgtaaaagtgttcctatttctccacatcctctccagcacctgttgtttcctgactttttaatgattgccattctaactggtgtgagatgatatctcatagtggttttgatttgcatttctctgatggccagtgatgatgagcatttcttcatgtgttttttggctgcataaatgtcttcttttgagaagtgtctgttcatgtccttcacccactttttgatggggttgtttgtttttttcttgtaaatttgtttgagttcattgtagattctggatattagccctttgtcagatgagtaggttgcgaaaattttctcccatgttgtaggttgcctgttcactctgatggtagtttcttttgctgtgcagaagctctttagtttaattagatcccatttgtcaattttgtcttttgttgccattgcttttggtgttttggacatgaagtccttgcccacgcctatgtcctgaatggtaatgcctaggttttcttctagggtttttatggttttaggtttaacgtttaaatctttaatccatcttgaattgatttttgtataaggtgtaaggaagggatccagtttcagctttctacatatggctagccagttttcccagcaccatttattaaatagggaatcctttccccattgcttgtttttctcaggtttgtcaaagatcagatagttgtagatatgcggcattatttctgagggctctgttctgttccattgatctatatctctgttttggtaccagtaccatgctgttttggttactgtagccttgtagtatagtttgaagtcaggtagtgtgatgcctccagctttgttcttttggcttaggattgacttggcaatgcgggctcttttttggttccatatgaactttaaagtagttttttccaattctgtgaagaaagtcattggtagcttgatggggatggcattgaatctgtaaattaccttgggcagtatggccattttcacgatattgattcttcctacccatgagcatggaatgttcttccatttgtttgtctcctcttttatttccttgagcagtggtttgtagttctccttgaagaggtccttcacatcccttgtaagttggattcctaggtattttattctctttgaagcaattgtgaatgggagttcacccatgatttggctctctgtttgtctgttgttggtgtataagaatgcttgtgatttttgtacattgattttgtatcctgagactttgctgaagttgcttatcagcttaaggagattttgggctgagacgatggggttttctagataaacaatcatgtcgtctgcaaacagggacaatttgacttcctcttttcctaattgaataccctttatttccttctcctgcctgattgccctggccagaacttccaacactatgttgaataggagcggtgagagagggcatccctgtcttgtgccggttttcaaagggaatgcttccagtttttgcccattcagtatgatattggctgtgggtttgtcatagatagctcttattattttgaaatacgtcccatcaatacctaatttattgagagtttttagcatgaagggttgttgaattttgtcaaaggctttttctgcatctattgagataatcatgtggtttttgtctttggctctgtttatatgctggattacatttattgatttgcgtatattgaaccagccttgcatcccagggatgaagcccacttgatcatggtggataagctttttgatttgctgctggattcggtttgccagtattttattgaggatttttgcatcaatgttcatcaaggatattggtctaaaattctcttttttggttgtgtctctgcccggctttggtatcagaatgatgctggcctcataaaatgagttagggaggattccctctttttctattgattggaatagtttcagaaggaatggtaccagttcctccatgtacctctggtagaattcggctgtgaatccatctggtcctggactctttttggttggtaaactattgattattgccacaatttcagagcctgttattggtctattcagagattcaacttcttcctggtttagtcttgggagagtgtatgtgtcgaggaatgtatccatttcttctagattttctagtttatttgcgaagaggtgtttgtagtattctctgatggtagtttgtatttctgtgggatcggtggtgatatcccctttatcattttttattgtgtctatttgattcttctctcttctttctttattagtcttgctagcggtctatcaattttgttgatcctttcaaaaaaccagctcctggattcattgattttttgaagggttttttgtgcctctatttccttcagttctgctctgattttagttatttcttgccttctgctagcttttgaatgtgtttgctcttgcttttctagttcttttaattgtgatgttagggtgtcaattttggatctttcctgctttctcttgtaggcatttagtgctataaatttccctctacacactgctttgaatgcgtcccagagattctggtatgtggtgtctttgttctcgttggtttcaaagaacatctttatttctgccttcatttcgttatgtacccagtagtcattcaggagcaggttgttcagtttccatgtagttgagcggctttgagtgagattcttaatcctgagttctagtttgattgcactgtggtctgagagatagtttgttataatttctgttcttttacatttgctgaggagagctttacttccaactatgtggtcaattttggaacaggtgtggtgtggtgctgaaaaaaatgtatattctgttgatttggggtggagagttctgtagatgtctattaggtctgcttggtgcagagctgagttcaattcctgggtatccttgttgactttctgtctcgttgatctgtctaatgttgacagtggggtgttaaagtctcccattattaatgtgtgggagtctaagactctttgtaggtcactgaggacttgctttatgaatctgggtgctcctgtattgggtgcataaatatttaggatagttagctcctcttgttgaattgatccctttaccattatgtaatggccttctttgtctcttttgatctttgttggtttaaagtctgttttatcagagactaggattgcaacccctgcctttttttgttttccattggcttggtagatcttcctccatccttttattttgagcctatgtgtgtctctgcacgtgagatgggtttcctgaatacagcacactgatgggtcttgactctttatccaacttgccagtctgtgtcttttaattgcagaatttagtccatttatatttaaagttaatattgttatgtgtgaatttgatcctgtcattatgatgttagctggtgattttgctcattagttgatgcagtttcttcctagtctcgatggtctttacattttggcatgattttgcagcggctggtaccggttgttcctttccatgtttagtgcttccttcaggagctcttttagggcaggcctggtggtgacaaaatctctcaacatttgcttgtctataaagtattttatttctccttcacttatgaagcttagtttggctggatatgaaattctgggttgaaaattcttttctttaagaatgttgaatattggcccccactctcttctggcttgtagggtttctgccaagagatccgctgttagtctgatgggctttcctttgagggtaacccgacctttctctctggctgcccttaacattttttccttcatttcaactttggtgaatctgacaattatgtgtcttggagttgctcttctcgaggagtatctttgtggcgttctctgtatttcctgaatctgaacgttggcctgccttgctagattggggaagttctcctggataatatcctgcagagtgttttccaacttggttccattctccacatcactttcaggtacaccaatcagacgtagatttggtcttttcacatagtcccatatttcttggaggctttgctcatttctttttattcttttttctctaaacttcccttctcgcttcatttcattcatttcatcttccattgctgatacccttacttccagttgatcacatcggctcctgaggcttctgcattcttcacgtagttctcgagccttggttttcagctccatcagctcctttaagcacttctctgtattggttattctagttatacattcttctaaatttttttcaaagttttcaacttctttgcctttggtttgaatgtcctcccgtagctcagagtaatttgatcgtctgaagccttcttctctcagctcgtcaaaatcattctccatccagctttgttctgttcctggtgaggaactgcgttcctttggaggaggagaggcgctctgcgttttagagtttccagtttttctgttctgttttttccccatctttgtggttttatctacttttggtctttgatgatggtgatgtacagatgggttttcggtgtagatgtcctttctggttgttagttttccttctaacagacaggaccctcagctgcaggtctgttggaataccctgccgtgtgaggtgtcagtgtgcccctgctggggggtgcctcccagttaggctgctcgggggtcaggagtcagggacccacttgaggaggcagtctgtctgcccgttctcagatctccagctgcgtgctgggagaaccactgctctcttcaaagctgtcagacagggacacttaagtctgcagaggttactgctgtctttttgtttgtctgtgccctgcccccagaggtggagcctacagaggcaggcaggcctccttgagctgtggtgggctccacccagttcgagcttcccggctgctttgtttacctaagcaagcctgggcaatggcgggcgcccctcccccagcctcgttgccgccttgcagtttgatctcagactgctgtgctagcaatcagcgagattccgtgggcgtaggaccctccgagccaggtgtgggatatagtctcgtggtgcgccgtttcttaagccggtctgaaaagcgcaatattcgggtgggagtgacccgattttccaggtgcgaccgtcacccctttctttgactcggaaagggaactccctgaccccttgcgcttcccaggtgaggcaatgcctcgctctgcttcggctcgcgcacggtgcgcacacacactggcctgcgcccactgtctggcactccctagtgagatgaacccggtacctcagatggaaatgcagaaatcaccgtcttctgcgtcgctcacgctgggagctgtagaccggagctgttcctattcggccatcttggctcctcccctcaacattgctgttttttgtgaatttcttttggaaagttcttttgttgtgcaacaccatagaaattgtgtacctttttactaaagggctagatcttcttgattgtgcaccacacagaactaaaagatttattgaactccttacttatttaagtatatgaggatgcctttgttagtagtgggactgggattgccaggctctagaaagatttagggagtccaatgactgattggtcattgattagaccacagataaggaaattggtcaaataaaatttatgacatcttaaacattttctgattaattagggttttctagttaaactatcattaaagagaaaatccacattgatgcaattctttcttttaaaaatatatgtttattttcctgctgcaatagttagtgtaaagtgaacatgattaaatttttgttgtttagaatcttatgtcgcctctctcttaccattgtgagcatcattctaacattagtagtgtggttgtaggtgaatccacacttgtgttgagatttttattgatcctcaaacatacactgaaagttccttttttgggctagacctgtacttttccttctcaacagcttcttatttaagtcaagggaaaaaaattacaatttaagcgctgtcattaaaacatagaatatgaactgtttgacctgggaaggatctcaggaatgattcagactgtctccttcacacagcgtagtatttgcctaagagcactcagcaggtgagtgctttagcgggtgcagacctatgaggcctcatttaatgctctgtagaagaattccccaattcttattttcactattacctatgcagaactaaatccaattgctactaaatgccatcataaaactccatatgtgcttgcctgaacctgaaccctgatattattaacatacagacttccacagagcattactagggagtaacaagtcgtggaaaatggttagagaaacatattacagatatttatgggggagatgatcgtacttgcaagaagcatttcaagcctattgcattttctcaagtgatttatttataagttagctgtgactgaaaatactaatctacccatgtttcttttcagagcatttattttttactgactggagactgggtgccattattcgagtcaggaaagcagatggtggagaaatgacagttatccgaagtggcattgcttacatactgcatttgaaatcgtatgatgtcaacatccagactggtgagtgagattgcccagttttttttatttttttgtatgggtttatttatttgttacagtggctcctgttctctttaagtacttattacttaaaggtctagctcctggtagttttatattcttgtcgttcacataatctaagagtgtaagacttgaaatctctgttcaatgctgctagccttaaacatgttgtcaggaaaaacacattttgggacttttccatacctaaatggaatgttgtatttggcgggttgatttccaagaggaagctactttttagtattgggtctgaaaaatgttttgtcctgtttgttttccttcacaaatcaaacccgtgacctacctagtgaaaatgtacatgactgactccctcggggctttgcttttgcaggttctaacgcctgtaatcaacccacgcatcctaacggtgactgcagccacttctgcttcccggtgccaaatttccagcgagtgtgtgggtgcccttatggaatgaggctggcttccaatcacttgacatgcgagggggacccaaccaatgaaccacccacagagcagtgtggcttattttccttcccctgtaaaaatggcagatgtgtgcccaattactatctctgtgatggagtcgatgattgtcatgataacagtgatgagcaactatgtggcacacttagtaagtagctatgcactggcgatatttcctgggatgaatagagtagaggtgggctttaaagaaaataaataaaagcttgggctatttatatgggaaaaatatcttttagaatttcagattcttaacatgcactttgaaggcttttaggaagctaagcaagaaatttcattcataatgttatggatggtttctggccttgatttagactatcttcaacaatttttttccttgacattggctgtttggaccaatgcagtcattatgtcttggcaaactcctcaaaaagtcaaatcgaaataaactagatctgaccaggcaaggtggctcatgcctgtaatcggaggccgagacaggaggattgcttaagtccagaagtttgagaccagcctgggaaacatgacgaaatccggtctctacaaaaaatataaaatggcacatgtatacatatgtaactaacctgcacattgtgcacatgtaccctaaaacttaaagtataataataataaataaataaaaaagaaatagatgagctcagaaaaaaatatgtatataaaattacaaatagctgggactattacaaaatacaaaattacaaaatacaaaaaaaacaaaattacaagtagctaggactacaggcacatgccaccacacccagctaatttgtattttgtattttcacaaaatttgtaaaatacaaaaatttgtacttgggaggctgaggtgggagagttgtttgagctggggaggttgaggctgcagttagccaagactgtgccgtgtacttcagcctgtgcaacagagtgaagccctgcctcaaaaaaataagcaaacaaacaacaacaacaacaaaaaccaaaaataaagtagacctaacatttagcaaccgagagaatagtatcacagaataactacttgcaatcatagcctttggaaaatctcatgtgttatattccttttctcccatgttagagtaaaataaattaacaatgaaatggtggtcttaacctttatattcttcttttgacggtaatctagtctatatagtttggggcctaataaacactattgcagaaggcaaaagtattacattcaaattaaaaaaaagatagaggacagttgaaatctcagaaatctctatcaaggtgaagttaatactaataataacctttcttttggagagaaagaggagtgacagatttgcaagagtaaagtgctcacttgtacatttttctgaaattttttaaattttcatctttttgtgtattatcttcttgtttctaagagcacagcattttaccttaatattttatctatttgcacttttcatatgacatattttcaagctttctatagtctgaatttgaaattgtggttggaggaagtaacagcttgaaagttaaggatgagctttagagtgaatccaaccagagcgtgaatcataggcaggttcctaaatctctcaaagactcaatttccttatctgtaaaatgcagacaattatatgtactttatagtattcttgtgaggatttaaagagaacttatatgatgtgtgtgggtgcataacttagaaaaatgccttttctatgataaataccaaataaatgccagccaataatgatgttagtgatgatgacatcacttgatgaacatttctccttattatatacaatgcctccattaaaaaaggtgaactgagcctttataaggcaagaactcatttaaaaggctgtaaaaacaaatgtcttcatgaccagtttgttactattgtagataatacctgttcatcttcggcgttcacctgtggccatggggagtgcattcctgcacactggcgctgtgacaaacgcaacgactgtgtggatggcagtgatgagcacaactgccccacccacgcacctgcttcctgccttgacacccaatacacctgtgataatcaccagtgtatctcaaagaactgggtctgtgacacagacaatgattgtggggatggatctgatgaaaagaactgcagtaagttttgagctggtttcccttggttggtcagcctcgtaaatagacttcaacaaccaaatggccttgcattctttcctctaaggctcatgcaattttcattgtctctttagtacttctattccacttgtcaatctctgtgtcaataggttacaagaacaaaggcacgtgcctgcacatgggattcttagagtccacctacaaatattgagttctatggaagcaaagcaaggactgcctctgatgccaaacatttcaattcagataggaattgaaaaagtgaaaatccctcagctatctatttatatatttaaaacaatactaaaagtcatatagatatatccagacctttggctattgatgtttctttttcatttggtacaagcaaaaagacatcaaaataaagaggcacagaaaatttaaatttcctttgatcttatccacctgttttccatcttgccagttctgctttcctttagcttgttgttttatttcatgtcttcaataatagtttaagatggagcaaagttccctgggctaagttctagtcctggttgcctgactaggcaagtcactatcatttggaatagatgagctttaagatcccttctagctttcataccctataagtgtgtatttaatataatttcatgttgtgggtggggccagccactgcatccgactccaaggctatggtcttaacagtaaggtaggaccctggtttttagaattgttctgttcagacttttaaatccagttttgggggtctgtctacacactgttgctactaggcatgtgggtcatgctggttttgttgcctgattgggctccattgcttggctttggtctagagtcatggacttcatagtattcatgaaatgtagtccaagtccaagcacatgatgctcactttctgaatgtggtctattttccaaggtgtaatcacagtttctgactctgccctgtaatctttttattctcaattctaaaacctatcctagttttgagttcttttgcttagctgactttgatagtgtggctgattcaaaagaattttgaacccatgtacaattgagataacttctgtagctatttagccatttttagtttggctctggtacttgttgcacaggaaataaacttgttggttttgttttcggatgacattagattcgacagagacatgccaacctagtcagtttaattgccccaatcatcgatgtattgacctatcgtttgtctgtgatggtgacaaggattgtgttgatggatctgatgaggttggttgtggtaagtgcattgccttcttttttattcacaatgtttatttagaaaaatctcagtgttaacacatggacacagggaggggaacatcacacaccggggcctgttggggggtggggagctagagaagggatggcattaggagaaatacctaatgtagatgatgggttgatgggtgcagcaaaccaccatggcacgtgtatacctatgtaacaaacctgcatgttctgcatatgtactccagaacttaaagtataacaacaaaaaagaaaaatctcagtgtttagtcattttagccctgagctaatttctaatgcttttctctttcattcttagtattaaactgtactgcttctcaattcaagtgtgccagtggggataaatgtattggcgtcacaaatcgttgtgatggtgtttttgattgcagtgacaactcggatgaagcaggctgtcgtaagtaacacatacccagaatgtttcagacaaaggggtcatttcatttttgccagtattgatattgatattgccacacattttccctaactcagacaaactgggggaaagtatcctcaaaggaatgtggtattgaacatacagtaaaattgagtagacattgccatataatgtgtaattaacaaatcaagtggttgtataaatggacacttcaaatagtctcttagatgggctaaatatttcttagatatttttgttttcacttttagtttttcttaggacttcccactttagtaggtttaaacttttgaggctctactccatataaagatattttactggtttcttttaagtttcagtagagaagtcatatcatggtgtagaaatggtatggagctgtgtttagtattgactctgatgaattcattctttgtgctattatgtgttgaatatctgctaagatgttatctatggagattatagaaggcaagagacaattaagcaagatagacagttacaagggtcttagaaatggcacagataaaattctatggaggttcagagaaaagaaatttcttctagttggaggattcaagtaggacttcatacagtataattctgatggatctataatcttcacagactggaaacctatactcacatgatttgttatttgcccactttttgttttaaatggattttagacttgcaaaaactcatcagtgagttgatcatttgtttgaacaatggtgttttagaccaaaaaagtaagttttcatgaattctcctcctgcgtcagaaaggtagtgtgtaaagccatggattaaaaagaaaagttaaataaaatgcttatatactttatagtttgcacaacatctagaaattactaatcactaattttcctgtttcacattaaaaacataaaattctgtgatgagctgaggttaaactgtcaattgccgctggcttgctgttgccttgtgagatccctggtagagagttttggtttacccttgtcaaatagggaagcagttcttacgtatctctccaggattgcttgatgaatagtggaaagtttgcaaagaactgagtatttaccatcatctttagttagtgtgtgatggtttcattaggtatagttcatctgagggaaaataataacacccaaacatgatatgaaacacatgaagttcaaagtaatcatagctatttaagctctattgtaatgttctggtgattctttcatagaaagatagataaactttattattgaatctgcaattggaagtacattaaaaacacaggaaaaggaaacaggatgttcttttgacacaggtactcatctgctagtcagcagttgtgcgttctgtacttcgtttgttgtcagagccactagctgccacaaagaaatatttctatgtactagagtgtgggagaagactctatatcatttagccttaaatattaatttggtcatagttgttactataaacctactattggatccaaaatcatttcctctgagtctagactataaaagggatcacaaattacattcacaagccgatttaccccatgttttccttctagcaaccaggcctcctggtatgtgccactcagatgaatttcagtgccaagaagatggtatctgcatcccgaacttctgggaatgtgatgggcatccagactgcctctatggatctgatgagcacaatgcctgtgtccccaagacttgcccttcatcatatttccactgtgacaacggaaactgcatccacagggcatggctctgtgatcgggacaatgactgcggggatatgagtgatgagaaggactgccctactcagccctttcgctgtcctagttggcaatggcagtgtcttggccataacatctgtgtgaatctgagtgtagtgtgtgatggcatctttgactgccccaatgggacagatgagtccccactttgcagtaagtttcctgaccacagtttactggccataaactcattctgaacagtagcctggtgtgcatcaccattgtcacagtcactgtgtagctttgtaggaaggatttcagttcctctatgagttcacatctgtgtagggggtaaccataattgaattcaaatacatcaccattggataattttctgattaaatcctttgtacttggttatgtgtttttacttctttttatgtctttgtttcaaaaaatgagactaaattgaggccattagattgtcaaattaaatttggttctgttggtaatgtgctcattaatttttctaactttaatattttctaatttcaatcagaacttatcacaaaaaaatgaagtccagggatttgtgttgctgtgattaaagtgctgtgattggcatgtaatcctaattactgtcatttctttctttcctctttaatcaatgctcactctcagatgaaccccagccaggtatgattgtgaagtatttcagattcttatgatttcatatgtgttgtgtttgttctgaaaatgtcctgattatattaacttacttccctttctaacgcatgttctgtgttatgactcttacaaatatgttagagtacacatggaaatagaaggcatttgcatccccaggcatgtgaactgtcttagggtggctttaggcattttcattttggccctgaaagtaaggcatgacgatatgttaccggatctgtgtactctaatatttcaatgacctttcccctttgatttgttcacttcatagattttctggtcttttctcttaaatgtttgtctatcttccatttctgtatagatagtagaatttcagaggaagaaaacgagaaacaattttaagtgtctttgcatgctctatcaatgacacttttcttccttgatgtcaacaatattttcccaagggttctcattgcattaaatggagttatactattgggttgtagtgaagaaggtgatcatactccaatggatatgaaggatggtaaatcctcagacaaattagagcaaaccctgaacagcctgtggaactcacccaagtgcatgctgcacttagctcttgtctgggcatcatattgaaggtggcatgagactgcataataaatattgcataagagtgaatcaaagaagcaaagattcttgattttcttttttcattattctctttcttttttctagatgggaacagctgctcagatttcaatggtggttgtactcacgagtgtgttcaagagccctttggggctaaatgcctatgtccattgggattcttacttgccaatgattctaagacctgtgaagacatagatgaatgtgatattctaggctcttgtagccagcactgttacaatatgagaggttctttccggtgctcgtgtgatacaggctacatgttagaaagtgatgggaggacttgcaaagttacaggtaattgctgaactaacccgagccagtttatcagcacatcccagagcttaaaatcaaatggcacatgtaggtatttgacaatgttgattaggagttagatcgacttgaatcctggaaagattatgcaatctctttaaacctcaattttttgtgaggattaaatggggtaatacacattaaaatcctggtgtattttggaaaatagaggttaaaacatatacaagtcaatgatttttaaagtatttaaaataataccaaatggcttttatataatttaaaatgagttctatactatatttaagcatctttatataatgcttaattgaattcaaccagtattaattcaatttctgctataagaaagtgctttttactatgtattaggatattgatttgaccactttcaaagtgaccaaatagaggaagctaaaacaaaaacagaaagtttctttcttttacatgtagtaggagtctggatgtcagagagtccagggcatggggtctgctctgttatcctcatcatgtggcttacatcaagggttccaatgctccaggttttagcttctcttagaaagtaggaaggggaaagagaaagtggagggcaagcagcttcctttttagaatgtgacctgagatttgattcgtaatttctactcacatcctattggtcagaacttagtcatgtggtcactccaaacttcagtggagggagagaaatgtctctggctggagagtctgtgccaagctaaaacttggcatgctttattactaaaaagaaaaagaagagagggggtgttgggagaattagaactctctaccatagctgagggcctcagaaaacagaaatatttaagacatgattcctgctgtccagaagcctacaacctattaaatagtaaggaagataaccaaagtacaaaaataaatacagtaaaaggaagaatgtaagcatagtttactctagactagtatttagaaacacagttaaatataacccaagaaagagtctattttaagtactcatgaaaaccagctaactattaaggttaagaatgaagtgattaaaatcattcatatggggcttcctcccctccccaccaacttactatagtttggaattacaccttctttctgttaccaaaagtattgaatcaaaagttttaaagagttgttttgtgttttctcccagtatcattgacatttttgcatttttttcttgaacagcatctgagagtctgctgttacttgtggcaagtcagaacaaaattattgccgacagtgtcacctcccaggtccacaatatctattcattggtcgagaatggttcttacattgtagctgttgattttgattcaattagtggtcgtatcttttggtctgatgcaactcagggtaaaacctggagtgcgtttcaaaatggaacggacagaagagtggtaagtacatttctgttgacctttggcctggctagttcctctgtcttgggtctgtttgctgttattcaccagtgagagaaggccctacctcatctgggtagctctcatggtaccttctgggccacatcatacccaagagacttgcgtgttcataactacgaatttatggctgttttagataggagggtggcctctgaatgcagatgtgtgattctgaattccaggtcaggtgatgcagagacctcacaatgtctttacggttccttttgcagtcttttcttgtggatgagagcagaggaaagtgcaggaaagttaaggggttgcttttcttagctttaatttagtgatatttctcaatccatctcccagaatttcagtttcttggctcctgatagttacatttcctctgcctcttacaactttattttgtaattcttggtccttaattaatagagatattattcgttgcatgcaaacactataacattttgtaatgttgccaactaagcaaatggatagagctttttcttaattgcaaaaacttttgaaaccaaaacgaaactatgcactaaccaaacaatgaagtcatcttagaatgttcagtgtgacaaaatcttgtatacttttctcagaaaaccctgctgttgatttggtggttagctacatgaggagacaaaattttctaatccccacaagtaattataggacaagttagatggtttaatctagatttttatataatatccatgtttgcattcatttatttgctctagaattcactctttattcacttttgtctttaggtatttgacagtagcatcatcttgactgaaactattgcaatagattgggtaggtcgtaatctttactggacagactatgctctggaaacaattgaagtctccaaaattgatgggagccacaggactgtgctgattagtaaaaacctaacaaatccaagaggactagcattagatcccagaatgaagtaagacttttttttaaaattatgttgccttgacatggttatgatgagggaaaaacaacagtaacatgatgtagctgatatgcatgttgctgatatgcaaaatttaaaatgatcccttgtttaaacatggtaggtgtccaactgggtgttgctatctctccttcatctgaatcatcctcttcataaagtacataagagcaattgattgtttactttattttaagagcacattgatttattagcttggcaatacaatttttgaaatgtcatataattaaaaattaagtttctaattactgcatgcagtaatagtccatagaggggccagtttgatgtaactttgataactcatgattatacaacaaaaaagctggatttttctgcttcagttttatgttgtttattagagctcccttttaagtcatataaggaaggcagtttttgcctgctgatcctgaagggaagatagagaaattctcccatgtgtttggaaatctttgaggatttctttccctgaatttacttatattttataacttagattcttttctgcaggatggtaaattaggcaagttatgttcaatgtgatgttgaattcctagatattgtaaagtattacacaccactgaaatttatgatgaattcctgatgaagaataaattgatttccttatctaaaaacatgacagggtagacaaacaaggacagatggatttttctagatcaactatttgtggattataaacaaacatgaattggcattgagacatttcaatgtcataatgtactacattatgacattatgtattacatgttttatgaacattataaaaatacccagatgggttgtgattgtgttatgacagttttactttgtgacacttagaggaaacaataaactctgtgaatatattctgaaccagagatgatttattttaagcagggcataaacaggatgttgtattatttaaaatgacagttatttttaatatttaaatacgtcccctccaattggtaactcatttcctttcccagtgagcatctactgttctggtctgactggggccaccaccctcgcatcgagcgagccagcatggacggcagcatgcgcactgtcattgtccaggacaagatcttctggccctgcggcttaactattgactaccccaacagactgctctacttcatggactcctatcttgattacatggacttttgtgattataatggacaccatcggagacaggtgatagccagtgatttggtaagttggtggtgaggaaaaccaaattaaaactacagtcgtggataggtagaaatcagacgagtatcagaaaagctaagaaattaatttttgtgtcatagacattgtcagatcaatccaggaaataccagcaacagtgagaggcagtctatcccatatgactaactggaaaatgaatattttcattccagttcatggtcagcttgtgccatatccaggaaggatttttatagctcgtgtgatttagttgagctgcagatgtgaatctgttgcttctatacctttaaaaattgtgtcaggtggccgggcgcggtggctcacgcctgtgatcccagcactttgggaggccgaggtgggtggatcatctgaggtcaggagtttgagaccagcctggccaacatggtgaaacctcatctctactaaaaacacaaaaattagccagtgtggtagcacacacctatagtctcagctattcgggaagctgagacaggaaaattgcttgaacccgggaagcagaggttgcagtgagctgagattgcctcactgcactccagcctaggtgacagagtgagactccatctcaaaaaaaaaaaaaatttttttcaagcaaaaatttataacttaacttggccaggcacattgtctcacatctgtaatcctagcactttgggaggctgaggttggtggatcgcttgagcccaggagttcaagaccagcctgggtaacatggcaaaaccccatttctacaaaaaaatacaaaaattagctgggcatgggggtgtttgcctatagtcccaactacttgggaggctgaggtgggaggattgcctgaacccagggaggtcaaggctgtagtgagctgtgattgtgccactgcactccagcctgggtgacaaagtgagaccctgttttcaaaaaaaaaaaaaacaaaaattaactagatttatatttctcagtcttgttcttcacataacattttttattctataaattctgttgaatttattttcacaagttaaatgggaaaataaagaaaatagatattttatcaaagagctgttattgacccccattaaaaataggaatgcttttacactgttggtgggagtgtaaattagttcaaccattgtggaagatagtgtggcaattcctcagggatctagaaccagaaataccatttgacccagcaatcccattactgggtatatacccaaaggaatataaatcattctactataaagacacatgcactcatatgttattgcagcactatttacaatagcaaagacttggaactaacacaaatgcccattaatgatagacatatacatcatggactactatgcagccataaaaaagaatgagttcatgtcctttgcagggatatggatgaagctggaaaccatcattttcagcaaactaacacaagaacagaaaaccaaacacttcatgttgtcactcataagtgagagttgaacaatgagaacacatggacacagggaggggaacatcacacaccggggcctgtcagtgggtgggggcaaggggagggagagcattaggacaaatatctaatgcatgtgagggttaaaacctagatgatgggttgatgggtgcagcaaaccaccatggcacatgtatacctatgtaacaaacctgcacgttctgcacatgtatcccagaacttaaagtaaaataaaaaataaaaaattaaaaacaatttaaaaaagagaaaaaattgctattgtatagttgctgtgacttgaaggaaagatgcatctaaactataacagattgatgtgaatcagtgagtggcagcacaagaccgtggaaatagccggcacaagtgtgctgatggtggagtgaaggctggggcgtgggagtgggagatgaggagtctctaagctctctagttccatctaacttttaactagtaggtgatccggatacatcaccttgctttttgtgcttcagttttgttttcatttgtaaaatagatgcccagtgtaattaccaaggcaaacataaagagtaaatggcacgtgtatgtgaaaggctcttgaatggtttagtgggatataggacgaattgtgtattttttgccgctcttttgcacaatgacttccttgtgtttttattaaataatgacatgttaaaggaaaccgtcttcttgagcagatatcctctttgactcagtgcaccttggctttgatttttggatgaggtctcactgttctcttctgcctcacagattatacggcacccctatgccctaactctctttgaagactctgtgtactggactgaccgtgctactcgtcgggttatgcgagccaacaagtggcatggagggaaccagtcagttgtaatgtataatattcaatggccccttgggattgttgcggttcatccttcgaaacaaccaaattgtgagtgatacagagaaacatcctgcctgggagtagcttgaaaaacactgaccctgggaatgctaaatgcacactgttacagacccatttgtttggacaatacattttccttttctctttacaaaccaccccactatatactttccctagtcctgacattgccattacttttatttaccatggaaatttcaaacctaggatataataacagcacatctgaattatatcatttcagcatttggctgctacctctttgaccctcacatgagtctccgtttcctcagctgacaaatggagtacagaccagatagtgccttcgatcctcttaccgctaccactctgattgaaagcagcttacttttaggactagtttattatggcaccactgccttctaggtgctctgctgtagccagcacgagttgtcctaaagtgcatggtatgggtgtctaggtgaaagacttggcatccgtactgttctttctggtgggagagggagataagtcacttaatcttcacttaatcctctctcctcaaaactctccaattgtttctcacacccttcagcatgtggctgctgctatttccctgctctcttctcccactcgctgttgccacattggatttcattatggtccaaaagcacagcaggcgactcctgcctctcagcttctgcgctagctcttccctctacctggaacatctctcttccagatctctgcatgagttgcttcgcgtgctatttaggattctacccaaatgtcactttctcagagaggccctcattgaccgctctacctaaaatagccaccccctcataattcttttgctctttaccctcatgttctgaaacctctctctctctctctgagtttagttgtttctttttgctcgaatatatactccacttttatagcgtccccagtgcttagaatggtgtttggtttacagtgaatacctaccatttttctggtgaatgaatggattaataatctattaataacatggtatgtgtaataaaaatgtataggatctaggaaacatcctgtgtgtggggaccacacagaatcctgattttcaaggtgcagagacacacagagatatcatcagtagaaaaataaaagattattatctaaccaaaatctggaaaactctaggtaaactacaaggtcacacatcaaacacacaactttttttttttttaatgcaaaaagatctcttttaggtcaggtaaggagacagattatttggcatcatatttctattacaagttccagattactcagtggctgtttgttcgtaatccagttatagactggattgatctgtaaccttgagtcattctcctctctcgtgtctcttatgaattctaagttgaaagcctgatgctagggaagttgaaagtgtgagtagttcagtgaaaacaaaacaaaagaaaacaacagaggtaacaacgtacttaagcccccctgtactggggcctctggaaggacactaagagcatgactctgttttgattttaatgtggaggttttccacttactggtgctttcttctctttctcatgcagccgtgaatccatgtgccttttcccgctgcagccatctctgcctgctttcctcacaggggcctcatttttactcctgtgtttgtccttcaggatggagtctgtctcctgatctcctgaattgcttgagaggtatagtatgctccttatgtgagctctgaagatggagctggtcatagtttgtgccaagcagtggaaactctaaaaccaattgcgactgaacatgtgctgtgtcctttgattcctcaggtgtctgcagaatgatgtgtgttgtatggggtgatgtcactgtgtgccttggttgtaatacagtttctgtatatggaactaatgttatctgtgcatgtaattgaacaatctgtaacctcatattttctctcacctgggtacagttagacttctctgacaagccatgataatgggaagttccaaattcttcacctaagaagtaaacattctcaacgtttgtgtacagcttcattttttatgtccattgtctctttctccctcttttttttttcttttttctttctttcttttttttttctttctgagacagggtcttgctctgatgcccagactgtagtgcaatggcgtaatcatagctcactgtagcctccactttccgggcccctgtgattctcccacctcagcctcctgagtagatgagactataggtgcacgccaccacacccggctaatttttgtattttttgtagagaccgggttttgccatgttgcccaggctggtctccaagttctgccctcaggccatccacttgccttagcctcccaaagtgctgggattacagacgtggaccactgcacctggctccattgtctcatttttattcttataaccaatagttaatgagtgttctagcctgggtcttctgactccaatttcagtactgttactattaccatctgatactttaagaaggagaattgtgttggtatgagatattacaagtgactgagcaatttaatatttatctcatcctagagatattttattgggtcgattgaagagtgtgtggaggattataccaagtacttaagggagtaagaaaagaaggaaaagttgcatccagttcacaaaagagatttcttctggagtgtgtacttgtatataatacacttaaaaatataattccttattgcttaaaaatctaagaagttactctaaacccaagttccctttcgtttctcagtgaagagaactgaatgaatatattttgatactgatgaaaattgctgtagacaagttcaacttaaatgtttaatgatcacatattcctaaattaagagataatagagtcctaatctagaaggaaatttagtcctaatctagaatggaaaatatatactgaattcaggaaacttttagtgtttagatattatgcagatgtaggcttactgaaaatcaaattccatcagcatgtaatattgtgcaatgatactttcatgatgaaagattttaattattggtaattctcacagagggactggcacttgccatttttcctcagagacttattatgtacctaatcctcgttgacattgtttaatttagtgtgttcctagagtctttcaggagaagattaaactgggctgtagacatttcggatacaaagcattctttcagcacacaaagactgttgaattgcacattgggggttggtgtaatcaatattactctctgatgatgattgataagtgttaattttaaatagtgccttttgttgtttcacaaataattccactagtggttttctcatgggttgactttaccgaagtggaactttttaagtatttcccagtaggtttcagagcaccagctgagtaactgattgccaatatatgttaaatgaaaaaaggtttccacatttttttttccccaacaagaagtttagaaaacttgttaacatttataggtggaaacattttacttgatttgattgttgaatagcttttcaactagtgtttactaagaggctggaatatatgtagaagtgcttctgtgatgctgttaagtaaaagaagcagatattgcacaatattggccttgtaaaaacatgcattaaaaaacacacaagtttctggaagcaaaaacacacaagtgccaatagtggttacagttggataggggaattatgagatggttctacttatttctaattttatgttataatgagtgctttctctgtatgagactttttaaattctttagaaaatatattccccacaatgccaaaaccaaatgaacaaacaaaactcaagccaaacatcacctcagcacccctaaaattactccaaatacaaatagacttctgactcggtctcaggggcacaaggcacttgcttcagtgattttgtgcaagataagagaacactccttgtccttgctccagggaaggctgcagtgctgatcagcttgtgcagggtatgacttaaggaggacctaggtttgggggtcatatatattgtcgttcaattacaacactgagttctcattcctgactatagtgtcttcatgactctgctgacactaacattaatgggattatgacatggaaaatagaaatgaagagatgatctttaacttcaaaagacagagacacactgacctacttaaccgtcaccacctcctgaattcctttccatccaaccctagatgattctgtgcctaccccttcatgccattgtcataattgtaagggctcatatacttggtcttgccctctagatgctgcgttccttgaggataaagcctctacctggtctgtagatgtatgcttattgcctgtggcacttcgtggtacatggtggcactcagtaaatgttgagtgaatgacaagctctccaatatccatttttgttacttccccagtcctctgatttttacccgtttgctccgtagaaatgtgtgcagtgttgtgaagtcacttctttttgctttcccatatagcacttttcaggcatctccctgcgccacctgttgtcttactggccagttcctttctattactcccctggcatcatcccccaccatgatgctcacagtttcagccagcgcagcattgcaggagatcctgttctctggtccattgcttgcaaatgttcattggtggtaaacgttctcagtacatcagcagttatcagataaagggcttgagacatgatccccaggaagcagtagaagcgggtggtgcttaagggaagagcaccatggaagagtcaagaaggcccatgcataatggatgagatatgcaaagtttttaggccctaaacaatgctttggttgagaattattccaattaagcaaagggagatgacccattcaaaagggcaggatcagatcttacgtaagtgagtaaaaatttaaagtcccccataaaactgggacagagatagtttctactgagccagtgaacattaataacagataatcaataaataattaaatatcatctcaatataatttcttggtacagctgaaactcataatctagcatttttttttttttttttactgttgcagttaaaccaaatgaaatgagtggtaatttgatactcaagaaatagtacctggcctgcggtatttgcagtgtagtgatgaaaaacgtagattttggagtccaggagtcctggttgtgtgacctcgtttaaattgcttgatttctttgtgtcttatttgcaaattgagggaggacctatctaacaaacaagattaggaaacttgagggagataaattaagggaaatacttacctgatgcatgcagtatggcgcatattctcaatcaatgagaagcgatttttattgcaattgcagttgttcagaagagaggcaatgtggagcagctgagagaagaagggcctggaagtgaatgagccagggtccatctcctattactgtttcctgcagaagtcacagagctcctgcaaatctcatttgctccagctgaaaacaactttgcaggcttgttgtggaagactctacattgtagtacttgaaaaatgtaaagcattaatagttgcgaaatttacattagactaaatttaaatttgtcctaggttaataaagactgggttatttctcagtaatagaaatgataggaacaagaaaaagctaatgagatgtgaaaataagtaaagaaaaaatgaccaagtcatcctgctgaagatggaaagcttcccggattataaaaataatgaaaacatcatttttagcttatgaaagttgtgtaatgattaatcatttcatactttgtcttaatatgtgatatatcttatacatatatcttaacccaaaacttagattcaaaagttttccttttctcagagaggaattttaaaaccccactcttgatggggatcaggataaagattaaattatttttgaaaaaggaacttttattatctattaaggagataagtgaactgatagtttaagatattatgggaatgtttaaattacaatgtgtagacagttttgagaactttggaagatactgtttacttattcacttatacattcatccattaatgcagtcatatggtcatccatttagttatcaaacatttattgggcaactattttatgccaggctctgagtaccaggccctgggacacaataatgagcaaatcagacacagtcattgacctttgggagttaaaatcttatagggaagagagacactagtcaagtaacaactgataggattatacattggatttatttattaaagtctcaataaatactaggcaacactttgtagtgttgttttatttttggaacattcttaaaactagtaagctgcctttcacaagaatagtctcaatgatttttttcactttttttttttcaaaactcaactctcctttccctgagatcagtgtgagtgaggtttgtctgtgtgtagaagtggaagaacttcctgtctgtgaggtttagcaaacatgggtggtttattagtgtaagtaaggacttaatgaagagtaagataaataccaacctgccttgaaaaagtccagacagcgttgtatgtggggttggaggtcttgtggtccagcagcccactgaaaccctgggaaaggcccatgcttgtctgatgaagtacattatatttattgctgcaatgctgcaatgtcattttagcccatatgatggtaacaggctattgccttccattactctaaatgtctgggaatagtgggatatgattttgactgatattcttctattttcacagatgatcaacctttcttaataactgtaaggcaacatataatttttggaatctcccttaatcctgaggtgaagagcaatgatgctatggtccccatagcagggatacagaatggtttagatgttgaatttgatgatgctgagcaatacatctattgggttgaaaatccagtaagttttgaataacattcaaagtatataatttattcttgaagagcctgcctgcactgatgttttcttataagcaaacttttgtcatgtgagtaaaagggaaacaatgtggaaataaatttatccctaagttttttgattcaatgaggggtatatatgtgagcttggcctggagcaaaaatcataacactctttagcttcagaataagaaacaaatttaagctattgtgtattatttactcattcagcaagtattttccagaagtgcctatgatttgccctgcactgaattacctgcttctaaccacagaatacatgccaagaagcagcagtcacaatgcttgcccctagaggagtcttaagctagtagaaaatattcgacgaatataaaaatgatcaaaactcaagataaaagtagtagctccctaagggaatttagtgaaagcatttgatgtggtgctggggccttcctttagaatcctttagaatatttgcctctagggtaagaatgaacacttctccagttctcttcctcagaggtcattttcttcagccttcagggaaaaaacctgtaagaatagggaaagagcaagaagactataaaggaggaagagaagaaaaatctttgtgtttcatgtttgtcacctatatacaaaatatactcctggtcttctgatccacatctgtgacttgggtttttctcatgacttgtatgcttgtggtagttaagaactatctctgtagccagtactggagatagcctgaatggtaagccttgtgtattcctgtgacacactgaaaaatcgtttgaagcctacccagtggtgctgaacctttgtttgcctttcctctgagtgtaaggactgttcaagaaatacagcagctggcagtagccacagtgaagaaagggttcttttgtaggagccatggccttggaactgctcacctccccttgtctttctttccagggtgaaattcacagagtgaagacagatggcaccaacaggacagtatttgcttctatatctatggtggggccttctatgaacctggccttagattggatttcaagaaacctttattctaccaatcctagaactcagtcaatcgaggtaatgattccataatactacttacacaaacattggatttagattgatgtaaactctagtctcaggaatagatctcacgtggattttggaatcatttttaagcaaaaagaaaaagggaaaagatattagtgttaactatcaaagtctctgaagtgaaagaggaaaaccaccttaaaattttttttaaatttatttttatttatttatttattttttttttagacaaagtctcactctgtcgcccaggctggagtgcagtggcaagaccttggctcactgcaacctctggctcctgggttcaagcaattctcctgtctcagccacccgagtagctgggattacaggcgtgcaccaccaagcctagttaattttttgtatttttagtagagacggggtttcaccatgttggccaggctggtcttgaacacctgacctcaagtgatccacccgccttgacctcccaaagtgttgggattataggcatgagccaccacgcctggctggcaaaaataaattatttgagctttctattgctctattttgtttcctcctaattatcaatactaccttgttgctataaaagtgttttaggtaatttacaaaataatatataagaagataaataaaagttgcataaggaattcaacataaagggaagattatggtaagcagagaattttactatgtttcctcatctaatcttcaatgctatttcagttctcaaccaaatttatagtttgcctctgttcttagatggaaatctttctatggctccagtacagtttttctaacagcaaaacagaaagtagaaacttgattctaattcctttgatactctcttcttcaagataagtgttctttttactctaattcccagaagaaattctagatgaggcacaggtatgaaatcacatgaagtaagtcagaggtaacttgactagtgttggtttgctccactctgagagaagggtaaaacatggaagggattattaattcacaataattttgaaagtgaaacttcccaaaacaaggagaagtttttggagggggatagttagcagagccctgacaatccactgctttaggtgggcaccagctggcaagacggtttttctctggagcattcagaaagatactgaagatgagcaaggcgcacagcagcctgctggctaatttagagcacctatctatactaaaaagcactctctgtagactaagaacacagcctatgtagagttcggtactatctgaggtttcatgcatcccttggtgatcttggaatgtatcccccatggatgagtgcagatgactgtttttatttctgccaaatgaagaaatagggaaaaggtgtcccaggcagagaaaagagctctcactggaacagcgcttgagtttacaaagatctttcactagcatctaatttaatcctcacaacattcctgagggcaggcagttctggtagccatttgtgatgagagggaaatttgcagtgtgcacaagtatctcaagccaggtagaattatcaggtgttaacatgaagggccccttggaggctcctctggttcaaactcttttttttatttttatttttttacatcagaaaccaaggcccacagaagctaagaagatgtcttaaatggtcagcttcactgctctaattcctgagcagtattctctctttgcacttttataaactacaactccggcaatccagactggtttaaccctctttgacagtggcagaaaatatttttcatgatttcaactaagactatcatcctcccattaaacaggcaacatctactgcctaagacccttactaccaaactcacatctctctaaagtccacccagtgcaaagctgtcttaattccaaatggcaattaatatgctcttattttatctctttgtctcttgattagtaaatggggttctcttcttttaaactgatagttttccaaaagcagggaacgtgtctttcccattagtgttaggtacaatgcagtagtggccagttggagaataactgagcgtgcatgtgtgtatggattggtaaggccactttaaccacatgaaccaaaagtttctaattatgccctgatgcagtgtggtacagaggaaagatattttgatttggagtccaaagacctggctttgagtctgggttgcttgctcattttattcattcatttaatgagcactaggaaatgctttctatggatcagttgatcctggatatcctaagatgaataaacattttttttctgtctttaagtagctcacatatctgtgagatggatacataaacaaatacctgtgctccagtgtcataagtgtgataaggccggtgaatataaagtgctagtgattggaggcagaggtataagtgaggggagagagcatgcagatttcccattcatggttacttgtgagctgagtcttgaaagatgactaatacatccttgcttatcggagggtttcactttccgaggtttcagttacctgcagtggcctgagaatatgtgagtacagcacaataagatatttaaaagggaggagagagagagagaccacattcacataattgttattacagtatatttttataattgttctattttcagattatggttaatctcttaccatgtctaatttataaattaaactttgtcataggtgtgtatatgtaggaaaaaatatagtatatatagcattcagtactatctgaggtttcaggcatccattggtgatcttggaatttgtcccccatggatgagggggatgactgtttttatttctgccaaatgaagacgtagggaaaaggtgtcccaggagagaaaaacagttgaataaagaccctgaaacatggaaatgcattttatgactggggacaacactgcattttctccactcatgagctattcgaccttggacaaattacttaacttctctgagcctgttttctcatctgtacagtggagtttatggctgaggaagtaaaagtacttcataacactgaggtatcctgtaaatacagagcgctgtttccctcaaatgatcaatatttttagaaaatccatgaaagacctgtgagaataatgatccaagggcaaactgcccttttaatggtttaactggtgtttccccttaggtcatttaaattgtaagtaagtcttccaggtgattgttggattaattaagaaaataggaatcgtattcactttctgtttacctgtataatattccttcctgcctaagagtagttcgtgtttaactccaacttgaaaataagagaaacattgaagaaactattatccactaggggtagctgtgttcccatccactaaaagaaattttatagctgaattttgtagtgaagcctacagaatggccgtgtgagagagagctctatatattccagaaagcaagaaaaggaactgtgaaccaaagagatccttagtcttaggaaaaggagagagattgtagcagaaagaggcaaaccgagaaaagaaaagctaccttagtccaagcaagagtgaaagataccagacaataggcagagaaaaaaatttagagaaaagaatgagggaaagaaggatatatgtgtgtgtgtgtgtatgtgtgcgtgtgaatgcgtgcacacacgtgcacacgcatgtatgagagacagagaaacacaaataatctatttgtattgaaaagcaattttatagaaaaaccttaatgcaaaaatcaacagacattttctaatttcttactaattgtctgttagactgtcttaggtacgtattaaaatagcttcattgctgtaagaaacttctttctagtccaataaactatatttctatgtgctgtatcagggccctgttaacactgtgattataacagtaataatcacagacagccttgggaaagccactaaacctctgtaggcctctttttctccatctgtattgagaaaaataatgggatctacctcacagaattgtttatgaggatcgaatacaataatgcttgctctaatacctcatatatagtaagtgaccaacagatggaccaattaaacaatagaagtttattgaacatagttgtgctgggtggtgtgctgctttacctgtattatctcttagtcccgtaaggtctacgcagaccttccatatttgactgataaagttcaaagaggtgaatttatttgcctcagattgtacagtcaggacctggcagggcagagatttcagctcatgtgtttcagtttagtttgttgacttggaacagaattcactgtacctctgagtaaatttggactattttgatcaactgtgttggcagtaactggccaccgagtgccttggtggggtgcaggaaagctgtggggttctcatttgtcttccagagatttctcttagctctcctgaaggatttttgcagtttctttaggcagtggctctgtatgttttcccaactgaatcttccttttatccataaaaatgttccctcctgaaattttaggtgagttggaagtaggaacttgggaggtgattttgctgctcttactctcattttctattgagctaatttcctcatttccctgaagtgcaatatagattatctgaatctcatgcaaatcctctctcatccatccctaatcgtgctttggaatttgttttgtacataagttctccttcatctcagtttcctttggttccccttatgaaagtcagttctaataagtgattttatgctataggttttgacactccacggagatatcagatacagaaaaacattgattgccaatgatgggacagctcttggagttggctttccaattggcataactgttgatcctgctcgtgggtgagtattcataaatggcacgtgtcttccatgcagcattgttcttgttaatgtcagggtctgacaaaatggaagatttcaaatttaggacatcttctgatttcatatgtcaacatttgaaaaataatagatctcagtgagaaagagaaatagctctgacctatatttaatgtgcaggatattgtttgtattttgtcctatggtcttcaaatgaacaacactggatttaaaattaattccaaacaagcaagaattttaggaattttaaaatagcattataagaattgacaatatattctgactttgaaaggacacggaaagctctaagggattatgtaacatttgcaatagagcttgcaggatgagaagccttctagtaggtggagaatgggttgcaaccaggcagtgactcttgaggccaagggatccatgaaggcacagaagtatggcggcacttagcaggattgtggggagagccggaaccagaggcttagagtagggagctgttgaccacatgggagatacaacagataaggtcatttggggacaaatcaaggagggcctttaatatcatgctaagaagttgaactttattcttttgagtgataaggagcaagtagggattttttttaaaaaatttcaacttttattttagttatagggggcacatgtgcaggtttgttacatgggtatattgtacccagatagtgagcatagtacccaatagttagtttttcaacccatgccctcctcccttcctcccctctctagtagtccacagtgtctgttgttcccatgtgtatgtccatgtgtgctcaatgtttagctcccacttataagtcagaacatgtggtatttggttttctcttcctagcaaggaatcctgaggaagggagtgaaagaaccaaatttgtgttttagaaaaattggtcaggattgatgtggagagaggccagggccagggagaccagttaggagaaaatggtcttaatggatgtaggctggagtcctccggtctgtttgattggctatttcattctgttgatctactataccatattataaaccagaataacaaattgtaaaatatgaacactgattttttttttaaagagattgtagcatcattccaagtggattttggcttaatgtttgaaagttatcagattcttaggcctagaagggcactgaagaagtaatttgtattagcgctctgtttcaaataaggatgacatggaaaccaaatccaatttttaaagggcacaagaagcaaacattctattctgtgcctgctggcttgtactagttttcagttattctttctagaagaaggactgtcttaggttcgaaattctacttttgaaactcaggctcactcattatttgtttttcgtttatcagacatttctgcattgtgtacctttgttgggtggtgtgttagttaagatagctaactgttgaagcaaataaactcctaaatatgtaatggctcaaagaaaatagaaatttttttgtcttttatatgggcagtggggtttgggcagaagatgggaggaagctctactctacgtagtcattcaggacccaggctgatggatgctctgccatcttcagtaggaggcttcctaggtcattctgagtatcaagatctttcgagcagtaaaggaaagaacgttcagaaatttgctgggaggtttttatgagccaggcctacaagtagtgcacgccacttctgctcacactccttaagctagaattgggtcacatggccacagctaactgcacggaaggacatgcagtccacctatttacccagagagaagaggaagacattaattttggcaagtggaggcagtctctttcatggggccatggtggggagttcagagggtggatacaaagattaaagacctaatttgcaaccttaaggatttatggcttagtaaggaggataaggcctgtgtataaataacaataacccagattcatataagattaagagccacaagagaggctaaaaaaattgggatgatagtgctataaagaggtgacatttcagcttggtggaagagatatcatttggactggatcttaaagcatacctagaatttcactgggcagagctagcttttaagatatatcaggcgatatgaaggatggaaggtcaagagcaaagggacagaaaattgagggtttgttcaagtgactaagagcaacccagttgggttgggagacaattagaagagcttagaattttgtcagaggacataggaggagaaacaagacagagacttgaggatctaatatcttggattctcagtgaagagaaagtcttgataaagttgtgataaatgttattgaaccagttgttgcagaaaaatatctttgtggatgatcactaataaagagctgaggcagttacagggtctctgatgatattcaagagaggatgttgaatagagatagtagaagttaaaagaatggaaggaggatgaggaaatgtgaatactcttttaagaattttgtattggaaagttagagaaagataaacttgtaggtcaaaatgtaacaggaaaatgtctttcagaatagagaaacctgagtgtattctttagcagcagatgaaagatcaaggatgaagaaataattgattgagagtgaaagttatggggaaggaattcgaaatttatgaagtagaatgacttgaaatagtcaatatgcggaacatgatataaagtctgctagggatgagaatcctcagcttagattagggaacttagatttttagtgaattcagaattcacgaaagttttgtgctatgtccaggaaactcttggtaccctgaaatgggagaggagaaagaaaaaaaagggcagaaacccagggttggagattagcttagacacaatgggaacccaaaagaataaataagaatattgttgaaatggttacatatgatgtccaggtgtagaagaactggagggttgggagctcaggcagggcttaagggcaaagaacaagtttaataggaaaagttaaagcaaggaagaaatgagaggttttggtcgaagcagagcatttcagagtttgagaacttagaggcggagaagtttagagttgaagatgaaattcaaaggacgggtatattgatttggtggtggaagaggtaggtgaataaagactatttaaatgaaggggtttaaggacttttcagaaaagaatgtaggagaattgtctgttgaagatatagaaggaggtgcaatcaaaaggaattaaaagttgggttcaagtctagaacttacatcttcagtggaaatggaaaacagcccttaatatattttaatacattttcatatatcatggatttggcaatgctgtgtggtaattatggttcatgtgtacctgatcgctgtgaaatagaaagaaaaaagaagtcttccttaccccataacagcatgataatgagattccactctcacagaaaagtgttactcattatttctcctattttctgtgtcagttttcaaaattctttgcatttttcatcacagaaatcaggttaggtaattaagtagccggtcttgtggtagatggtgatttggggaataattaaatgaggcctggtaagtgatcagggagtgtacttggcagctttttatattagctttggccttcactatgtactgaagatggagggattattgatgtaggtttcttccttgtcataagcttcccacacacctgaccatgctaaaagttcagctgccagtgggataccctagcttcttattccagacaccattttaagtggcctctactccagttatagctaggaaatataccgacattggtagaacactggtgaagtacccctccacgttgtatgcaacgagatattgattttcagcctttgcccattgtattgtgagcatcttgaggacaagtaatacacattgtcatttatgtcactgactcaaatccaccttctgttttgttacatgctggtgtttttcatggttgtaggaagctgtactggtcagaccaaggaactgacagtggggttcctgccaagatcgccagtgctaacatggatggcacatctgtgaaaactctctttactgggaacctcgaacacctggagtgtgtcactcttgacatcgaagagcagaaactctactgggcagtcactggaagaggagtggtatgagcaccctttcagtcttttggtctttatgctgagctggtgtagctgatgctgagtgttctgagctgtcaggcagtggttcttgaacaatcttacttggtaacttgtaccagtgtttcattgccccttctcccaataacttctctcccttgcacgtacctcgcccctagctgaagtccagttctttatagtatgtgcatagttccctatagggtaatgtttattaatttccccaccaacgtttttttttcttcaagataaattaattccatttgtcatttcttacttgtcatttcagagccatttctttcatggtttagtgatttcagtgtttttctttgaaagtactctgggttctccaattatagagaatatacatatacctatatatatggagagaatatatatataaaaaatatagagtatgtatctatactatatggtatatagaatctatatagattctatatatgatctatatagattctatatatgatctatatagatatagaatatatattatagaatatagaatatatatttatagaatacagaatatatatctattatatatagaatatagaatttatatatctgtataggatataggtatattctatgtatctacctatgtgtgtgtgtatgtatgtatgtatctatttatttacgtagcaaggttctgaactcagcatcccctcgtagctacacattcttctctaatattttaacatgattaatgcacatgcgaaactttctttagtggtgattttcaactccaaggttgggttcattatattctacaataagaagcagaaactataaagtctcgttcactcattgaaataggatttcaccttcactgagctggggctaagcacatagacaatgctcaataataattattgatgaagcattgctttgggtgctgaactgaatatatgctagtcccttccttgctatttaacagtagttacttcagatccttgacattgatgcttttcataatattgtgcagtaggtttggctttcagttcattgtttgttcaacaagtactaacttcactccgaatatggacctataatggtggtaagctttggagattaaaaagaagtgatgatgtgtgtgaaaacactttgcagagttgggtgcatgtgtgcaatgacgaggaagctcttgttacatggtatggtttctgtacacacatctgacagggcacagcttctaaatctacgtgcttgttagtggtgtgactctccaacctttctcctagtgtagttcccttatttctccttcactctcctggtttaatcatcaccaaatgctgcaatccatcctcagcctgtcactcatgcccagatcttttctgccacctccaccattctgagcaacctctctctggccttgactaggcatggccttcagtggtgaagcctgctttcatgttggagacatgttttcttcataaagccacagtcagcaagttggatcacggctcagcttggagccttgccctgaggagtagctcccaacacttctgtgaggttgctcagctaatctggtcctggcctccactctctccactctctcctccaggctcatgtttcttatattctaaattctagaactttgatcagtttcatcagcataaccactcttgtaactgctgggctcccttttcagccatggcagtaaagccacactgtgtctctcgccaatacccagcccagatcctggcacagagcaggcacttgaggcaggtttttggagtgaaattaaaccagctacatctacatttcatttttcttccagaagaagctgactacttgtcattttcccttagggactttattcttgtagttcttttccagtgtaccaaagctattttgattaaagcttgttatctgttcaaatttaatggcaccatttttggccctgtcctgtcttgctgtcctctgtggttgtttgggggcatatttccaatctccattacagaaattgtcagtgaaggtgttaaactcagggtgagtcagctcctgtgcaatggcccacgcttagatgtttgagtatatccttgaccagaatatcacatgcagggactagtggtttagctcccttttcttcaccgtgccacctgaaaaggttgactgactcatgtgagctccgtcttcattatcaatgaaaggggcacagtgacattttcctgacctgctgcttggtgtcgttgtgatgatcaaatcagaaaatagaagtgaaaaatctctgtaagggatagagggctgtataaatgtgagacattataattaggagaatattagtgtttaaatgttcaaaattttcactatgaatccatgaaactaatgaaaattccaatcctttagattgaaagaggaaacgtggatggaacagatcgaatgatcctggtacaccagctttcccacccctggggaattgcagtccatgattctttcctttattatactgatgaacagtatgaggtcattgaaagagttgataaggccactggggccaacaaaatagtcttgagagataatgttccaaatctgaggggtcttcaagtttatcacagacgcagtaagtatttgtcactgaaatacattcatgggtgtataatgcatattcacacataactcacatttgtaagcacacacccacacacagtttcacgtacatacacgtgcatacaaattgaagttacctgaaatatttaaaaaatgataatgaagtcttaaacatggttaagtgccaagggctaatttggcatctgaaaggccagattgacttcagagtaagtttattccctttctcttcccattactttcaattccttactttgcttttacttcatagaactccctgttttctattgtttgtgttacttattagaatataacctctgtacgggcaggcattttgtctgtcttgtttgctgctcaatactcggtgattagaatagtgcttggcacataaaaggtgctcagggcatatgagttggatgcctgctgggaaagtgctaatgggatggaatttttagtcttaaaaagaatgcttttggatgttgcctatttcaacatttttttcaaagataatctaatttctgatttacccctttaaattagtggtatgatacaggtattattttttgatgtattttatagctttcgtcttcagccaaagatgatcaaacaatttgtttcctgtcctataacctaagtttgtcactaggtatttttttaactgcatgtgaaagaaacacatgcaatagaaattaattttttattactataaagaatattcttttttttttatttttccataggtttttggggtacaggtggtgtttggttacatgagtaagttctttagtggtgatttgtgagattttggtgcacccatcacctgagcaatatacactgcaccctatttgtagtcttttatccctcgcccccctcccacccttcccccaagtccccaaagtccattgtatcattcttaggcctttgtgtcctcatagcttagctcccacataccagtgagaacatgcgatgtttggttttccattcctgagttacttcactttgaataatagtctccagtttcttccaagtcactgggaatgccattaattccaggactattctttaaatcttatttcatatatttaaaaaaaatcacattattgatcatgtaactgaacatattattttaagtgccagttcataggcaaattatgagcagatttatatactgacctccctaatcctcgcatgatttgtagaagaaaacaagtgaagccccattctctaactattatacaatagttgggttactggtttcatacctttaggtgttattgtataagctctagtctctccgatgttgtttttagattgctaactcagctactatatgttggttattaatttttagaataaattatttggtgacccaattaaagaaatttgagatggggtggcgagtagctaggatcaaaagttacaaatggattttgttttcatttagatgccgccgaatcctcaaatggctgtagcaacaacatgaatgcctgtcagcagatttgcctgcctgtaccaggaggattgttttcctgcgcctgtgccactggatttaaactcaatcctgataatcggtcctgctctccatataactctttcattgttgtttcaatgctgtctgcaatcagaggctttagcttggaattgtcagatcattcagaaaccatggtgccggtggcaggccaaggtatgccaactccaatataagtaagatttgacttcatctggcaccaggttgaaatccctggtgccatgaaaacatttcttcatgtgtggattcagtgcataatgaagctttcctttccctttaaatcaactggcacagcctaaagtgtttttcaaactttagtgtgtctcagaatcacctggagggctcacgccaacacagctccagacctcgtccccagatttttctgattttgtagtctagggtagggccagagaatctgcactcctaataagctcccagggcatgctgacggtgctggcccatggatcacgctaagaaccacaggcccagagcaatatagaatgtaggatgggtttgcaagaagtactacagagttggtgttccaaagaactgtgccctatttctgattattaatggagatttatggtagaaggtatactactatttaatatggtaatgaaatagtccacaaatatgatttattaatatatatttggtgaattgaagcaaaagagttcacagtgtcagtccctctttagtaatcatatttttgcagcactttgtgcttacatactgtgaatgtatgaaacgatcacttgcttcctagatgagccaaggtttttaggtataccttagcacaagaggaactaagagttttctaacatcgctaggagaatgtcacaggctaaagagagaaatagagggtagaaaggaaggaaaaaaggatgaagtcaatgaaggggttgtagagatggtcagaaaatacagaaatgcacctggagaagggaatcagagagcttccagtcccacacgtcctcctgcctgatggtcatgttcacgtggacccatgactcatctttgtttttccatatctaaaaagttatggatctaagttatcatcttgtacagatatgacaaattcaatagtttttttctcccagcttttcattaaaaaaatgttcaaacacagaaacgttgaaagatttaggaaatatccttataccctttaccaagatttaacagttgttaacatttcttcacatttgagctctcaatttgtatgtgtgtgtgtgtacatgcatatgcattcacattcattttttatgaaccttttaaaaataaattttaataccatgccactttacccctacatatgttagcatacagtttcaaagggcattatgaaatattcataatcatatttctccagttggcctcacaatattttatatatagctgttttgttccatccaagatctaatcaagattcatgcactgcactgggaatatctcattagtttcttccagtttggagtagttgcctctagctttttgctatgacattgatgttttaaagaggcagacctgttgtctttgagaatcccacactgaggatttgtctgaatatttagtctgtctttcattttttaccctgcagttctcatgaaatggaagttaggtctaattgcttgattagatcaaggttaaatacatttagcaataatactttataggttatgctgtgttagttgatacagaatcttattaggaagaacataatgtcagcttgccctgctcttagtggcatttgagtttgatcacttggttaaggtggtcactgctacactgctgctttttaaagctgtattttttttccttcttaattttggtggaatctatgcaatcacacttaggccctgtgaatgtcttggctcccaagcaccttttacccattggttttggcagccatggatgatccttgtttgaaatgattatttaatcgaggattgcaaaatggtgattttcttattttagcattccctttacatttgttagataatattcttctataaaggaaagctcttcgtgtctccccggtttactttttaaataatttattattattatgggctcaaatttttattttttaaattcagtgtgttacagtcaattactgtaatccttcttttgatgttttagtggatccattttggccagggagaacctcttcaagtggcgacctgtatatttctgtgtatgccttgtttcttggtacaataagatgtttcacactcacttcgtaccttccctgcctaaacctataatcaacatttctcccgggagccagagctccttattgtgggaaagagtagaaaccaagatgtgggtctgctcactgcaactgggaaaaaagggtttcattttgtaatggggagatgctcagagcagggggttgggaatgagggtttgagaggaagggcagacatttaaaagttctaatttcagtgacagcattttttaatgatcttttcttaacttccaggacgaaacgcactgcatgtggatgtggatgtgtcctctggctttatttattggtgtgattttagcagctcagtggcatctgataatgcgatccgtagaattaaaccagatggatcttctctgatgaacattgtgacacatggaataggagaaaatggagtccggggtattgcagtggattgggtagcaggtatgtaagctatatggtgattttaatatgtttgcatctctgtcatcttattttatgctagaaagtttagcctaactccatgtgctacaggtttgtttttctagacaattattaagaccatttaagatacattgaatctagattaagctacgtgtctatttgataaatgatacggtgtttcagtttacagatttataacaaattaatccttatcattttcttctgttattaacataatctggagacaaaagtggctaaaatattaaattatgtggatttgttttttttacacttagatttgcacctgatttctgcattagaaattttctaaattttcaagagaaagagatataaaaatataaactatggaacagcattcatttgctttgaagctgagcaattttagttgccaaattcttaattgcttccttttattcatatataaaaatcccttagatcatgagatattttattagtaatttttttaaatgcctggtccagtattatattaacttagttgtatttattcatgcacataagcttgaataacccctcatttttatcactcatctgagtaaaaataccactcataattagtggtattatatgttttggaatataatccaattctacataaaatcagtatcattgaatcaagcttggtgagtaggcatcacttagaaatattagcatgtaggcagggcgcagtggctcatgcctgtaatcccagcactttaggaggctgaggcaggcggatcacctgaggtcaagagtttgagaccagcctgaccaacatggtgaaaccccatctctactaaaaacacaaaaattaaccaggcatggtggcgtacgcctgtaatcccagctactcaggagcctgaggcaggagaatctcttgaagccgggaggtggaggttgcagtgggccgagattaagccactgccatcaagcctgggtgacagactgagactctgtctcgaattaaaaaaaaatttaaaaaaaggaaatataagcatgtattatgaaaatctaagtactataataagagtttattgcaaaaagtaaatatggaagtatggttaaataaagctttaattgggttcctaactcccgttcctgaatagaaattactatttctgagggtatagataaagcagtagtcagcaaactatggcccgtgcgtcaaatgcagcctgttgcctgtttttgtaaataaagttttattgtaacacagctatgcccatttatttgtgtattgtctatggctgctttcatgttacagtggcagtgttgagtacttgtgaaaccatatgctctgcaaagcctaaaatatttattatgtggccctttacagaaaaagtttgccaaccctggattaaaggattggaaatgagcaaatgcatacatagcaagtagagttaggtaatgaaaaaatgtatcagtaacatatttcacattggcctgatttctctagaggtggtttgaatcagatataggaacaaaatatgtgtgtcttggtagtagcattgatagttcaacaacagactttcaactacatgaaatcaataatttgtggtcattctctacttattatactatcttcataaagttatctttttattctagcatgtacataaggcccaaagggaaatggacttttggtcacttttagaaggtccatgggatgaaaacacctacattagttagaaagactaaggaaaaacttcatgttaaccttaagttcaaagaccatttgataacattaataacaacctgagatgctgctggtgctccctctttgctacttttatcacattgggatggaagttgtgctatgaaaatgtatatttagagtgtttcaagtaggtattaagcatttagagcttcagatagaaaaggagggacattctggaaaatatacctttcagtagaaagtgggttatgatgttgctatgaattctaatctactttagaagctgaagataggcactttctctctaaatttgaagacacaatctctataattcctaggagtaagaacttatttttctaagcctagactgggacactatcatcttggaaaagacaacatatagtgacccagacttcaaccttatatattttgttctgaatttgtaaagttctccctttttttcttcttggttctccattgatcagcatgcactttcatttttcccataggaaatctttatttcaccaatgcctttgtttctgaaacactgatagaagttctgcggatcaatactacttaccgccgtgttcttcttaaagtcacagtggacatgcctaggcatattgttgtagatcccaagaacagatacctcttctgggctgactatgggcagagaccaaagattgagcgttctttccttgactgtaccaatcgaacagtgcttgtgtcagagggcattgtcacaccacggggcttggcagtggaccgaagtgatggctacgtttattgggttgatgattctttagatataattgcaaggattcgtatcaatggagagaactctgaagtgattcgttatggcagtcgttacccaactccttatggcatcactgtttttgaaaattctatcatatgggtagataggaatttgaaaaagatcttccaagccagcaaggaaccagagaacacagagccacccacagtgataagagacaatatcaactggctaagagatgtgaccatctttgacaagcaagtccagccccggtcaccagcagaggtcaacaacaacccttgcttggaaaacaatggtgggtgctctcatctctgctttgctctgcctggattgcacaccccaaaatgtgactgtgcctttgggaccctgcaaagtgatggcaagaattgtgccatttcaacagaaaatttcctcatctttgccttgtctaattccttgagaagcttacacttggaccctgaaaaccatagcccacctttccaaacaataaatgtggaaagaactgtcatgtctctagactatgacagtgtaagtgatagaatctacttcacacaaaatttagcctctggagttggacagatttcctatgccaccctgtcttcagggatccatactccaactgtcattgcttcaggtaagtgcactccaggtgctgcttgtcctgcaagtagacacaatggggtcaacacacatggatgactgagtgtttctaatgcatatgagactctaatgtctttgtgtgtgcttgtgtgtgtgtctgcctgtatgtgtccaggtatagggactgctgatggcattgcctttgactggattactagaagaatttattacagtgactacctcaaccagatgattaattccatggctgaagatgggtctaaccgcactgtgatagcccgcgttccaaaaccaagagcaattgtgttagatccctgccaagggtatgccatcatcttccttgttatatttctgtctgcttatttctggaaaaaatggggcctgaaattatgttcatagatagccaatgtgttatgggcttataaaactatggctacagattcaaaaatgaaagcatattgagtgattttacgtgggaaggagggtgcagcgcatagctccctttgatggcagaaaggttggcaacatactaggaagtcaacaccctgacttactagatctcctttggacaagttgtgtaagtagaaatgaagtttcttttgccatgttactggcaatttgcaattaaagaatattgtccttttttttttttttaaaggactatgaggttccctgtgaattaattattgactccttttgtatgactaggtacctgtactgggctgactgggatacacatgccaaaatcgagagagccacattgggaggaaacttccgcgtacccattgtgaacagcagtctggtcatgcccagtgggctgactctggactatgaagaggaccttctctactgggtggatgctagtctgtaggtgtctctggttactcatgtgggtgttaagaagaggtttttcttccatttccaaagaagagggatttgcatcatgtgatgaaaatatagcatgccagatagacattgccagaatatagaatcacagttttaggaactatgtttatattggaacttggtgaacatactgtgaaaatttatctatatcatgcattgaataattatgaactaaaagacatctaaagatgcattgctaaatatatctataatttcagctataattataaatgtattttctcaatttagaattacaaatgaaattactcaacttacattctgcaggccctaggtaactgctataaaatctgaatgacttttaaatgccaattgatattatgtttttttctgggctttagcattcaatgtcttttagaaaattcttttcttaaaaaaaaaaaaagaaaattcttttcttcagtctttgactttttgtcatcttttcaaatagaccctttcttctctggcaagcttctcctcagcgcatttcttaatattttccttttgtcaactctaattttgtatgtaacttctccaagtaccccccatatgtctcacattccagtcatcctaatggaatagttgaagggatgaaatgattttgtttattatggctggtgtctacatatcgggaatcttaatttttcttgcatatttctttggaattttagtcttttgatgccaagacctaacctcctgatcttttctttattctcctatttgaaacaaagcagtgatgctttgagtctaagcttggattattctaggtaaacacctcaaggtactcaataaacatcaaattgaaaaagtcactaaggaagtgggatggaaaagttattgttttattgagagtctgctatgtgcttaacactgagttccatgcattacatggattatttcatgttttcctgtttctaatatcaacctgattccttttgtaggattactattcatatttggaagtcaatgattttatataggctattgtttgataagcaaacaagacctcccatcaccagaagaaacatttccagctgccatatgccccatttgaaaagaaagtttgcagcttgtgtaaacaatgatgaggcgcatgcattgggctgccagttgaaaacttaactcacttgagatttcaacttctaaatttttttttgcttcattttaggcagaggattgaacgcagcactctgacgggcgtggatcgtgaagtcattgtcaatgcagccgttcatgcttttggcttgactctctatggccagtatatttactggactgacttgtacacacaaagaatttaccgagctaacaaatatgacgggtcaggtcagattgcaatgaccacaaatttgctctcccagcccaggggaatcaacactgttgtgaagaaccagaaacaacagtgtaacaatccttgtgaacagtttaatgggggctgcagccatatctgtgcaccaggtaaggcactgaccatgaaaattagaacatggagaataatgatcacaataccaattggtaaggaaagctgaagttctcacaggagaaaaaattcaaattctccttgatgtcagggtaatttatgaaacagacctggggctatattttgagaggaagacttggcaggcttcttttctaatctatatggagcccttttatgaaagcattttcttttattttatttttgagacggagtctcactctgtcgcccaggctggagtgcagtggcgggatctcagctcactgcaacctccacctcctgggttcatgccattctcctgcttcagcctccctagtagctgggactacaggcacacgacgtgtccagctaatttttgtatttttagtagagacggggcttcaccatgttggccaggctagtttcaaactcttggcctcaagagattgcccacctcggcctcccaaaatgctgggattacaggcgtgagccacagcactcagcctatgaaggcattttaaatacaagcttgatggagttagaaagaaagatgaaggccttggctgccctacttcatgtcttgactaagaattctgtcaatgagctggccttccttataaaaggatttacattttctgcttaagaggtattatttatagtttgaaatatttctggtgatatttgcgggtgggatcatatgtgcttcattgtgcattttataaagaacaacaaattcacgggaagatgtgccttttgatgttgttgctttgcaaattttgctgagaagagtcgttgatatttcctgttgtttagaaggaatcggcacatttattagaaattggtgattgctcttcttgatggaaaagtgactcagaatatagttaaaaggttaatgggcagaacttccatggcgcttcttagggagcatttaatgtagaagctgttgcaagtgctattgtggaggggtcaatgtgaacggtggctgcatccatcttttacttcttctgggattatctttcttcaggtccaaatggtgccgagtgccagtgtccacatgagggcaactggtatttggccaacaacaggaagcactgcattgtggacaatggtgaacgatgtggtgcatcttccttcacctgctccaatgggcgctgcatctcggaagagtggaagtgtgataatgacaacgactgtggggatggcagtgatgagatggaaagtgtctgtggtgagttggactcttggcgcttttggtaggagctaatggcatcttgatgtcaagtgtttggtatggaatcctgctatgtgtgaatgtgtttgaaatgtgtgcctaggcatcctggtagagctgaaaaatgtttcctctgataatccagactgtttctgttaaatcacctctgtagtggttaagagcacaagcacaatcatcatcctggtgatcgcatttgtaatctgtatagacctgggaaagttacttaatatctcaagcctcagacatctcatctgtaaaatggagctactactagggttcttgcgaggagtaagagaaacaatatgtaaaaatcccttagcatgaggcatggtgcaagctaagtctagcttagcttgggactaaggaaacgtatcattttaccaattttcgtagcacaaaggtcattatttcaaaaattttatgaaaataacttccaatcctcagcttccatctgaatagagtgaataaaacacagtggactttctcagggagttctgaggttggttaccttttcctagcagactgtgataggggctaggagtttttattttcctgaaataaactataattgcatgctttttgtgattgagataaattgagattatagagaaacagaatgactttgatttgtgcttaaattacttgatttgtgcctaaaacaattttaaaaatgtatacaacatattttgcttaatctaactaattaaaagtgttatctcactttgcatgcagtccattttgcagcgttttttgccttggaaggtaaattcaaagtgtctcttttatttaattgtatctttttaaaaattaggataatgttttaatcaagagggtttgttctcatgtttttcctgttcttagcacttcacacctgctcaccgacagccttcacctgtgccaatgggcgatgtgtccaatactcttaccgctgtgattactacaatgactgtggtgatggcagtgatgaggcagggtgcctgttcagggactgcaatgccaccacggagtttatgtgcaataacagaaggtgcatacctcgtgagtttatctgcaatggtgtagacaactgccatgataataacacttcagatgagaaaaattgccgtaagtttatcttaagtgcttattgtgattttgggtctgaagtcttggatcacaggagatgaaattattatataaaaaaaaggctttccaaaaataaaaaccctaagtatttatctaaaacgtaaatttttggctaggcgcggtagcaagtatcaacaaataccaatcttgtttcatttttctctccttttttctagtattttaaagtgactcctagtcatgcacttcactgataacattttggaaaataactaccatgccattataatgcctggcaaaatcaaaagtgcttactaaatatccctgagtacctagtccatgttcaaattttgtcacttatccccaaaatgtatttttactgttctctgttcaagttagggttcagatgagatctacaactgattttgattgttataattcttcaatctcttttatgccacaacacttcccactttttaatgtcattgattcattagaaagattaggtgatttgtcctgtagaatatctcacattctggacttgactaattgcataattgatccatttaatttatcttatccctcttatttcctatgaactggtatgtagacctagagttttgatcataacaggtgcaattctttgggtaagagtatttcagaggtggagctgtgcctttcctgttgcatcaccttatgaggcacatgatgttttgttgccccactttaagtggattctggtgtcagcctgaatcatctcttatgaagctcccatcatcctttcacccagtggttttagcatccatcggtggttgttccgtaaacccattatttctttaagagttatgaatgggctctttagaattctagtgttcctgccgcatttattagctgaagtttgataaagaagacatttcccttaccagcttttgttggtaattagaatctacaggataaataccttttgcttgtcaattttcagagtaatgagttggtgacaaaggagaattaactttttgtttagtttagtttagtttagtattatattgaactctttgatcttcatgtatttgatgagttttaatacagtgctgtcaactgttttttcttggtgcccagttgtccaaacttaggccaatgggagtccttaacttgaattttctgttctttggcatgaccccaatccatcttcttatagctcaagcttgtcttatatttcctgtcccagtcctggaattagccacttatccaaggagacctcattccctttgtggtacttagaaattatcacagggttgagttgctcattcctacttagctttcattgcttctagtccttttcaatggtcagagctaggaaatacagtttttaaggaaaaaaaatttttttatttttttgagatggagtcttgctctatcgcccaggctggagtgcagtgacgcgatctcagctcactgcaagctctgcctcccgggttcacgccattctcctgcctcagcctcccgggtagctgggactacaggcacccgccaccatgcctggctaattttttgtattttttagtagagacgaggtttcaccatgttagccaggatggtctcgatctcctgacctcatgatccgcccaccttggcctcccaaagtgctgggattacaggcgtgagccactgcacccggccagaaaaaatttttattgatatttcccattgaaatttaagattacaggttgtttacattttagattttataatgacatctcttcttatgcttaaaatcatagtttctcttgacatttagttgttttattatatagtaatttcaaaatgcctataataatttcaacattattataaccactcaaagaatactattaacaataagtctactaagtgcgagattcttcttgctttttagattatgtcccactagagatatgcagtcaaaggtatgactttaaagatatttggaatttttttttctgcagggttatgctatcaacctgatatatagttagctttatctattgctgtttccaaattttattttattttattgattttatttgtacaaaatagcatacatagttccaaagttaaaactacatgacgaggtgcatttatagaagtccttcatttcttcctctcctttctgcttcctctgtgctcttctcagtctatccagagagatgacaatttttgttagtttatcttttctttgttgttattgtttttaatataagcatctctctcttgctacacacacacacatacacttatatcgtcctttttcttacacaaaagttagcctactgttttgaatcttgctttcttactattaacaatatatcctgaagattatactgtcattacttatcagtatatagaaatcttctttattcctttaatagctacatattactccattgtgtggaaatgccatagtttattttaccaagagttggaactcttgttgatgctattaattaatgaaaacagatgatttaagttacaaaccagtgtctcctctcccttctccccagtatcagctggaaatatgtttttttactacagaatctataggtaacataagtatcatggatcctgcctttctgatggctttgaaaatgccgcccttccagtggtttgagttccacaatagatgtgttagcacggatactgttcataatacatatttggtggatatattcctaatatttatctggttgtctttttcaagctgatcgcacttgccagtctggatacacaaaatgtcataattcaaatatttgtattcctcgcgtttatttgtgtgacggagacaatgactgtggagataacagtgatgaaaaccctacttattgcagtgagtaagataaaactgctttctttctatcgttccagagatgcatgttgtgagctaatacaaagatatgaagcgtgggtattcgggctgatttcaattgtcatttcacattgaccttctaagtagaggtggtaggcagttgctttcatatgtgattgcaggggtatgagaaactctttctctctgttccctggctagaattcccagaccctgaatatttcttccagagatctgctactattggagagccatttctcccagtgttgaaagccttttgccttcatgtacttaggcagaatttgcccgttaagcccttataatttactcttaatattattatagtggccatcagtaactgaaaattatttttttttcagacagtctcactctgtcacctgggctgtagtgtagtggtgtgatcacagctcaccgcagcctctgcctcctgtgctcaagccatcctcccatctcagcctcctgagtagctgggattacgtgcatgtgacaccatgcccagctaatttttgtattttttgtagatatggggtttctctgtgttacccaggctggtctggaactcttgggctcaagcgatccacccatctcagcctcccaaagtgctgggattacaagtatgagccaccgtgcctgaccagtaactgaaagtatctttatatcccctagatacgttggaatttcagaaatctctatttcgtatttagcaatttggttcattcaaacaatttcctgtatttatagctcaaattaaaaggcctttcttaagtttgataactttgagactattagtgtaaatagatacataatttaaggatttagtgattggacttccctgttctgtgtatatgtagttaaactcttgtcactggcccctcccaaggaaatcaaagggcatcataattatttgtcaccaaattagggtacagcacaggaagaggaatctgttgtaataacagcagcacaaggaagcagaattcaggttgcagccaccagatagggctagacagataggaattattgctgacttttcagggacctctgcttccattgtcagttctcccctggcaaatcatcagatatcaggggccaaagcaaaacggccttatagaccagaagaattacaagactttaattagatgtgcacccacataacaatttggaaaatgcatataaccagagctacctaaaattactggagaaaagagtcaatgttcaaacataggcagagtttcccacttactcaactaaaagtctggtattccaaggatgaatacgaagataactttgccaactttctagagttattatctaacatagctaaaaggttgtgtgtggagcgagcttagatatgatcacattattgttttgcttttaattatcattgcaatggaatttatttaatcttacattatagtagaaaaaataaaaccaagacttataatttgtgatttcatttatcacaaagatagttctttggtatttctaacaaatacaattttttttttttgatttctggaatctagaaaaacaaattggggaattggggcaggattgacttccttctgtctcccatacttcttcctccccacagaaagcttacacaagcatccattttccaggctcagtcttccttttttggtaactattatctagctcagagatagaggcagattgttaagactgatgggaacatgcttgtgttttgctcatgggttttatcttctttccctcctgcagccactcacacgtgcagcagcagtgagttccaatgcgcatctgggcgctgtattcctcaacattggtattgtgatcaagaaacagattgttttgatgcctctgatgaacctgcctcttgtggtaagagagtaagcaagcatgaaaaacatcacgatgcagctagacaacttcagtctcttccaactgcttcaaatacagaccagggtcatggctgctgaatgcttggacttcctgtcccagctttcatctggaatgctgacaccgctcagcggatattcattaagacctgttagtggagagcactgtgtggggagctgatcaggatacggaagctgctgattgatgctgataaaatgaaattatattggtgatgcacctaatacagtgcttagctggtagaacttaattttagttggctctcaattgaagtttctgaatttggttgagtgctggcccagaaagctgtcagaggacctaaaagtgattggagtcatatacatggggaaggagtatattaggagcatgcatcctcttcctgttctctctctgtgccagtttatgagcacaagaggcccaagaagttgcaggagcctttggttgtattcctggggacagttatgccctgtttacatttggaggctgctatttgccttcacaaattctaatctatatccatgcacattttttacataattgtaaaaatataaaaatacaatcttctacattgctttaaaaaacctgtcaataaatcatattgctatataggagtcagaaaactatggctgtggccagttgcctgtctttatagatagcattttactcaaatgcagccacatatggctgctgtccctctactatggccacgtcctgtaggtgcaacagagaccatagggcctgtaagcctaaaatatttactatctagttaaaaagtttgctcgtccttgtcttcatactgccttttaatgactataatattccattgagtggttatagtatcatcaaattaactgcctctattattaagcattaggttgcttttattttattcctctatagtatatatcattgcagtaaatattaacatcgtatttaaaacattttattttcaggatattttcttaggatcattagtatagttttatagctgaagtcaaactattttcaattccagttttctctcaggtttaaattctgtgttgaagagtggtatttggagtgcttcactaagttctttttccccaacactgaaagttttatagaaagcaaagggcacatagagttttgaggacctgtaaaggaaataactaataactgctggatgagtagaatagtcttagagattgtttcaaatgtatgaattattggttcaaatatatgaataattaatatgagtttttaaacttctctatggtaacaaaagccatagtaatagcagtgagtaccaatgacctgatatatttaaataaaaataagcacataatctatatatgaatatatcctcattgtagtaaagtaataatattcagaaatatattttaaagaaataatacgatgtacaaaaaagtaaaatttacattttttcatccttctccaatcccctcactcctcaaaggtaatcactattaaaaggttgagtgtgaatttgacttacttttatcttttatatatcttactttacttttatatatcttgatatatagattttaaaaaaacagatggagtcttactatacatattttctgcaattagcttttattttttaagcttaacatcatgtcagcaaatacagaccagcctcattcctgtacactgccaaagaatattttaaaatgcgaatggtccatgtatttttatccttttcctagtggttggacatttaggttgtttccattttttcactatgaaaaacagtgtcagggtgaacatcctttgtgcacatgtggaaagatccttatggtctagatgtccagaaatggtgctgctgtatcaaaggagatatgtctcttcaaaaaatctggatcaggccaggcgcggtggctcacgcctgtaatcctagcgctttgggaggccaaggcaggcggatcacaaggtcaagagatcgagaccatcctggccaacatggtgaaacctgtctctactaaaaacacaagaattagccgggcgcggtggcacacgcctgtaatcccagctactcaggcaggagaatcacttgaacctgggaggcggaggttgcagtgagccgagatcgcaccactgcactccagcctggccacagagtgagactctgtctccaaaaaaaaaaaaaaaaaaaaaagtctggatcaatgtacacacttttcatagcagcttctgaaagagcctgtttcttgttactgttatgatataggctgtgtctttatcagttgcaactatactttctcttgccttaggctaattccagggtcccctgggtttgggagcctatgacaccttcattagttaaataggaacatgtggggttagggttagagcatctgaatcagtgatggctaatttgaagtagaagagtgacttattttaattcagtatttattgaacagtggtgttctaggaacttttgggctgtgtcagtgaataagacaacaatccctacccacatggagctaatattctaaagaggggagacaggcaaccaatcagtaaattgtctagtatgttgaaaggtggtgctaagtgttatggaaagaaggaaagggagcaaggaagcgggcatggggagtgcaggcgaggggagactttgcacaaaacaaaatggttttggatgaaaagtagattttaaaatagaaacatgtgaaatagtaggtaattcatatctttcctgggaaaagaagtgttctttctctaccatacacataagggaatattgtatctcattttagtcaccaaagataattagggctttgcactgtcagttgactacttttacctcaaactgttggtcgctggtactagtcttattggaggactaccctagatgtatataattaaataatgctctgtttcaggttttctagacaacccatgctacaaccagcttgtctccagattcctggactgtaaaccactttttttcactgagaatgctattgatcttttcaggtcactctgagcgaacatgcctagctgatgagttcaagtgtgatggtgggaggtgcatcccaagcgaatggatctgtgacggtgataatgactgtggggatatgagtgacgaggataaaaggcaccagtgtcgtaagtgaagccaattaattcctctgcagagtcacattccagggaaacacagtagagttgtttttctgtgtttggagagtatgattgcagatttctctgtaattgaatggacactgatagaatgttacctttgtttctccatgctgggagtgtttgatatcatccacttaaatgcttcagagtgatgaaaaatgactttatgtttactttctttctcttacatttggctaatggacataatgtcctacatttctaggggaaaaaaaaaacccacaaatacttggttgtctccttttcttttttcttttctttctttctttttttttttttttgacaaggtcttactctgttgcccaggctggagtgcagtggcggtatcatggctcagtgcagcctccaccttccaggctcaagcgatcctcccacttcagcctcccaagtagttgggaccatacgcccaccaccatgcctggctgattttttatacttttttttttgtagagacgaagtctcactatattggctaggctaatctcaaactactgggctcaagcagtcctcttgccttggcctcccaaagtgctgggattacaagcatgagccactgcacccagtggttggccactcttaatagcaaccttcacagtataacaatgaactgtctctggtttcctttgtcaccttaaagcggcatggagggaggggtgttatgcctcttgagtagataatggaacatcattttcattaccaacagggtatggaaatcttagctagttcaagaattaatctaatcggtgttagaataatgtctttctatggtagggcaatagactcaatggctccctgctgcttgcatctgatggcaccctcctgtgttgtgactttggtggtgggtcacaactccacatttaccctatccaccctatccactgacatgggtggttttcagctacacatacatggattgtggtgtatgcatttctctcacctgtctttaccaacatcatcttctttcttttgtttcctattcacctgcaatgagtctggataaaacccctgttcttttattttgtggacactaatgatttgatgtcagcatctcacctctttcctcatagcatcatggtttctgacaactctgttagcatatgcctttcctctccaccccaatattgcttggggtggtagctataatgtagttggaaaagcactaaatttggaggagaaagacctaggtttgaagccccagctcttcacctagttctatgactttgagacatccagttaaccatctttgagcttcagttttctcatctatacaaatggtgtaaaaatacctatttcacattgtgcttgtgtgattatactttgtaaactaaaaaaagttaccaaaatataaggcattcggtatccagttaacaaaatggtagtggttttctgaagccctaagggaaaaagtatgaccattctaatgtattttatggaaaaataaatgagacattttattgtattgatttctttgaaaaagccagggtccaaagcaattaaaatggaatctttggaggtatttttattatgatctattattataatagcagtgtaatttgtctacgtgttttcctcccatttcctttcatacttagaatggtaagtaacattaaagcaaagagaattaactgctgcactgagctctcatgctttctgattcttgcgtgctttggtttcagagaatcaaaactgctcggattccgagtttctctgtgtaaatgacagacctccggacaggaggtgcattccccagtcttgggtctgtgatggcgatgtggattgtactgacggctacgatgagaatcagaattgcaccaggagaacttgctctgaaaatgaattcacctgtggttacggactgtgtatcccaaagatattcaggtgaattgaggattcagaagttacccagcatgcctcaaatgtccatgggggctgggctcacttacctatcaggcaccccgtggccacagtgcccagggcccatgatgcttttagtggcttatgaaaatgtttggattcctttccaaatcaaagggaaaaaaaacttttacatcaaagaaagtattttaatatataatattaatatatctggctttataccaatatgattgcattaaaatgaaaagaagttacttgaattattaatacataataccatattaacaatttaaaattaaatataatttttaatatttttatggaggaaggaacccaagaaggcaaaaatgcctagggcctgtgaaagacagaatctggccttgcacagagggccagggagatgaatggatagggcttgagataagaattctttcttgaagctggtgacccgcttagttttccacttggagtagaggcattggtattacaagaactgtttcactctcttctctctactacaagaaaaataacagcacaagcatgatgataaatagagcttggctcttaggctcagagtcaagtagaggcaggtggagtgaactgagacaatgtctccaactaaggatgcagacattgatcaatatcatgcagaagggctggaaggccagactttctgatgctctctttttgacagaagttggaaatctggattttcatttgaaatactctgattttaaatgctggaaacaaattttaaaattcttaaaacactgtgtggatcaaacagattcggctcacagcctgctggtttgggggacctctcctgcaatgttccattgtttgacttcttacctctttctccaaatgggcctcttcaaacagtttatatacattcttaacatcccaacttctcatcatcccacttaacaaatacttggattatggaaggaaatggagaagaacaatttgtaagtttcaatcctgattgactaggaaaatagtacgagcattagcaaaagtaggggagtccagaaaggcgcttgctcaaggtggaaggtgagtttgacatagtaggacttcctgaggtgaaagtatgtcttaggtatttgggcacaactggagccgtgaagagatattgcttgtgccaaggactgttaagggacacacacaggcacattgagagcatcaggaatggccaccttacagcatgcgaaggaagacagtgggaaagatatactaagtaggcacaagatcagagaagcagagtcacaggggccattgactggaggggcaggcagctcatcaacaggcgctaatgtaccgttggagtccagtgtggtgtacgattgtgtgtttattgtggtggtcctgaggaagaaggaggaggtgaaggagcagggactcagcagtaatttaaaaagtagataaatgctatcaggaaaatacactctgtgggtgattcatcctctgatgagtggacattgctgagaggtggtagtttgtgaactgacaatgcaaagacattcaagaggtggagctgtcttcttttgtagtgaagctgcagtagaatatgctttgtttgtatttaagtaatatgaatgtaaagtgtagatttttattttttgcacctaaagtggataaatctttgtctatattttctccctactgctcaagagttctattgtgttgcacttctatagtttttctgaatttggtaaatagctaatagcattagtcttagatgtaaatatattctgaatacctaggcttagactctaggcacaagaatggtagcaggtgttgattttgatcagactccaagttatctcctttattcctcccattctgagctttctgggttcttcctttatcattactatgatctcacagcacagtaacatttcctctctccctttctttgttcgtccattgttccttccttcactttccctccctttctctctctctttctttttttccttgagctttctgaatttccttgaaaagggctatagtagaagagaaaaaaaaatactgtttgtttgaaaacctgagctatcagcttctaagtaagtccaaaatctgtgtctggagtagcctctactaggtgtgctgttagtgtgcatctccttgcttgcttggcagaaagtgtgctccccatttggtacagtgggacaggagatcatttttcctattgaccttctttttttcttggctcactactgatgctgctgaaaaacatggatgataagactgaggggtgacaatttggtgatgagctggaatactgacttgcaatagtgtctgaaagcttggtgatttgcttgatgacttgtttttcctcctgcattggatctaaattagacaaaggaaaacattggtgttttcaaaccatttggaaatgagttaaatagctcccgggagaccaaatgaagctgagccagtctgccttgaccacagctttcttcacaattacatgcacacattttgctgtaaatcatgttgacaaggccctgggtttatggatggcagtgctggttagcaggcctggttataggtcagttgtaaaactgaccacattcaccgttgttgccttcacattttgtaatgctctatgtgccgctcctatgctttctatgataaattgttcaaaaccattagctttgttcactcttatcaaagattccttgatgcatatgtgagaccccctttagacatcataacttttatgggatcttggagtaatatggagaagaaaggccagtttggctcacagaacttcaggaaattatattgttataatgatgcctgtgtatgttaggtcccgagatagcttctagtactacagcatgccttcttcctttgccagtatgccatgctaacctactagcttgcctttattcacatcaccatgaagactcacatctcatgatagatggcaggagtgtaatgaaagatggaaggaacaggactgacaatgtaaacgttattccagtgggaagatatgtgttcttagaggacacacccaataatcttatttataatatatagcactcaccctatgagtttccatttgggtatgggcacttttatcatgtgattacccagtacattgccagtgcctactggctatctcattatctgttgaacatagatagtgccactgttcataagctgtctcatagatctgatgtataccaaaattacaaaagttgtatttaattagtttatcaactaaggaaaaaatgaatgcaattatttttaatagctatagacctactaattatctatagctattaaatggtagcatttaatggtagcatttctaatggtagcagccagcccctgaggaagttgtgtggaatgccaaatattggattcttctagaattggcgattagtggggtagacgaagatgatgggggaaaggggatcaaggacactggtgatcttgtcgaaatggttgacctggcatttaggtagataaagaaggaagcaaaaccccaagtgggtaatagttgaggtttattgccaacctctctgaaagtggtactggatctcatgatacaggtgtgaccggcacaatgactgtggtgactatagcgacgagaggggctgcttataccagacttgccaacagaatcagtttacctgtcagaacgggcgctgcattagtaaaaccttcgtctgtgatgaggataatgactgtggagacggatctgatgagctgatgcacctgtgccacaccccagaacccacgtgtccacctcacgagttcaagtgtgacaatgggcgctgcatcgagatgatgaaactctgcaaccacctagatgactgtttggacaacagcgatgagaaaggctgtggtgagtacaacagaggatttgggaaaaggaaacaggggagactgaatatggattctcaacccttcacgacttagactttccaacctgtcctctaactacaaagttaccataaaatcactattcctgatatagcaaaaggttaccaaagtttcttggtatataagatggggacacacatttttttggaccaattctttgcttagatagtcattagagagaacagaagatgggcaaatattcaggccatcatttaacattattgccaaataaggtactcaagaatgaagggaaccaggttgattctctttgaattcttgtaatgactttttgcctgaagcatccctctgctagaactcgttggcctgttcttcatttttgtcctcaggtaattgaatgggagagtttaatatctctctcaccccaaccaccacaagtaaagcagttgagaatccacagcatgggcattgtttgcttagcaccatcttgaactccataatattggcagttcgtcctgtttgtggtgtttaatccttgtaaccattgtttcatgtatgttgatattgtctctgtaataacaatttagagaccatatcctttcatttattttgttttctttattccacttgttcattgtcagtactcattgaaagcatttgcctaattgacccagaagtatgtaatgtagtttttatccttatatgaaagataagatttatatgaaataacattaaaattaaatgctagacagaaactgctgtggaaatgtggagaagagattatctatgcataatattaaaaaatctgtgcagcaaaccaccatggcacgtgtttacctattataacaaacttgcacatcccgcacatgtacccctgaacttaaaagttgaagaaaaaaaaagaaaaaaatttaaaaatcatccaaaaactggcttttgctctattgtaagaaaaacttctataaatttctaccaaagtttcaaaaaccatttaataaattaagaaaaacatgtgctatattatacatttatacaaaaatcatagggaactttcttatgtttactcctaattcatatagattcccattgcattttaattaattttgccttacctcaactataagaattaaatcctcaatagtacataattcaaattaaaatttttagcttgaagacgaagtgatctcagtaggtctcatccaaacctatgaaacattcactcttacaactggaaggagtactagtgatcttctgtaccctgttctctttgcagataataagactgtagcccatagatgggaaacgaattgtttgggggtgcacagtgaactagtggaagagcttggcctgatatttggataatggattttgcaatgcatgaagttttaatctattgctccttgatgagtagagaactaataagaacttgctgtcctccctctgtagatcatttttgggtgaggttgcccatgtgttacaggaccagccagagggacatgtagtgttgtgttgcacctagtgttgagctcatgccatctcgtgagaggcaaatgtgtgtatctctttgtggttccatgttcagtgatgtcacactggaagcctgagcttgaccatggtgtgaacagtcacactggaacatgctacaaatcagagcatttagaaaatttttcctgagtcctgtttgaccagcacactggccaggctcttttcttctcctcttctttctcatttctcctgtattagttgttgaaaccactgatgaaggagtaagttggtgaggaagttgaaaaatagtgacttttcaataatccacagtctttggaagtctttgttgtctgtcttagcatgattcattaagaattggcactgtttagtagaaatgttgactttgaaccattatagtgagttggtcgttgatattttaggatctctaagaactgctttttacctacaggcattaatgaatgccatgacccttcaatcagtggctgcgatcacaactgcacagacaccttaaccagtttctattgttcctgtcgtcctggttacaagctcatgtctgacaagcggacttgtgttgatattgatgaatgcacagagatgccttttgtctgtagccagaagtgtgagaatgtaataggctcctacatctgtaagtgtgccccaggctacctccgagaaccagatggaaagacctgccggcaaaacagtaacatcgaaccctatctcatttttagcaaccgttactatttgagaaatttaactatagatggctatttttactccctcatcttggaaggactggacaatgttgtggcattagattttgaccgagtagagaagagattgtattggattgatacacagaggcaagtcattgagagaatgtttctgaataagacaaacaaggagacaatcataaaccacagactaccagctgcagaaagtctggctgtagactgggtttccaggtaagaaaacactgatgagctttttaaaagttaaaaattaaaaaattctaaccatgttttcatcttgataggaaattaatttttcaacttgggttaatatgcagatacatttaatgtttctgcaggtttattttctgctttgtatctgatattcaaatgatagattcagaacagaatatctaattattttaaaaatttatagtatcatttttatggaaagaggaattgcaagggaagagagttcactgttgctggccattcacttaactggagatgatatgaagggacgattcatgcattcattggtgcattcagtcgttacttcctgagtccctcctacatgcccagcgtgatgacaagcagcaggggttttgaggggaacaaggcagacatggcccttgctctcctgaagtacatagccttgcttacaatacttgtcattggccgggggcagtggctcacgcctgtaatctcagaactttgggaggctgaggtgagaggatcgcttgagcccagaagttcaagaccagcctgggcaacatggcgaaatctgtctctaaggaaaatgaaaaaaattagccaggaaaggtggtgttcgtctgtagtcccagctactcatgaggctgaggtaggaggatcccttaagcccaggagatgcaggttgcagggactgagaacatgcatggcactccagcctgagtaacagagtgagaccctttctcaaaaaaaacaaaacaaacaaaacaaaaaaaacaaccaatactagtcattcccagcatgggctgggcgtgaaaactggagaatggctaacatgagactcttgttttgagattgcccttatggaaactgacagtctttaaggcaggccagtgatattttaactaaactaccagatgaaccacacttcttaacatctctattgaatatcaaatctatcggattcttggcagcataaactaattggctttgtggtcaatagacatcaatctgcaggcactgtaaagatgtatgctgtaaagattcttgttgcagtcagcccagacctccagagggctcttccccacatccttatatttgactcccttaagggtaaagatcctaaaatgggtggggacagttggcttcccagttctccctgaccagtagctggcctgacataggtgctgagtgcttgctggataataaatgaaacgttgactaagcattcctattgtatgtatcaattcctgttttacgtatcctacatgtcaaaaagtatagtgattaatgatttccaggaacagaactgagcatggtactgttcttgtcaccatcctttgttccactgcagaaaaaataatatttgaactgtaagacattgtcattcagccctctctctcagaaactgctagaatgacgtttctcttggatttcagctatttcctctctatctcggtgtgttctttatcagaagagaattaaatacatgtgaggaagatgggcaagaaagtctgggtgagggtagggtaaacttttcttgaaagtccaggagggtgcacaaccaggctcagtgttcctgaaaacacaaaggcagaatggagcccagttacatttacattggtagggggcagttctaagatactagctacactgaaattagaaacaacttttttctccaatattaataaatatttctgctgtcagcattagggtgtttggtttccaaagcccttgcatttgatataactttttaaaccaccattacgcacattggaagatactgttggctctcagttatcttaatttttccagtagtggagacggaatatcttctccatgttttcttgagaagaatctgttcacaggatgtcttttgactgtggaataaagagaaattaatgggaaagcagtaagctcaacagagtagagtgccctatggggtagccagtctgccaggacttgaatggtaatagcaacaggaatactaatacgacaagaataataatagcaactccttctaagcctgttgtgatctgaaataatataatgttttaaaaagtccctggtctgaggcctggcatttaacaagtgttcaataattagctactattattctcactgttcttagtgtctaccatgatggaatccaagattgtagccatctcattcatcaggatttactcatttacccaagtgaattaactggcaagacttgtacatatatggatactcattctttcttgctgaagcctgaagcgatgctactgtcctaactattcagatatccagcatgaatggttaagcgcgtacttgttgcaaagaggcattcaggtcttttggaagggaaatcattctccttcattctccttccggttggaattgattatcaaatcctaaatgaccttctcactataggtgcatttaaccctttggaaggttatggatgctataagactctggtgaaagccctgggcccctttagaaagtacacagatcaccaaagctggcttccctgattctgggtaaagaccttgggttaagaacacttaccttataagaaaaataaattttattgaataaaaatacatttataacagaaatgtccttgaggtagcagtttctaacagatcctaatatgtttctaaagcttcttaggtttgattaagtgaaatgtgtctcaggttgagaaactcattttgacagcctgtctgacagaggcagggatgtctctttatcctaaggatgtcataatctttatcttaagaatgtcataattcagagtttctctgtgcagtttcaatgacacacttagacaagtgtgtttccttgactccaccatttaaactgtaattcatgatactcacctctgcttccctgttctgctaagcctttgcactgcctggagagggtgccttatgctgcatgaggaaagtaaaaccagacccgtcgaatgaagtgtgtcccccgtattttctacatgacaccaccttaaagtgggaattattgcacacagtcttgcaccctctgttgcctcactgcaggaagacaaacttcctgttttcccctgccctcatttgcctgaagaaaggtgacttctaacaactgtctgtgattctcaggtagcttgggtaggaaactgggtggctaaatatgtaccatttcacaaagtgactgtattggttaactcctggctctccattttagaaagctctactggttggatgcccgcctggatggcctctttgtctctgacctcaatggtggacaccgccgcatgctggcccagcactgtgtggatgccaacaacaccttctgctttgataatcccagaggacttgcccttcaccctcaatatgggtattgtctccctgcaatcctgggcttttctttcacctccttcttctgcctctgttaccgagaaggctgttcatgtaactatctcaaggccaatgtcttgctggggtttgtcttctgcttttcctacttggtaaattgtttagtgtaatgagtagaagcatggcttcttcaaatcatcatcatcagctcttctgttttcttttccctgacacacttttgcacttttcaagtcctgtattttggctgcatgcaaagaaaactgtggtttcagaaaaccgatttctttactggactctcgaagtcaaagccactgaaatccagttaactatgtttatttgtgagcattttctgtacattgtccccttcctttttcttttttagattatttgctgttagctctctttcttttctgaatgcagaaaagaattcagaatgcagtctgctctacagaatgcagactccatttctctaaatggagaaaaggtgtgtattttggctactgacttcttttggcatcagggactgaccctttgtgtttgccctgacaggtacctctactgggcagactggggtcaccgcgcatacattgggagagtaggcatggatggaaccaacaagtctgtgataatctccaccaagttagagtggcctaatggcatcaccattgattacaccaatgatctactctactgggcagatgcccacctgggttacatagagtacgtacatagaaaagcataaaacaattgtgtaactgtttatttcaaacatcagagcttgtgattccagtctattagtcccctctattgtctaactggcctgtctgttggaagtcattcgggggaagtcacacttctaactaaaactgctgagctctatggtatggtgcagtagaaagagggtgaacttttaaatcatatggatcagggtttatgacctgatgttttcacttcttattgtttttttatctagaaaatggggctaataatctctccccatggtagtcagctcagtgtgcaactcatcttaattttttttatctctttaatttgctctcccctatgaaatatatgattaataaattttagtatttgagaaaaggaaaagaataaaaggatctggaaaactttccctaaaatactttggcacatttatggttaagtgcagtgcagtgttttaggtggcagtagagtctgttaacattaatccaatatgataaggcatttacatctttctggtaataggataatttttaagtgtgttaaatatactgttcaataaaaaatactcattgtaaaaagatgatacacattattaatcaaaaattaaacaacaatacccatattgaattttgctagttatggcctagttggaccatagtattgtcttctgcataagcatttatggataacgatccaggaacagcctgttgcactcagaagcatggaaatgccattcattcagtagaactatttcaaatttttttattttatttttagaaattcctttcttctgttatatttattttgctgccaaagtcagtgtagtaaagtttgaagttctctaacaccatgctccctggggacatgccactgaaaaagaaggaatacctggcacacacgccagtgctctttcttcctgtgctcatggcaggcataattaatcaatccaagtactttctcttgttgaactggttcatttgctacactaaggtagcctttagcattctcattgcagaatttaccgtagcagatattaactcactcttagggtagagactaactttaattagaagcagtacaatattatttctagtttacttataccattttgatgtgatatgctgatggtaatacccttagcccttcccacagtgtgtgtatcctctcttaaaaggcacatcaaagagctgagttagctttccatataatcctatattgaattagtagaagcatcaagatgttcaaagaagcttcaacaactttctaactgacatttgttgttctttgggtcctatagattattcttggtcttgaaagcttagtaggtgtcactcagcatacatttagacagtgtttccaggagcattagagatgaaaaaaggaattttctagttacacaatattctgttcactttttgataaaatctaatatagattatttacgtagatggattataaaatttaggcagtagattttagtctaaaagtcaaatcataatatgaggcactgtgatctgggaataaaggaaactttaatattcatgagccatgttaaattggttacctcttggagaggtagcaatgcctgtgttcagaaatatatttcatagatgcataaagcaatagatttttatagagcatgcaattgattccttgtacatcttgggatgcaccaacacatcactggagctgtgcctgtagttctactcttactttttttttttgagatggaaattcgctcttgttgcccaggctgaagtgcgatggcgtgatctcggctcaccacaacctctgcctcctgggttcaagcaattcccctgtctcagcctcctgaggagctggtattacaggcgtgcaccaccacacctggctaattttgtatttttagtagagacagggtttctccatgttggtcaggctggtctcgaactcccgacctcaggtgatctgcctgcctctgcctccctaagtgttgggattacaggcgtgagccactgcacccagctgtgtagttctactcttgacaaaaagtactcatagagatatctgagatctctctacagagattacagatgaactggaagggaaggtctcaggactactttctggtctatgatttttttagaaaaacagatggtggctaggtgcagtggctcacacttatagtcccagctctttgggaggctgagcagggcagattgcatgaactcaggagttcaagaccagcttgggcaacatgacgaaaccctgtctctacaaaaattacaaaaattagctggatgtgctggcacctgcctgtcccagctactcagaagactgaggtgggaggatcacttgaacccaggaggaggaggttgcagtgagccaacattgtgcaactgtactccagcttgggcaacagagtcagactatctctagataaataaataaataaataaataaataaataaataaataaatcagatggtgactaatttctggtcatttacctgcatccttatcaacaaaggccaagcacatcttcaagttttcctatgacttttataagttaccataaattatattttgggaaatatttttaacattgcatggctaacattatcaggtttcttagttgctagcttgttctatctcctgtttgagttttaggatctgttccaaatttttaaaatattaaattttcactattttagaaatgatttctgatatagacccacagtaatgaaagcccttggaactgagaggacttgggaatttggctgtggatcctttgtaacatcttgaaatcggagaaccttctctggaggtttattcatctgtaaaagtattcgctaatggtgccatggcacgattaataataaatgtcctgctggtgtttgcaaagttaaccctgcaggcctgtaagttgtgttcccctcaggttatactgagaatgcaactatctcctagaataacgtcccctccggaatgttaatgagaaggtagaattccagtataatattgctatcttctgatttcttccaatggtgttggaagaaacaagaatggtgttcaccccaggatatcaaaagggtgcttaatgaggaacatcactataagaggccataaacctacaacagctataacagcttcatccgcaggaaagcagctgtggttaggaattagtgattatttaaactcctgacactattcctattttgttaagtattgctttttcacttctacatcttttgttcaatttgaattcatcctttaagtttaatttttgttttaattaaagactaggagttttgaggatctgaacttatattatctctaggaggtagaattttattgatttgtgaattcttttatcctgcaagacattagaggagaggaattacctttatcacataactgtttctgcttactgctgcaggtactctgatttggagggccaccatcgacacacggtgtatgatggggcactgcctcaccctttcgctattaccatttttgaagacactatttattggacagattggaatacaaggacagtggaaaagggaaacaaatatgatggatcaaatagacagacactggtgaacacaacacacagaccatttgacatccatgtgtaccatccatataggcagcccattggtgagtaggtgattgaggggtttggcaaggttgccttgggttatgtgcatgtcatgattgtctttaagcatgaacttcgtgatttacaaaaagtttgttgcacttgttagtgttttcttcaaagcatatgctgaaagttgacagtaggcaaatatctttagagtttatcccccttcccctgggaaagactacctagaactcttcatcttcttaaaactcgctcaattcttcaagatcatctttttttttttcctttgtttttgataagatttaacagttatcatgttgccatatttacttcatctatttctatgggaagactgaagtattttaaaggaattaaaaatatggcatttcagccctaaatactaaatactaaataaatgcatatgatattgtattgtgtataaattagatattattcttatcttctagaagataatgtcaagagcagtgcgttttagtgttttttaagtaagagaacttgtttttatttgattgtgaacttatattccttttatgcaattaaagcaactttatgatttagagtctgaaataaagataaaggtctgaaatatattttggggatagactggtttttgtgggtctgctttgttgtgatgtcttgctaaaacatatgataaacttggaattaaggaaaaatgagaattagcaaaataaagaaatttagtatttctttctggaagttaatattcttcatatcatttttattagaagttcaagcaaatattcacctcaaagtggtgaccaggaaaattagtaaagatgctgctcagtttattcatccacattatttttggccaaacttgttacctgtatacttagaatgagggaatgaatatagcatctgttggaaattaaaactttaacctaggtctaggcaaatgaacataagctaagtttactgcctgctttcccaggacttggagaaacacatcttttctagtcagaaacaccagtgggtatagctcacttctggtagcatataaatgagctttcttaaagcacagggttgttgcttgtataactctatcatctgttttatttaggaacttttgggaaaatcataaatctaggatagttttttttttactaagaggtgatgagtttaaagtcaagatgtgtaatcagctaatctgtgcttgatactctctttcagcaaatgaacacatattttcttccttttccactagtgagcaatccctgtggtaccaacaatggtggctgttctcatctctgcctcatcaagccaggaggaaaagggttcacttgcgagtgtccagatgacttccgcacccttcagctgagtggcagcacctactgcatgcccatgtgctccagcacccagttcctgtgcgctaacaatgaaaagtaaggctctctttcccctctcctcagtgcctctctagcccgtggacagacattgaccttcaaggctccaagggatgggagttttctagtgagacaagattttggttaattaacttggttcatgtggaacacagcaagactctcagcctccaacttcagataatattttccatgaatagaaggagcttgctaaccaaactgttatgcctatatatgcaaactttcatagaaaggaagcaaaccatatatttctcatttctaattgtcttaagtattggagccagagtgtatataagtacatactgaaaaattgtccctagaagtaatagaatttcactgtcttttccatgtctatgccggcctagctccttagctgcctatgctaggggatccagggttacacattcaaatccatttttgatcatttgtgtttgctatgaaacatggccacagattattttcttaacaatgtccacaggcccattgataactaggggacctgagttagagagtggcatggagagaggcattaatgcagatcatagcatctaagatgcagaggtagacgattgtagtgattaaataagatatctgagattaagaatctagcatacatttatcgtgagaaagaccctcaacagtttttattgccctccaacttcccaaacaatacttttatatcaccctggcagacaatctcaaccaatcactgctcctagaacacagctcaaaacacccactctttatttgtttattgttttttttttgtggaggaaatttattcatcatattaagagcacattttcagtttgtatttggatcttaagaaacctgttctatcttgccaagttatgttttctctgaaaatacaccattgtaactgagatttaattgatcctcttctagggccacgagagagctcatgcatgtcatttcttggaattcagtgttgacttcttctctccagataactgttgcccctggtgctttgctaaagaagtgctgtatgttctctgtgcaggtgcattcctatctggtggaaatgtgatggacagaaagactgctcagatggctctgatgaactggccctttgcccgcagcgcttctgccgactgggacagttccagtgcagtgacggcaactgcaccagcccgcagactttatgcaatgctcaccaaaattgccctgatgggtctgatgaagaccgtcttctttgtggtgtgttgagtcgctttatgcctctttttccgacttctatgttgattgtatacgatcatgattctgtgggtatttcctgaatatcatgaactaaaaaccagttcaaagtcctagaaggaaactcaggctccatcctttttctatttttatgaagtttttttttttttttttttagaaatcttaaggtttttacaaggcaaatggttgaagtagacaataagttgtctctactggtggctcttcaccatgtgctgggcattgaatcccctttgagagctaacattgaggaggaaacgagaggtttccacccccatttttaacagggactctcagttgtcatatttatttatgtttccatttaaaaggcaaaaaaaaaaaaaaaagactgagcacagtggctcatgcctgtaatcccaacagtttgggaggctgaggcaggtcgatcgcttgagcccaggagtccaacaccagcctaggcaacatggcaaaagcctgtctctacaaaaaatacaaaaaattagcctggcatggtggcatgtgcctgtaatcccagctacttgggaggctgcagtagaaaaatagcttgatcctggaggttgaggctgcagtgagccgagatcgtgccactgcactcacttggtctcaagaaaataaataaataatcaaataggcacaaaataaaattcccccaaactaaaaacaacacatcaataacagtaacaaacacaaagtttgaagactattttccagtaggagaatagggacagaggaaggtatgcttaacaggtcagggtgttcagttcttatctcttaagtctgtatgcaataaagagatatttaagaatttgggagacagtaatagtcaaaagaagaagtgctccatgtagtagtactgactgataagtacattaggaaataagtcctctaaaaagaaatcatgatcctgctatccaggattcactgatgtcaattaggagctttcattcttgatgccttccaagctgataaccaaatgtccctgctctcagagaatcaccactgtgactccaatgaatggcagtgcgccaacaaacgttgcatcccagaatcctggcagtgtgacacatttaacgactgtgaggataactcagatgaagacagttcccactgtgccagcaggacctgccggccgggccagtttcggtgtgctaatggccgctgcatcccgcaggcctggaagtgtgatgtggataatgattgtggagaccactcggatgagcccattgaagaatgcagtaagttcctgtgggaggaccaaggcatgaccagagcagggagacacgaggaaacttccatggggactgagagaggacatggagctttctttttcagctgatgggatgctcccccttggcactccctgcaaactctggcactgcaaggcagagtatagctgtgtggcttgcaggtggaaccagactctgtttctgaagtggctaatacctccttttgatacatagaatgtctaaccaaccagaatatgataccaagaacttatattttatatatctactgctttctcacttgagccacagagaaatgttatgaggtagggaaggtgggtgtgaaccaattccattttacagatgaggaaactgaggttcacattaagtggatggttacattactgtttagtgtcagacctaacacttcaacccaggttttttacttcaaaccctgtccttccccaaccccacccacaaagttatactgtaaaacaaatgagtggtgctgacatattgagaaaacttaggactatttttctgctcatggtaaacagatcacatctaaaacagacacatatcgccagaggcggtttgcttggtaacatggtcattgttattcctcagtaccacaacctcaatgtgacaatggaaaggtgctttcttgtaccttcagttctgactttgatgcctcctcccttttcagtgagctctgcccatctctgtgacaacttcacagaattcagctgcaaaacaaattaccgctgcatcccaaagtgggccgtgtgcaatggtgtagatgactgcagggacaacagtgatgagcaaggctgtggtaggaggggccacaggggagtggagggagggacaagaaagtgcacatgtcaagtgccatttattagatgagagatgagagtgtatttcccatgtcatcttttctttgtttacctctgtaaaaaaatggttgattcttctaataacatgttacatttttgtagcattttgcagggttaccaggggtatttaatttgtagcactttaagtcatgctgtcattgaggaagacgttattaagatgttagaaacttgtgtaatttcttccaaatgtagaatccttattcatacttgacaagtttaaattgtttctctaattttataaattggttgaaattggtggaaaggggttagagaaaagacttcgtatctatctctaaaaaggatatttccaaattaggatatttcttatttggggattttcatattctgaatgtctctctgattttccctgttatctattggacatctgtagtctctctggtaacatgggaaagccagataaattaatggaatttgtcaagattagtcatagtctaacttgaaaccaaagcatctggagtatgtgtgttgggtttagttggaagagaagtaaggaagatactaaattcttttaagaacactgagtccaattgactgaagataatatgatcaaaatatttatttattatggcatcattttagcctcccataccaggcctttgttgcaaattacaaaccagataccatttcattctttgcatggtttctaccaatgggaatggatcgagtttcaagtggtaggataggctcagggtagctaaaagagggaatgttgaccatgaatgttgctggcattcctctctttgggagcttcaagagtgagctaatacaattctcagactgtctcacaaggaagccaatactactttgtgcatttctctgccaatggtttatgaagtctttgcaatgactgctttgcagaggagaggacatgccatcctgtgggggatttccgctgtaaaaatcaccactgcatccctcttcgttggcagtgtgatgggcaaaatgactgtggagataactcagatgaggaaaactgtggtgagtgttcacagtcctatggtccttatataccaccagagctgtgatgtttgctttttgtccataattcaactgtctatgtcattgatcctcaatgggtaggatgatatcaagctgtctgatctctttctttctgctggtcagtacatttctactttctcttccactaaagacataagcatctccttctgagatgtttcaaatcaagcttttggaggaaggtatttactgaagaatatcttttatgtgttgaatttatttacatccaacttttttttccaaaagaagttgaggtgacttatgataaaggaaaaatgtaataagataaatagaatagaaatagaaaaccaggaccagagaagtagagggaggaagggtgctaacccagagacactgcttcttaagctctttccccaaaatggccttcataggagaggagagagaacttgtgtttgcattattacccttcctagaatagttgactattttaggagggctaacagttaattaacaggacaggttttagtttctctctcccagtcgaaggtattgactacaaggcattggatagggaggttgaggaaaggaagccaagaggctgagatcatatcaaattagatggtcagaacacactcaatgtgtgttctgaaaacaagcttaatgaagccctgcccagagtgtatatcactgacccatgatatgcgtcaatttctaattgactaatgaaacacattctaactttgtttaccttttggaagaaaaaagtgatcaccacttgcgataagcaatgagagatttaggaagctgactacacctgcaaatatcagttagctaaaaacttatacaaaagggtaatccaattggcattttgtcttttattaataaaagtcaatgttgaatcctataagaggttatctagagtttcacgaaatagaaaaaattaagataaaatcaagctgggcatggtggaacacacctgcagtcccagctacgcaggagcctgagcagggaggattactttagaccaggagttcaaagtcagcctgggcaatgttgaaagatcctgtttcaaaaaaaaaaaaaaaaaaaaaaacagagagagagagcaagagagaaagagagatcagatcacctttggacaaacttcttaataaaggccattctttacagactcaaaattaaggtgaaaggtctagttttggagggtgaatgatttgcccaagcacacctctggggcttgggacacaggagggtgctgggcacccagggcactatggtcagctcacaagatgtctcctgtatgtgattcctggtgcacactcatggccaggtgcctttcctttccagctccccgggagtgcacagagagcgagtttcgatgtgtcaatcagcagtgcattccctcgcgatggatctgtgaccattacaacgactgtggggacaactcagatgaacgggactgtggtaactgtcatttgagaagcttaccatagaattttgtactgtgacagtgtaggggcttcaaattagtgtttataaggcttttagaggaaaattatttttgtatatgtgtaatatgtaaaccttagcataacacagtatcttctgctctgtattttctatgcattattcttaactcatagcagtctagattagtcataattgaggaaaatagcaaggaattttaaacatttaattttaatatcaacacttcttaggagcagattttaatctgcgttagccttgtaaacaaagacattgatcttgctactattccacggaaagtcaccctaaggaatatgcatgtgctcctatgactctcttgtgtagagatcagatcattgacagagtaatcctaaacccaaagtaatttttatagctctttactgatttggtgttgggtcttaggaaaattagaaaacattgaagattggggaattccgatttctgaggaaaagcttaagagctggagattatttaatattagggagctaggtacttccatctctgtatgttgagtggggaaagtgtgagttttgagaatgtattaatttgctaaccacaagttgtgggtttgctgtgagccagtcacagggtgtagataggaatgtgatggagtaaccactatactccaggtacctaatatctgtctgaaaatgacaaggccttctcggaatgacaatcttttctcttcagagatgaggacctgccatcctgaatattttcagtgtacaagtggacattgtgtacacagtgaactgaaatgcgatggatccgctgactgtttggatgcgtctgatgaagctgattgtcgtaagtccctagacacatatgtagtactgcttacctgagagcatggatatgatagtttagacatcagtccgctgccgcttcttagattaaaaggccataagtattgtctgttcagcatgcactgataatgatcagttcacctgagttctaagtcatcataatcatacatttcacaatggccgttcaagtgtacttccttgctattttaaatggagaatatattaagtaatctgtgctaacaaagtatttatatattatcagctactatacaaatcattaattagataaaaaacatttcaggtaaaaaaatattcaagcaacgaatacattagtataaagaacttgggttgggtattcgaacatattgaatttatagcattaaaatttttctcagtcacacgatggagtataaaaatgattaaaacttgaagggggccagcccctccacacctgtaggtatttctcctcaggtgggatgagagactgagaagactgagagagatcaaaatggagtttcttatgtcttccttttctacatagacacagtaactgtctgatctttcttttccctacaaaaactggaaagccaacatgattactcagatttgagtctttatggatcacttgaatcaatgcaaactgtttatacatcattattgctgatccatcaacaataaccatcatccatgataaccatccatgatggttatcgttgatgatgtggttgccaaagagactttataaatgtatgtgggtaaaaccagtcttgacatttgcctgtagagattaagtccagtgctgtccatgccatggatgattcatgccattggaaactgactgggctctgacaactgcccttaagacatagtccgttcaactttcagacaggtcaaggccactatacatcttgatgaataaagaagagcaggctataatggcaagagccaaaggagaaatagcaggaagcttccccaaagtagtcaatttgtataataatttgaatatgtttttttcccccatggcagccacacgctttcctgatggtgcatactgccaggctactatgttcgaatgcaaaaaccatgtttgtatcccgccatattggaaatgtgatggcgatgatgactgtggcgatggttcagatgaagaacttcacctgtgctgtaagagggagagaaacggagtgaatgggagtggtgttgtctgtcaaatctcattgtttcttacgtgtagcatgtgagcctggagagcagttgtacaattgtttaggaatggacacaggatcagcgttggtgttatttcactgggtcttccagcttcagttctctctgtaacctgagaaagttgggaaaacctccatgtttttaaatgtattatggccttagaaaacaatgtctttaagggaaatgttgcttgaaaacctagtatgcataaataaaggcaggtctgttgtggttgaagtctgaggaagggtagggaggaggctgtacctctcctgctgtatcctactttgggtgcccctgaagtaccctctccaaacccctagagcttcctggagcacctttagaaaatgctaagactttcttaatctttacagtcacttccttttaacatggtaattcaaggccatctaattccctcttgctgaatgatgcatatatatatatatatatatatatatattttaaaccctgcttgtttgtgagtctcaattcaggtacatgtcagtagcagaggaggaggggtatttcaaaatcacatgccctggcctcaccctaggcttagacctgatggagcagaatctccaagaatgaagcctgcacatacgtatttttaaaaggcttcttagccttttagtttagtcccctggttgagaactactgattttaatgaagtgaacgtaaatagagtttgttgcagtcattttgctacatgctttgagtcattggaggaactctagggtaatagttctcaaaagtgtcttacctggactaggaatgtcagtgccacttgggaatatgttagaaatgcaaattcatgggatgcaccctatccaaatagaaattaaaaatcaagaccaaaagaagtagaggaaggaaaggcattaactcaaagaccctgctttttgagctctttccccaaagtggccttaattttgtgggaaaattaagggcccagcaatctatacattaacaggcccctcaaatgattctgatgcaaactaaagtgtcaggattttgtgtaagtaaaagcccttaacctaggagacaagacctggagaagcactcctgttggaagttcacgttgcatcttccatcccctttcccagcttcatcactactcatttttagcccagagatttgacttgtgaagatgatatatcttagtattttgtttctcctcagaaaactttaattagtgttcattatatttcacagttgcatcccaacatttttctttacttgttaggaactagccttgttttgctttgaacttcatgaatcttgagacacatcttagacatgtttaactttcaaagaagtccttaggaaatctcttctctccataaggtaaaatgcccatagctagtaaaaataaactttggagagtcagagacacagctacattaaaaggtttccaatactgttttataatattgaacttgcctttcacagcaaataattattgcaatagttctattaacaatacttccaagaatcagcccttagatctgaccctttcccctcaaccaatcttattataagtctctcctcttgatccctgtgtgtgataccaaggcggaaggaaaatcagacagcccaaatcctccatgtgaaagacagaccacatgtgaagaccacatgtatgttgagttcactgcatttgtggtacacgcatagtgaaccatgttccctgtaccaaacaagtaggggacctggggactacccttgagttcctcacatctgtacaggcagcagctagaggtctcactctggacagcaagtgtgtcagggtttgattgtgagatatcgattttaaatgtaagaggtgagggaattcaggaaggaaaatccaacacaatttaaagcttcaataaaagactcatgcggtagagactctatgacaactgccatcaggaggatcaaacaaatggcttcctggctgttaggataagagtccatgtactgccagtctgtccagcctcacagccaccattgtgctccacgatccatgctccagccaccgaggcctttattcaggtccagagacctgccatcctcctctctgactcagaatctatgggaagtttcttccaagccttcctctccctaacttaagtcagatcaccccagtagatgtttcatagttgtaattgaatggttaatttgaaaagcctgtttctctactagaatgaaagttccatgaggacaaggactgtgtctttcttgtttcccatcatatctactgcctagcacagtgccttggtgtgtactatacatgtaaggtgtatctgctgattgattaatcaaatgagtaaatgagtgcatgaatgaagcaagcctggtgctgacactggagtattttagatattgacacttagattctactgttaacttgtaatttcatttttctatctttcctttcagtggatgttccctgtaattcaccaaaccgtttccggtgtgacaacaatcgctgcatttatagtcatgaggtgtgcaatggtgtggatgactgtggagatggaactgatgagacagaggagcactgtaagcaaaagtcaaaagggagaaggaaaaaggaaggaccccaagtggtctgcagtttggaaaatgtgcctctgggatttcagtttgttctatagagttgtgcccatgactgcagatctctgctgacataattgtttacaagaccatgcaaacacatgcattgcttacatgtaaccctgcctgtttcttcctgtctcatttgagcatgatgctggcaaatccattaatttttcagtctttgtttgaacatttaataagccttcccctcctcttttctcataagaaactgagaacaaacactaaatactgattgagccacacctcgcaaattaatagtttattttttcaaatatgagatttgatcatccttcagccttcaggagttgctaattgctaatctaggcaggtgcccagctgcagagatcatgtgaagcaaggcagcactggtgttaacagagcttatctaatatccttgttgaaaatgaaagttcatttcccagaagagaaaagtgatagattagtttaagatagaagttccaaactggctgcatttaacaatcgaggcattgaaatagctgtactttttctgcactttcaaaatgttttaaaatctatccattgaaggggaaagttgaccaattttctgggcaatttaatttgcctagaaaatgtcagtgaggaaaatcatttccccgactccaattatttttttccccaaaaagacattatctgggaaaattaagataaatgcctgatttctccactttctatttcttgtattgatgtggtcttagaacgctttgccacagaatgcttacttccagcccccatcccagaggagactgtcagggaggactttgacactaccacaaccttcaagttcgtattcctgttatcattattactggcagagatagcattaatacattatagcattaatatgtttatttgaggcatagcgcaaaagcatgaaagcccagaaataaaatatttttaaagaatttgagcagatttcccccttccccaaaatctctttccatttcccctgctaaaaatgccattttttaaaaaatggagcaagacatttgtagcacatggtcaaatcccagagtggaaaaaagaatccataaacttctattcttttcaaggaacagggttttagtctgggagaccactaccagtcaccacaggaagcaacctgcaacatttcaatggcttaaaatggcaaaggttcatttcttgctcatgtaaagtttaatgacagtcaagcaaccctcctccatcccataattatgccatcagggacacattcaaggttgccaaggcaggagaagatcaacatggtggaggcacacagcttcttaacttcctgagcctggaaatgacagacatcctcttgctcatagtccattggtcagaaccagtcacgtggccctgctctaactgtaagggagactggaaaatgcaagaatatgcattctcatacaatttacccttgtgtcactaaatactcctttatgattttcttctcacacacagaacacccttaaccccttcccaagggacatagctcatagtccattccgaaactgaaatccaggacctctgggtaatgggcagtagccactcaatcagttccagatgtggttcctcttggttgggagacccataaactaataaacaatcagtgccttctgtgcctgataggtattggcggaacaggggcaacacaatagaaataaacactcccattggaaagaaagaattggagactcatggccatcaccaatgtatagcaattctgaagtcccactgggctgggatgacacatgttagcacaggacagtcctgattcatgtctgctgccccagtggaattatgaatagcaccaccttcactttcaaaagcacactggcttggaaaggagagtaaattacatggccactctgggcagacattgtaaaggtcccttctttggggagtggagggtatttattgattagctcatgcctctgctctgggaggagctcctgtgttaaaatgtctctcactgtttctgactctaccctttgagagttttttcttgtctattttcctctgcaaatgaagagggaaagggaaatatgctaccattagggccagcacggcagctttctcaccccacttcttgcttatagaaggtcgggagcccaggagttgttttttgtttttttttccaagtctcaaacagtcatagtattttggtttatttggttatatctttctctcagaaacataccaggcatttgatctgtttgcttctagcctgttctaaaagttagtaacctgacctagtgctcttttggagacatagttctcaaatctgcttttttctttgctttctttccttcatagagttctgtctgaacttattgtcacttacatccaatccatgtagaaaaatagatgggcagtcattttatccaatgaggaggttttattgggccttcgtgtctcacagccttttaaacttcagacttttactgtttgggatgtagatacaggtggcttttctcacacagcaaatttctgggctttattttatttctgcttgtaaggtaaccagttcttcccttaggttctctctttcttatactatcttgccaaactcaggaatggcaatcaatgcacattactaacattctatcttctaacctcgctccatgattgacaggttcagtaagcatgtgatctgccttccagtttttccgaggtgatagctttatcaaatgctttgactttgcataacatgatctccacctttcctgcctccactatcagtgtccttgttgcttgcctcctgactgttaatccaatgccaaatattttatgtttttattatggcagtactctacttccctcatcactctatgttattcggagtaattaatactagctgttgcaaccagcatatcctgaaatctcaggggtgtaacataatgaagccttattgagcactcataaaggccaacgctggtttcacagccctcctgcatcttgcagctgtgctgcctggaacacatggcttccaaggttgctgcagcagcacaggagacacggaggaggcacgtgtgcttttcattgcttcagcccagtagtgacacatggcacctccaactgacagtacgttggctagaactggtcacatggtcctaacccagctgcaagggagactgggaaatgtagggaagcacttgtttatttggtaagcacaaactgtctctgtcaaagaaggaagtatcttgcttcataaaagaaaaagttttgattttaacttgtttttacattgcaggtagaaaaccgacccctaaaccttgtacagaatatgaatataagtgtggcaatgggcattgcattccacatgacaatgtgtgtgatgatgccgatgactgtggtgactggtccgatgaactgggttgcagtaagtaaacacttgtttttatagttcattgtagtaactcaggtttacctaattaaaacatgcaataacataatgtagacactgaccacattttctccttaatgtactttttgcttgaattccagtcaagcccatagctagctgtgactgagtgcttatcctagaccagacattgtgtcaaacattctacatgcctggtagcaatcttatgagttagatgttattatctctttcttatgtacaaatgagcaacgaacttagaggttaaacgaattggccaggtcttactgtcattaagaggttgactcaggatttgaactctggtctgtttcactgcagagcaagtcctcttcccagtccactgggtgcctcttagcactttaaggctacatattttgtttattagtctgcacattatggtgggaggatgggggagggatagcattaggagaaatacctaatgtaaatgatgagttaatgggtgcagcaagccaacatggcacatgcatacatatgtaacaaacctgcacgttgtgcacatgtaccctggaacttaaagtatatacatgaaaaaaatcttaagccaaatgcagtatccttggtacctgaaaatccttctgagggtgtttgatcaagaagggaacgccacaggggacctgggaagggacatttatttttatttttaaagttgagggagtggctggatgcagtggctcatgcctgtaatcccaacactttgggaggccgaggcagacaaatctcttgagcccaggagttcaggaacagcctgggcagcatggcgaaactccgtcttaacaaaatacacaaaaatttgctgggtgtagtggtgtgcacctctagtcccagatactcaagaggatgaggtggaaggatggcttgagtgcaggtaggggctgcagtgagctgtgattgtgccactgtactccagcctgggcaataaagcaagaccttgtctcaaaacaaacaaacaaacaaacaatcaaacaaaaaagaaagtagagggagcactttgtgtaggaaaaggatgatgaacataaccaaggaacaattctagctcaatattttgatggaaatgttaaaatgacatgttactaagtcacacctttgtagtccatttatgactcataaagtgctttcacatacattatttaatgtgttactcaagttagccccattgagttgctgttattgtctatgtaataaagctcagagagcttaagtaacttccttgtggtcacacagaatgtcagaggcagaattggagcagtcatgtaagtccaggttaggagggctggcctctggatccctgccactagctgtgccactttgggcacatactgacctctccagtctttggtttcctcacaggaaaaaggaggcccttctccaaactctaggagcctgtgacttagtcatcctagtgagctccatgtgctttcaacttcttgggctctaattgactttttcctgaggcatccaaaggattttctatcaatttttctcctgcgtgagttacgaagaggtatgaataaccagccatattgagttggcttgccatttatttcacatacgttttctgtgggacttggagttattgacagaatgaagtgacttgataaaatattttaaaagcctgaacatgatagaatttgcaaaactgaatggcaggtttgggttctgactcccagagactgataggtggcttaaaatagactacagtactttcttttcaaatggcatttaattagtagcaggtttttttttttttaaggaaataagtagcacaaacaattcgggtatggaagcagcttctcttttcagatattaagtgaatatgtgacatggaattcagtcttatttctctggactaataatttgaggcatagaattcttttttaatatactagttcttgggtgctgttaatttatttgcctttgtcttttttctccttcctcctcttctccttcttcttcttccttctcctcctcctccttcatcttcttcttctccaaaagcatcactgaagtgtttaagacacattgttcgattttttaaaattgaaggtatacaacatgacattttgatgtacttatatatagtgatgtgttataatcaagcaaattaacatatccgttatctcacatagttatctttaaaaaaattatttttgtggtaagagcacctaaagtctactgtcttggcaaatttttgggaatgaaaatacattagcattttttctagcaccattcaggtataaaggaaagaaattaacctcaggttgcaaatattatttatgtgatcataaagatagattgacttgctgtttctctggtagttcttattccttcttcataaaatggaaagtagggtatttcttttataaatagagtgccatatgtttgggtttggggaaatcagttatacgggttaaaatggtgatcattttcaaatgaaaacaatgataagaaagccctcacattttaggaagaatcctacagtgtcgtgtggtttctgctcttgttaaggactcttgcttcacaaaagggtgactcatttagtggatcacttggtccagaaattcttgactcctgggacccctaatccctttatagatttcagagctaggaggaaattacaaagtctagtgatgcatgtgagacccatggaggttatgtgactggctcaatgatatccaagttaataaacataggtcagattcatttagcaatgtagaggggatatcactgctaatctcacagaaattcaaaggacagtaaggaaatactatgacaaattttatggcaataaatcaaacaacttacgtgaagtgaataaattcttagaaagacacaaaactctgaaaatggctcatgaaaaaaatagaaaatctaaatagatgttttaacaatgtacagttgttaagagctcctataataaaggctaggatctttattataagactttcatgcatacagctttgaagtctgcactccaagggcagcattccattgaatttcattgtactttattttggttatttttctttttgaaacccagtgttcttaatgtactcagaccacatatagtgatatgatcatttaccctaaaggactctgagagtgattaagttcacctcattgcatactatggaaaacagatagatataaatctattttgatttgaaagaattaaatcaggagataccacagtctctttggctaaaatactcagaagcctatgaccaggagactttttatttgagaggtagatgaagcttaaatccttaatggagataaccactgcctctctttcccccattatcactcactatctatgttcatcttcgccagtttttctgtaagacctaggtttggggatagatggaggataaaagaagcaaactgataagaatgacaaggatgaaagccagatggcttggatagatattggtagagacaagatcttggggcaatgatgaacaatgaagtgttagggtaaagtgtgagctgttaaaagtctgtcttggaacatctggatcagaataacagggatcatttatatgggctctacaaaaataaactgtgttttttttgttttttttttactgtgaaagttcaataacaatcaaaagtaaaaatcatttgaatcccatcactaaaagagaactaacctttaaagtttggtgtacttttgctatcttttttttgcatatgtatatgtaagaaatatttcttagtattttgaaaaattaagaaatattctatactaaatggagtttttcagtctttttttcaatttattataggtatttcccatgtcaaagtatcatttgaaactataaattttaataatcacatagcaattcatcatgtagataatcataacttattgcttctaagatgtatttttttatattttaacatctttgaaaccaagatatatatcttacaattaataacatgtcagcgtaagttccagacatattcaattttagtgttacataaagtaatggtgcatcattaatgtcttagtttttttatactataacataatttattccctatcactgaacatacattcaagttgtttacaaacaaatgttcttattgtaaatatttttataatccttaaacgtaaattatactgcatattccttctcaagggaaaattcattaacatggaataactgggtaaaagagtatgaatatttttaaagtccttggtgcatacatacatagtacaaaatttctttccttgtgtactaatttatggctctaagagcagttgtatgatttagaactctatgtattttactgcaccctggtcaacacttgatatacatgtatatatttgtgtgtgtgtgtgtgtgtgtgtgtgtgtgtgtgtgtatataatcaattggtcaatgttagggaaattatagtcttcttaaaattttataatttcctcctatttgtaactttgttctaacctatctgtatccatgtcttttatttatttatttatttatttatttatttatttatttatttctatctgttatctatctatcgatctatcatctatctctctatctatctattgatctatctatttgcaataggattaaagatagtagagcaggtggtaatagctgtagagtgtcaggcttcatagttgtgcagtccagaattggatgctctgaggataagcctaggagtgctgcatataatgtgaaaattgcctcaaagttttagcattatatgcatttatctaaatggtattcagatcacgatcagaaataggaatcctgactcccccagtgccctctgtcctctccaaggcttatggaaaggggttatctcaagatgtcctatagttggttacgagtaggtgcttcttttgatacaccacttgactgttatttgtggctgatctggtttgtaatgctgggattttgtttttcagataaaggaaaagaaagaacatgtgctgaaaatatatgcgagcaaaattgtacccaattaaatgaaggaggatttatctgctcctgtacagctgggttcgaaaccaatgtttttgacagaacctcctgtctaggtagagtatattttttccaattcctgtttaggtgaactttacatctaaggttctccacccactcccctttgttaaataaatcactatttaattcccttaatggtaccatactcatggtttcatggttctaggtcattaaactactcaagaattgctttcccccacctgcatgcatgctatctgaccagtgcctacctgagtgcttgtcagatactgtgtgctcagtagagtctgtggaattgatatgaatgatgaaggccttggtgatgatggctgcttattgcaccagtgtgtgaaatcaaagttaatttaaaaaacaaactaggcttactttcttcattgtaagtcaaacaaccaacacgtatttattatacacctacttacgccagacatagatgagttgtaaggtatggagtcagaaggtagcttatcaagatggtgagtgatgagcatgattttaggtgccttttagtatttgaatttactgtttctaattcatgatatgtcatagtcagaagattgtaagagttccttttggacttgaagcttaagaactcaattgaaaaactaaatcaatgactcctgttcctgaagctggttagcagaagtgaagagacaccgaacaatacaacacaacatatgccttctgaaagggaaaatgtgctctgctattgcagagtcatagagtttaaatcctgtctccattgcttatcagctttgggactgtgggcttaatcgtccatacctcttaaagtcttttggcaagactaaacgaggaaaatatttgaaaagcatgtgaaacagtatctgaaacttagtgtttcacaaatgtttgtatcattgcttattttcatctgtacccttctcggtcctcattgctggtgaatatgggtttaaacagaagcaagatctctaaggaatggatgggaacagatgttgcgtatttggttttattttgcctacagatatcaatgaatgtgaacaatttgggacttgtccccagcactgcagaaataccaaaggaagttatgagtgtgtctgtgctgatggcttcacgtctatgagtgaccgccctggaaaacgatgtgcagctgagggtatgatgggttcatgttgggattaattgacttttggggaaataaatactgctaagtacactatacgatgaaagaaacttcagcttctcatagtttttcttttctttctttttttttaaactcgccagctgcttctcttccaacacctctttagtcgctccttctctctcctcccctgccagcttaaaacaatagctacatcccccaacaaatatgtagcaattaaaacaagagccaggtgttacttattataatggatttagcctcttgtctaccttgataaaaacttcaaaaagtggacaagatgtcatctttcttaaggctcaaacaataacaaaagcttgcctatgggatggtcatcaataaaaggaaggtaacaaggccctctagctcccactccactgagaataagatttgaggcccagtagtccaagagggctcgtgaattggggcaaatcaaggacatatcccttttgtattgttcatggactactgatcacaggcagaaaggagtctggcacagtcataacttcaatcatgagttttacgttttaggttgatgccagtgtctgacaatcgggcctaataaaacagagaaagaatgtaagtcagatgtattatactccaaattccagaggcctgatctaaatcatcatatcctagttaagaggcatgggtctttattttgaatttgaagtttgtactagagtttaaggaacttgataagaaaatagcactttattttgtaaattaagagtaaatggccaaaatggctgttcaatttcttcatacaaattgagcttttaaagcatacatttgactagcatacttacatattttaccctcaaaacactgttgacagtgaatgaaaactagagtgaaagcatttgaacagttggtctggtaattaagcagcaattttttaaatgtttaaatcctttaactaaggacatgactgaaacaaattggaatattcatataaaacataatgtcaagatagaggaaatatataaaatgaacttttaaaagttacttaaattggattcagttgacattatgcaagtaaattaaacttaacaaattctagacagtgcatcttgggatgagtcaccattaagtagctgctttaggttaaaaaaattaaatcaaggacaagctaggtttattttgtcattagctaggagctaaattgggtcatagagctgattacctgctaaaaagaatcataaaatctgtcaggaaacagtaaggaatgagacttttctggtaaacttttagtaagactataaaagtatttcttctgtgagatagaatgtctgcagtctagtctgttttgatgtcagtaaataaaaacaattcagtgaaaatgaggactgtacgtagggttctcagtctagctttgttccatactaccactgagtacaaagaataaagaactgataatgtccctaagagacatattagctttccacttgaagtggagaatgtcaagtcacggattttgtaacccagttggagagtcagctttattgattaacagagatagtcagattcctataaaaactcatgttctttaaaaaggggacaggtacatactgtgcattttatatcctactttatataggaaagtataattcaaacagataaagtagccctttgtttgtttacaggtagctctcctttgttgctactgcctgacaatgtccgaattcgaaaatataatctctcatctgagaggttctcagagtatcttcaagatgaggaatatatccaagctgttgattatgattgggatcccaaggacataggcctcagtgagtataaactttggcatctttcattgatattaagtgactttatagaattttaaggtgttgacttttaaggaatttattgtttaatgagtgaattttgttgcattagtggaggaggaaactcttccaatccagcatgctcctgatgccttagcgtggccttgaatcccagccaagctttcctgatttctttctaaaactcctccgatcactggggtttatcctttctggaccatctcacatcttcttgtattttgaaatttccttgtccttgatactgcagatcttgttccttcctaccattgtacaccttgaaaatttctactcagacctcaaagacccagtttaatgtcaccacctctgtgacaacttctatcactccttctggcagagttctatgattgctcaccatgaatctatgtcattttatggcacatgttactctaagttatatagctagttgaccacataatatctttctatcctctagacatctgctttttggggacaaagactgaatctaatttatctctaaatgcctagcagctgacccaacatctagtacactctatgtggtaggtgatcaaaaaatttagttgaatgaaggaaaaagatgaataatgcttattgttgaatctctcatggctctatctggtgttgggggagatgacagtagggtaggagtcagaaaacttgtcttctgtgcctgtaaacttatcttttatgccagtctcccttatctactagctttgtgatcctaaataattgtaacgattctctgaatctcaattttttttctacaaaatcaaagtagtaatcttgttctgtctgcttacctctgagagttgtttggaagattgaatgagatagtagatatgaaaggctttgaaaactatcaataactataccaatgtaggatttattattggtgtattttcacacatattcatgcaatacaatacacttttcaagaatggtgcatacctaggaaagcagcaggtgtccagtgcatccctctacagtcacagtcttcctatgcttttaacatgcctgctgtccaccatccttctgtctgtatataaaataggacttctcgttgacatggcttctttattgcctctgatcttgagtatgctttcaaattctcaacagcctgccctggtttatctctatacattctgttttggaaactagaacttgatcctaataagagtaaataagcactttgttgaaatacgtttaaatgaatcacttttaaatagagatgactaaatctcactaagttctcagttgaagcatttgtagctcatagctcaagtttgataggttttaaagtttgattatactgatgtcattgaattattcatattataacaacagtgaggagggaggtagagatgtcaataaacgaacagtacttcacctgattagacccctgttcttcctttacttgatgctcttgacatgaaactgacctgtgtgtcttcctctgtaggtgttgtgtattacactgtgcgaggggagggctctaggtttggtgctatcaaacgtgcctacatccccaactttgaatccggccgcaataatcttgtgcaggaagttgacctgaaactgaaatacgtaatgcagccagatggaatagcagtggactgggttggaaggtaaatttgccatacattccccccttacctgttctgttttcctggttagagttctctactgcactccatgggccatgagtgagtctgggcctggatatgagtacactcagccatgggtgcagctgggcagtggttgggcttgctgaagccccagcaactacctccacttaccccagcatgtcatggagacattatcatatcctgtattctttgtgggccatgaaaaaaattgggaaagcacccaggtcaatatctggatatagatattatatctaggatataatagtgaatattatatttactataagtgaatagcattcttgccaacagagttctggattccaaaattaactttcagtatggcagcactgctcattttgtgaagaaatgggacagcctcacaattctcccagcaaagcagttgagatgaaactttttttctatggtagttatcttggggacgaacaatccacatcttgtgtttttagcaggcttctagttaaaacagattggaaatttgactaaagaagtctttggaattgagttaatagaggtgtcagtctcttctgttcttctagaccttctagtggcccagggaccagagccacacattttggatggtttttaagtagaacttaagtagggttatcatcaggtaggtgtgtgaggtacaaatggatgtggagaagttagtaagctcattcttcaaggaagaggtttgcactgacttacattggtgggaaaatgattccttgaaaatgaaccaataatgcaaacatgtttgagggggaaggttcaggagacactactctcctggagaatggatagttattttcagtgtaaattctttttcaccttttaaaaaatgtggctggtgttcctggaagagcatctttgaagaagctaattgggtcccgctgtgcctgcaggctaacaggagactcattttagcattttcagtcaagaaacagggccttagagtactgttgctagagtcaggaactcaaaactccagacattaacactctcttctgaaaaccaaccagggaatggcagatctgtcttcttgtttgaagttttacctctttctcagccttaatgaataagagaattaagaaagtggtggaactttttctgcttgtaagagactgagacctgcagcctcagaagtggaaataaggcaggacagtcttgccgagtttgttattttaaaaggctgtttccactcatctttgagctgacaccaggttcctattgattctaacggggctctttcctgaggaggaaacagactcatgggcagtcagagttaaggcaccagccccaccgtgccttatgacttctacctagaagcccatgtctcataataatgccagtcagaggccagtctgactgctgtgtctatggtagttatcttggggacgagcaatccacatcttgtgtatttagcaggcttgtagttaaaacagattggaaatttgactttcctgtttagtctttggaattgagttaattccattgtggatcctgcgtgattcaggtgctttggctgttgggcaggagtcccctcaattccttactcttccaagtgtaacctgccaaacatgtccccttggctgtagttcccccaagagagggggactatggtctgatgataggtatctgagcagctgtctcaccagccaaacgaaatgctctcatcttcaaacctcttacccagtaatgattactctaggctttgcagttgtttaactttgtccctctgaattcaggcatatttactggtcagatgtcaagaataaacgcattgaggtggctaaacttgatggaaggtacagaaagtggctgatttccactgacctggaccaaccagctgctattgctgtgaatcccaaactagggtaagtacttggagaagtcttcaacatctagatatttctccctggattctcatcaaattccatgtttcttataatttttttttcctagtttaactgaaattgtccttcaagtttttgggagtagcgtctatgactgtttcaagaattataacatgcccttgagatcatatagaaccaaccatttctgatggggaaattcctttagaacacatctgagaatctttctagttacatggattccttgccaaatcagagctctgaactctaaagttctttgtggatataactgttttaagtgaaggtttcaacagaattgtttttcctttcatttggatgttttaaagtaactcattcattgaaatccagctagggatttggtcatatttcatttaaaaattaaacatttatatccaaaatatataaatatttaaaatgacacatgtataaatatatattatccatttgtataaatattccaatttgcaatttatctataaatcatctcagtgtaaatgagaacaagttttgttatttttctctacatttcaagacatttatttgaataatcactaagctgaaatgacttggtatttacatattagcttagcttcagaatagtgacactttaaaaaagttttttgaatgaccccaaataattttcctacttgggcaggaccagtctagccctctgtagatatgccagtatttgtaggtagaaccctatgagctgttattactttaattctgttatatttcatatgttaaatcataccctcagaaactcagcaatgaaatatgaaaaatacttgactgatgagattaacctgtagtgaggacttgtcctcagcattagtcattgctgcttatatcttatctacacaatatattaggagcaaagagatgcagtgtgttctatggtgtgaatgatgtgactgtttccagtgtgccgtttaattttttcctctgtaactaatgtttaaattcatctgatattattatcatactctgatatccctccactgtttttttcatagaaattcttttttttttttaatttttttggagatggagtgttgctctgttgcccaggctggagtgcagtggcatgatctcggctcactgcaacctctgtctccaagattcaagtgattctcctgcctcagcctcctggcagctgggattataggcacccaccaccacactgggctaatttttgtattttcagtagagacagggtttcaccatgttgggcagcctggtcttgaactcctgacctcaggtgatccatctgcctcgccctcccagtgtgctgggattacaggtgtgagccaccacacctggccagaaattcttattttagtctttgtaattcctttctctctggaatggctcagtgtagtcctgtgagggataggaagtaagaaaggagtgagaaagggtttcactgcctaaggcctgcagacccgacctacaacctcctcatttcatgatccatttgaaaggctcatcatccataagttttataagcataagcatatatgatgtgttgaaccttcttacagcttctgcggtataagatctgccagtgggtccaaaggatgatgaagatgataactactgataataccagcaacagcaatgagaagtgccaacatttattctattcttgctgtgtgccagctactctgctaagtgtcctacatatataaactcatttgaattgtacaaaggatctataaattagtcataggtttctatcccttatttacatagatgggtaaaataacaccatgctccttcagacagcaactgttgactataatataagatacaaagggagaattgtcatgaggacactgctgaaaaacactgtgatagttctcctaccttacaagggttcagggaagctctatggagaaagtagcactgaactgaatgttgaaggttgggatccactggtagtataaccagtgataaagtatgtgacatgtgaggtcaatgtgggtgagagtgagaagggccacttcccagagaaagtgggactgacatagaacctagatggatgtcttgggtactgataggcaaaggagccaggccggctgttcagaagctcaggcaatagcataaacgaagtcatggaggaaacaaaaatcattctgtgtaccttttgtgtgttttttccattccattccctacgttttgttttttttagttttgagtatttaatactttttaatttaaattaaattgaattaattaatttacttatatagacagggtcttgctctgtcacccagactggagtgcagtggcatgatcatagctcactgcagccttgaactcctgggctcaagcagtcccctgcctcagccttctacttgcacaccaccatgcctggcttattatctttaagaaaacagcttatataattcacatatggtatgtatggtatgatacaacttacccatttaaagtgtacaattcactggcttttggtatatgcagagttgtgtatccatcatcataatcggttttaaagcattttcatcaccctacaaagaaaccctgttcctctgagccaccattttcctgccctcagtacctgctaatctgctctctgtctctatagatttgcctattctggacatttcctacaaatggaatcctacagtatgtggttctttgtgactagcttctttcacatgtgtgtcctttttaatgaaaaccaaacaaggtggtatttaccagttgttgagactttaaaggcccctggctgcattttttccagagcccagtttgtctaaaatccacacattcgtcagtagaatttaaaacttggcctatgcctgatgactggtttagactacaggctgcaaagcagcggctggtgggccaaatatggcccataggacatatttggctgggacaacacagagctttaagatttttttttttttaacatagtgctgacatttaaaatttaagaaaagaaagaaaacctgtatttcttgctttggaaatcagaggagcggattacactgggtaggtctgccttcctgggcactgacaggagctcttacacagggtcttgctctccgcatcacttgatatttacaaccgggatctctcctcattcatcttacatacctgttcctctccaggtatttgaaatcatgcaatccctggtctaggtaattcaatgtgagatcatctttgcttacatagacccttgctctacaattaattattaattggatgcaaaagacatatttaaaaagagttgctgggtgtggtggctcactcctgtaatcccaacactttgggaggctgaagtggggggattgcttgagtccaggagttcaagaccagcctgggcagcactggtcaaaccacgtctctactaaaaacacaaaaaactagccaggcatggtggcacatgcctgtagtcctagctactcaggaggctgagatgagaggatcgcttgagcccaggagtgtagtgagctatgattatgtcgctgcattccagcctgggcaacagagtagctccatgaagatagaaatctttgtatgttttgttctctgatagatcccaaacacagaacagtgcctcttacacagtaggccttcaataatatttcttgaagagtgaacagctttcataatacagctttcataatgcattttaaagggtctgaatatccatccttcggccaatttctattaaggaggtgcagttttcaagaaggataaatcatatgtgctcttgcgcccctatttttgctccccatcttctgtaaaatataaaactggtgtcactgagcacccaggtccctgagataaacagttggtttccctgtaggtaatgccctgtgctctgctgtagtggagaagtcttaccaggtgagatgctacagtgaagaaatcttctgttataggcttatgttctggactgactggggaaaggaacctaaaatcgagtctgcctggatgaatggagaggaccgcaacatcctggttttcgaggaccttggttggccaactggcctttctatcgattatttgaacaatgaccgaatctactggagtgacttcaaggaggacgttattgaaaccataaaatatgatgggactgataggagagtcattgcaaaggaaggttagaaattagttagaaagtaatatattaaattaataattaacatatttctaatgtctttgcctgttttctcaagaaggagccctgctcttaggaaatggcttatatagttttttagataccacccctccacccccaccaactcccacctgctgaattaaatgcagatgagttcattagcaataattaaatccttttcgtcctttttacacaactttaaaaaaaaatgcttctcagcagaagatattgaaataactgagtttcctgttaggttgccccagtagaggtggtttcatgtgtaccaatgttaattcatgtctaaccgcttctggacacattcattttcactttactagattgcccagtatgcacaactgtaaatatctaggagatgaacattttttgttgttgttgttcagactctgcagaattgcaatgacccagcacatatcacatttttcctatttggtcagatagatgtcttatgttcaaaagaaaacataaaatcttgccatttaaattgttttccaaaaatgcagtaaaatcagtaacttgaaagtgagctagggccctgtgattggtgtcgggtggtatacatcaatgtggtttaatttctatcttcttgacctcctaatgcagcacactttcacagtcccatgtagctaaagtcagcctgaatattcccagagcttcaaggcattgtatgagggaataattcaagcagaatgacatcagatctagaagtggcggtagggtgtagtgggtattttcttttcaataaccttctgttttgtttttcccctgtgggtaagcagcaatgaacccttacagcctggacatctttgaagaccagttatactggatatctaaggaaaagggagaagtatggaaacaaaataaatttgggcaaggaaagaaagagaaaacgctggtagtgaacccttggctcactcaagttcgaatctttcatcaactcagatacaataagtcaggtaatcaccaactttggtataagatgctcctcattacttggaaatcttatttcaaaataatggctatattgctggaagatggcagtagataacaacaagctaatctcttggtgcatgaaaggggtatatgtgtatgtacgtttgctgggggagaggaacgttttaaccattttcaccaaagaaagataaaattggtggtcaaatgaaattatgcaaaccatcagcaggtaagtaaaaatattagccctcatcattgtttggagtgatggatatgtacttctaggccacagaatccagcagacatcagtcccctgctaaatgtgagttgggttaacaagtcacaaaatgggtttcataggcatcagaaatcttatccttcccattgcaaggctaggctagtcaggtcaacctgagatatgtaggtcttagtttaaaatggccagtcatgtgcattcctacccgctcccctctgtctcactttcccacttctgggccctgcttcctcaggttacctgtgcgctaatttatccttcagcagtgtgtggagcaagatgaaaggcaaagggaagtgaggaaaggaaatagccttttactaagttcttatgtcaaattctctcttcagtgttaattcagccatctattacttcaattaccttataaagacctcccaaaccttataaagacattttattctcatctcaaataaagaaactgaggccgagacagatttagtaacttgtgtgcctaagtcacataacaaatgggtgagttttaatctcagaaatgaaataatttttaggttcaattctatccaacccaaaactcagcatcttgctgtattggcccagtgttcagtatgccaaagtcccaggttgaatgctatggatatgtggcctttgacaagttactcccttcctgtccccatatgtgagtcatgggtggagtctggggttgtcttgagtctgctgatattttgagaccttgatcagccttgaaaaattgcaactcaaagctgagactcccatgagatgacaggggtggcaaatgccttttctagggcatggcttccttgttttggaagtatatcaccaaaacactccagaatactccagaccctaccaatagaatagcttttgtgtcctaagtgcccttgcggctctcacacttggcaattttaaaggtaggagaggaaggcacagtacacctggaaaggctatctcccctccctaccgcctctggaccctgaggagaaggcagaggaaagtctggaggctgcccctgaaggaaaagcatctccctccggcagctgatgctcagggaaggcggctcctttggaaagtgctggtggagtgggggtgggggtgggggtggggatggggagtacagccccagcccagcctgtttgaaccaagagttctgaaagttgagcatgcctcagaattatctggagagcttgttaaatatagattcgtgggccccatctgttgcacttctgatgcaatatgcctgaggtggcctaagaatttgcatttctagttctcctgtgacgttgatgctgctggttcagtgaccacattttgagaaccgctgctccagtcccttgctactcagagtgtgggccatgggccaggagtcttgggatccttatgggagctggctagaaatgcagtctctcaggcccaccccagaccttctgaatcagaatctgcattttagcaagattccccaggtgatggatagcacattcaagtttgaaaatctccactctggagggccgacgaaatggtaatgagacagatattgatggaggcttttggaagatgtgttactaatttatagctatgctttgtctgtggttacatcttgaatgacagacaatcaggatcacagaatgttagtctgagaaggaatgtaaagattatccactccagtacaacccttggataaatcataatacatgctaaggtagaattaataaggctctagacttacctagggagcttttaatggtaatacttgaactctaccccagaccaattcaaatctgaatctctgtgaatgggcatcaataggtttttttgtttgtttgttttttgtttttgagacggaatcttgctctgtcgccctggctggagtgcagtggtgcaatctcggctcactgcaagctccgcctcctgggttcacaccattctcctgcctcagcctcctgagtacctgggactacaggtgcccgccaccacgcccagctaattttttttttgtatttttagtagagacgaggtttcactgtgttagccaggatggtctcgatctcctgacctcgtgatccgcccaaagcggcctcccaaagtgctgggattacaggtgtgagccaccgcgcctggcctggcatcaatagttttgaatagctcccaggtgattatgaggaaccattgctctaaattcccttttcttgcaattaaggtaactgaaacccagaagaaatgtctccttggagggttggggtggaaatcacatccagtatactttggatagaccatatgttatgatctgtccagttttgggtagtgacaaatcttggtataatatgtggatctcactggtcttttgaaccatctcaagttgtttagcactgagtagattttgaggttaggcagtgaaccagatacccaccttccaaacctctcagggcagcagagaagataagtgatgccaatagaaaatgtgagtggtacagaaattggctggagggcccagagagggactatcccactgcagtgtggtggcagagatgatagtgtaaatgagggtgagtggccagctgacacgtggacgagaggtattgagaggatgcctaggctctgctgtcacctggcagagccacttccagttgctgggtattcaggttattcattctgtcaggacctaactgctgttctcacccgctttccagtgcccaacctttgcaaacagatctgcagccacctctgccttctgagacctggaggatacagctgtgcctgtccccaaggctccagctttatagaggggagcaccactgagtgtgatgcaggtaggagcactgcccaagcagctatgggggcctgggagcactcctctgctgccttcaggagtcagaagaatccctgtatgctgggtcctttgcagcagagtggggatggctggaaggagggttaagggatgtgggaggtatgaacagagttgagtgggacttagggggcaaacagaactgtgttccagtgactgctgagaattatttgctaagatctgcagaaatatagatccagtgtccctaaatctattgctgtgttgttttgtaaagacattttgaagagtgagtttttataagacctctacctcaagctggattcccattgccccagaatccactcaaccttaattgtagctcctcagggtagagaaccatgtccagttttgacaactgaaaaagggctaccttttgaaaagtgctttatattatcaggagacgaagaccagcatgaggaagctgtggtttaattctagtcccaaacgctgtgggtgatctattcttggcaagactttttttcaatgactcttttaaggagttaataagccggatgggggcgaataactagtgtccctaactagcatccggtgctggaaaagcctgtgaaaaagtcgtcctgcaattcactagcggcccattttatggctcacatccttggggccttcccccagttttagctgatggggaaaggaaaacgcttaaccaccttctaccaccagggggagcaggcagttagaccaggaaccaccctttgactcattccaaacaggctgaggagttggcaggtttagggaatgaatccagggagaaaaaactgtttcttgtcacccctcttcccctactcttgcactcatcccaacgctactggggaaatattggtaggaatccaatatttcgagccatatttggaacaaaatgacaatttcaggctttgagatttgttccatgctgtggatagattgttttgccacttactgcaatttcacatcgtgggagcagtgtggtcctggttgtcacctcatctactacttttctcatttaaactttttgccaagtggattttattaagattcttgttttaaagaactttaaccgaagtaagcacacgaatgatggcagtcattccatatagggcctcggtttggtataataattaagcaattagtccagtgagatttcttgagtgccagctatgtgccaggcactgttctaagtgctggaggtaacagaggtgaacaaaacagacaaaaccccctgtgtgtattgagtttacattctaagaggacaataaatagagaagtcaataaatacatggtagttcaggtggtactatggagaaaatgaaggcagaggaagagggatgaggatggggtgagtggggattgtcctttagatagtgttcagggaagacctgtctgatacagtgaacattgagtggagactcagattgaaggactgagccaggagggtatctagactctttaaataatatacacatgtaacctatacttattaagcatcttcaatataaaagacactgaagcactaattccccatcaggcacatcctgggagtatgtacaggcctagctgggagcagggacttggagtaagggcagtttgggaggacttgaaaactcaggagctctctagctaactgcctatcaaatatctctatatctgtagctatgtgactgcctgtggactgatcaattactgatgctttggtgtctttagttgaagtttcaaggtgggcctacattaaactcttgattttaactgggttcacggaggagaattctgaaaacttcaaatgagaatgtgaatattttaagagattattttaccactaggttcttgtaactattaatatatgtgctccagagtctagtacctctccattgttttttgggaaaaattctataaactgccccctttctttccactaaatgtatgttactctccaagaccttaaggaaactcactggacttagggggaaggtaagctttgacagggagactaattggctggcctgcccctcctcccacccctaacctgggccggtttgcatggtgtgggcactctgctgagtacagctgactaacacctgcatggctttcccttcctgcagccatcgaactgcctatcaacctgccccccccatgcaggtgcatgcacggaggaaattgctattttgatgagactgacctccccaaatgcaagtaagtctgaatgttgaggtcccagctataggccttgcctcttctggggaaatttgagaccttaaagtagccaggaaaacaaatacaggaacctcaccagttcactaattcttacattttaaccagcttgccttcccttgagggagtctacagagaactgaggcagtgcttctttaactagaatgtgcataagaatcccgtggagatctggttcaagtgcccattctcacgcacagagattctgcatttctaacaagctctaggtaggccacagggtcttggaccacactttggggagcaaggagttagagaattggcagcagcattttcctactcacctggtattgttgattacaacagggctgtgggagaagagctgtctgcagggctgctttagtacaaggcactcgtgatgagcagaaagactgggatggattcggaaagaagatgactgtgttgcgaaaactctaacatggagcaagataaatggatgtctttaaaaagcatttaatgaaagcatataaaagaaagaaacataaccatggtttccatttgtactctctaaggaagcattgcatagattagacaccaataggttttcgtggccagactcaccccctcagtgccacagctactccattacaagtgcatttctaaaatcagagcactgttctttctgcttgtcttctcttggcagaatgaacaaaagtcatgcaggatacattgtctgttcaacatgtaatttatgcagtcaaagctctctctacttcaggatgtgctcagaaaaatgcagtagaagcctaagaacataacagctagtgaatgatttgctttttcctttcaggtgtcctagcggctacaccggaaaatattgtgaaatggcgttttcaaaaggcatctctccaggaacaagtaagttttaagaatgtgagcaacttggaaattactcatggcccctacattgaatgctgtcacagcttttctacttaacccagtctttgaaggagtggttctagcccccagtttctgccaggattgcgggctcccatgtgttgatgtgctctctgctatcttcttctatagccgcagtagctgtgctgttgacaatcctcttgatcgtcgtaattggagctctggcaattgcaggattcttccactatagaaggaccggctcccttttgcctgctctgcccaagctgccaaggtcagtttcattatggggaacgttgatgtttgaagcctaagaaattcatatgaagccatgtgaaggacttagttttctttctaagttaaaaaagcacaatacgcagttcaccgattccacagaaacaaaaagtagtgaggatgtaaagcagtcacttcaaatcccaacttcttagtcaagtgcttctctaaagcctgagtgacaagctgtgttttgtagtccaaatggttgtgcctactggtaggtgttcaggtcagagaggagtgaaaaggcagctgtgtgatggcccaggctttatccttctatgtgctggactctttttcttttagatctcatggttcaggaatgtgctttaacgtttccaggtagctaagggaacttactaccatatttgacagtgtaaatttagagtgggaattgagcattacatttgaggaagatttggcaatgtggaggagagggtactattgtgaaaggttgtatttgttgtttttgttgttgttgttttaaataacaagacactgttttggttacttctttccagcttaagcagtctcgtcaagccctctgaaaatgggaatggggtgaccttcagatcaggggcagatcttaacatggatattggagtgtctggttttggacctgagactgctattgacaggtcaatggcaatggtgagtatggtttcaaaatgattatttgaaggttgtcatttatagaataaatactttttataaagaacaaaattcacctagagaagactgaaatacagtattaggcctctcagaataaggtctgcactacacaagttaggaaacattaggtttgttgctgaaaggtgtctaaaaacattggtaataacattggaatttacccctgctctaagccacgctgttgaattggaatcatgaacagtctgaagtttaacttgaatattgaagagctttctggtttttttgagggtggtgtgtgaggaggacatgatattttgtttttatttgatgacttttatatgtataaaaggagtagggaactatatttttcctagtgtcatatatttttctgccaatgtatagtgatgaaataaacagtgattttagagttggcgttggtccagaccacggctctgccacctactaagtatgtgacaatagacatggagcttgatatctctgaccctcattgtccctatttgtaaaacaggtaaaataatacctcctgggaggaccaaatgaaatactttatgagggggctgccacagtcttggcactgagggggctttctgtaatcagtattgggaaaccactttcagaattttgtctctccctcaaatctttcattgttttccttccctgagaatattatattatccattctttttccttcccctctctccttattcttcttttcttcttccaccattatccttttctctgtggcccagacccaattcccaagtgagttatttaagagaatttggatataagaagaatgttaccatttccttgagttggtaaattagtgcatgttatgttactttgcataataatttgccatatggaggtcttgtgttttgctggcctttttttttttttttttttgcaagttctcttttgggtaacttatgacgtagcacctagcgtacctccaggtgtgaggaaggcacctttctttgtgtgtgaaccagattagtatggtgtaatctctctctctgtttctctctctctctctctctctctttctgtctctgccatcagagtgaagactttgtcatggaaatggggaagcagcccataatatttgaaaacccaatgtactcagccagagacagtgctgtcaaagtggttcagccaatccaggtgagaaaccatacagtcttttctttcagttactgctgtcgctggatcttaatctattgagtcatgtcttaggattttcctaaccttccctccaaagggaaggaagcatagtgagtggtccatgctgcagctgccctatctgcaggaacaggaccaacccaaggacataagacctgaaaacaatcagaatcctgttctgttgcacagtggtggaggtttggcagccatgccggggctgctggccaagaacctttcattttgagtggtgtcagagcaagagaggtctgagtcccttcaggggcctgggaaacacagtgcctgaagcaccacagcttctctacaaatacttgtgaaatgaatgagtggagaattgtcaggtcactatacaggaatttggggacggggcccactctctggttcttgctgctatcccaagcatgtggtttgaggtggattaaagggagagggacctcttatgcttgctgttgccatacttttctgaaaagtacaaaggtctctagagttgatgggcagatatctaaatttccttgttgcagccttgttgctcagtcatctttttttgtgtgtgtgagcaacaaggctatttatttcacctgggtgcaggcgggctgagtccgaaaagagagtcagcgaagggagataggggtggggccgttttataagatttgggtaggtaaaggaaaattacagtcaaaggggggttgttctctggtgggcaagagtgggggtcacaaggtgctcagtgggggggagtttttgagccagatgagccaggaaaaggaatttcacaaggtaatgtcatcagttaaggcaaggaccggccattttcacttcttttgtggtggaatgtcatcagttaaggcaggaacaggccattttcacttcttttgtgattcttcagttacttcaggccatctgggtgtatacatgcaggtcacaggggatgcgatggcttggcttgggctcagaggcctgacattcctgccttcttatattaataagaaaaataacataaaatagtattgaagtgttggggcaaagaaaaaaatttttgggggggtggcatggagagataatgcgcagtgtttctcagggctgctcaagtgggattaggggcggtgtgggaacctagagtgggagagattaagctgaaggaagattttgtggtaaggggtgatattgtggggttgttagaagaaacatttgtcgtgtagaattattggtgatggcctggatacggttttgtatgaattgaaaaagtaaatggaataagagaaggagaaaaacaggtattaaaggactaagaattgggaggacccaggacatctaattagagagtgcccaaggaggttcggcatagccctgccagcaaagattatttatttactttaagagggagttaagagtggcggtttggggatagcaccacgagatatcagctgtgacggcttggagaaacagtgtaaaccggtggtataaacaagagcagggcatttatgagtagttgagaacggtgaataggagtatgactagacagaagatagtagggatgacaagttttttggggtgcagtccaagttggtctggtgtctggaatgagactggggcttaataaaaaggagcgtctatacaggagcttaaatggctgtaccctgtagcattctgaggacaggcctgaattctgagaagggcaagtggtaaaagtattgtccagtcctttttaagttggtggctgagcttggtgaggtgtgtttttaaaagaccattagtccattctacctttcttgaagattgaggaccgtaaggggtatgaaggttccactgaataccaagagcctgagaaactgcttgggtgacttgacaagtaaaggccggtccactgtcggactgtatagaggtgggaaggccaaaccgaggaattatgtctgacagaagggaagaaatgaccgcagtggacttctcagaccctgtgggaaaggcctcttcctatcctgtgaaagtgtctacccagaccaagaggtattttagtttcctgacttggggcatgtgagtaaagtcaatttgccagtcctgggcgggggaaaaaccccgagcttgaggtgtagggaagggagggggcctgagaaattcctgaggagtagtagaatagcagatggaacactgagaagtgatttccttgaggatagatttccacaatggaaaggaaatgagaggttctaagagactggctagtggcttgtaacctacatggaagaggttatgaaatgatgacagaatagaatgggcctgtgaggctggaaggagatattttccttggtctaagaaccatttgccttgtgtgggaagagattgataggtggaagtttcagcgggggactaggtgggagtgactaatgtgaaggagaaaaactgactgtgagggacagaagttggaacgctagctgcttttttagctaatttatcagcataagcattgtcctgagcgatgggatctgatgcctttttgatggcccttgcagtgaatgactccagcttcctctggaagtaaagcggctttgagaagcgtttttattaaagacgcattaatgatagaggacccttgtgtagtgaggaaacctcttgcatggtggtgcaggatatggaaggcatatatagagtcagtataaatactgacatgtagtccctttgcaagagtgagggtttgacttaaggcaatgagttcggcttgctgagaggtagtggagcggggcagagcggtagcctcaatgatagatgtggaagatactatagcatagcctgcctttgctggtgagtggcgattaggcctggtggaactgctatcagtaaaccaagtgtgttcagggtgaggaacaggaaaaaaggaaatatggggaaatggggtgaatgtcaggtggatcagagagatacagtcatgggggtcaggtgtggtatccgtagtaatgtgggaggctggattgaagtctgggccagaaacaatggtaattgtgggagactcaacaaagagtgagtacagctgaaggagctggggaacagacagtatatgcgtcaggtgggagaaagaaaatagattttggaagttatgagaactgtagagagtgagttgagcatagtttgtgatttttagggcctctaaaagtattaaagcagtggcagccgctgcacgcagacatgagggctaggctaaaacagtaaggtcaagttgtttggacagaaaggctacagggcacggtcccggctcttgtgtaagaattctgactgcactaaccatgcctaggaaggaaaggagttgttgttttgtagaagggattgaggtttgggagattagtcagacttgatcagcagggagagcatgtgtgtttttatgagaattatgccgaaataggtaacagatgaggatgaaatttgggcttgactgaagtaatgggggctgtctgtgaagctttgcagcagtacagcccaggtaatttgctgagcctgatgggtgtcaggttcagtctaagtgaaagtgaagagaggctgggatgacgggtgcaaaggaatagtaaagaaagcatgtttgagattcagtccgtcatctttaagaagagctgggagatgaaataggaatataggtgaagggaataactttacataaggtctgcatcaatagccccagcgccacttttactgcttgtcaactgcgaacatgtatctcctttgtcacaacaactatggccttagtgacaatgaataactgtcattgttaacacctaatgctccttttgaactcgagatatggcacattttaatacagaaactagaaatgtttattttacaaatattttgtgattttaagatcggaaatgtttaaatcttgaaagcattttccctgatcctctgataaacagatatgaaaactttaatcacatgataaaagagatacgacatttcatttgacatcttcacttaaaataaaatgaggccatgtatacaaatgcatatccaagtttcagaataaacaagtaatgaatgtgaaaatataggaaaaggagtgaattgtctaccttgtagtttattatgcattcatggtaatttggtcttaaaagggaaccttggaattgtatgaatgttatagaaaaatgcgtagaagattattaattctatcattctcatcttttcaaaaattcaacctctttttagtagtactatgaaatcttaatttccgaagataggatttattaatattcaaagaaattattaagatccaaagataggattctcagttcatcagtgaggttggggaattattcttgctgttcttctaggatttggcttccagtatataactagagtatgattatccaaaaatttggtcaacagtgggagtaagaaggtatagagaatacagtagaaattgctagtaataagtgagagtgtgaccagtgagggatgtatttgcctcccaggattaaggtatgaggtgacttagtggttgctgctcttgattttggggcggtgggagtgatgtttagtcctggcctactgggtcatgcaataaaaatggtgcctgatgatgtctgtgggagaacaagatggcaaaaagagccagagttggtacaaactttacagcaaatttatttactactaaattctttcaaaattgggtaaaggcctttaacatgtccacaggtgactgtatctgaaaatgtggataataagaattatggaagtcccataaacccttctgagatagttccagagacaaacccaacttcaccagctgctgatggaactcaggtaacagttgccgactcctgaaataatgtgggatttggaaaaactttgggatgactgggtttttattaaccttaagcaaacaagggagattctggaaggctcaaagatctcaagatgtgttgacagttaataaatataattttttaaaaagtcatagattgaaaaactttccaccaaataaagctacattctaacatcgagttgggaataatgttccttgtaacataggaggacatgtcacaaagaagaacaaatagacttctggatccagtatcttcagaccagagacatttaagttgagaaattgactcagtatgaataaagatttcacggtgtcaaagatacagatgaaagatccgtctgtgtgtgccgtgatttctctacagcatgcatctttattctttcaagctgttcttcgctctcctgctattacagatctttaccactagatggcactaatttttccattcatcatccatctattcattattggccaaccaatcatctaactaacgttattcccctcgatgtgtcagggatggtgtttaatactggagattgaaagaaaaaaatgccactagatggagcttcttaaacatgcctgcaggtcctttgcaattggtacactatttggtctgcaggaagaaattcaataaatatatttgatattaaactctgtattaatgtatatcattagttttaatgaatgcatttgcagctataccagatatagctgtttgaatctggacaaactgttttacttctggggctagagtcctcaataatatttctcactgggggcgctattggcatattgagtgggacagttctttgtgctacaaaactgtcctatgcactcagggaatttcagtatttctggtccctgtccactaaattccagtagtgtctcccctaattcagtgtgaccccagaaatcacctcccctccccaacacatgtgcactcactcctggttgagaaccgctaggatctggaatgtctctgttctaagattctatgaccaattttgtgaagtaatgtaaagaaatgaaagtctaagagtagttggaaattttaccattttatacaatctttatttctcaaatttcatagtctataaacattgatatcttggtaacttggcagtctcattatcaccttaaacattggtttctgttctgctgatttaaatcaaaataaaatttgacctaaattgatgctgagaagagtctatatcaaggcttctgtacaccttctcaaattcccttatttcttcttctcatgtcacacacacacacacacacacacacacacacacactcatacactcacagacatacataaatattgtctagaaaggaattttcagtttcagatttttcaagggactaaacattttttctttaagctatattaaaaatggattttgaagattaattttccacagacacacggatgcttgaatgtcatatatttggtcctccaagcctgagtcaaccccaagctagtgccagatttattttatattttcaacattttttctcagtccatctctagtctagtgatcttcttcactaaatagacattttccccagctggtgcaggaaggggactgtggtggggaggctgtaacctctgatctgcatgtctgttatcagaaacaaaatgtaaactgacagtctctttcaaaggagagcagatcttcaccaattgtagtcctttctttctcttcccttttgtaataccttggttcctcctcttacttttttacattagtgaggctgagaccctctaaaatgtgtcttccatgttatgtccagggatctcactgtatttcttccctcctgggcactgagttaacagccagcatgctttaaaagcagtagaggcgcttgggtgagatcacctaggttgatttgaatatgccagagtcccacaaatgtatctttcatccataaatatgttgaaagactaacaattaaaaacatgggctgggcacggtggctcacacctgtaatcccagctctttgggaggccgaggtgggtggatcatgacatcaggagttcaagaccaacctggccaacatagtgaaaccccatctctactaaaaatgcaaaaattagctgagtgtggtggcatatgcctgtagtcccagctattcaggaggctgaggtgggaggattgcttgaacccgggaggcagaggttgtagtgggccgagactgtgacactgcactccagcctaggcgacagagtgagacttcatctcaaaaaaaaaaaaaaaaagattcagttctatcattttccaaaagttacattgatatgcataggatcccccaaggagacaaaaatgaaagtcaccgtccctttcctcttgttagtaattgcttaacttcaagttagccatttcattttgaagcaatgacatctaagagactttggcccgccccacttaactgtaagcgcccagaggcagggctctgacctgaatgtcttcatgttccccttgggggcactatgtacaaagcaggttctcacttgaatgtgggttaaagtgaagacctcttctacttctgtagccctgtgttccccactcctccacaggctggtcccctgctgtcacagagtaagagacaccccataaaacctgtgggctccctcagctcctgttgagagtaggctgtctgttcccttgtctcccaccaggtttttatctggcagtcagcatgacaggcaacttttcagtaaagcgtgggccacgcaccatggtccagggtgattatctttgggttctccagtttatgggcctctgggtcccctgagtaatcattacctgcccttctacctgcaagttagttgtataatcttgctgtgactcagcaagtataggataataagtgtacctacctctggggtttgttaaaaaaaatcagaaacttgtaaaactcttagaatagttcctgacacatagtaagcactcaataaatgttagatgtttttgttattattattgtgacacaggagggaatgatgaagggagaagggatactcttgagttgaccaaagaatgttactttagggaataagagttacagtttggctttgccatctccacccaattttcaggcagccccagaaatctctttttctccagatgcatcttgtgcatgtctgttttatgtgttctctctgtactgaggtaaccaggtgatttgcttgtagatactatggcacaaattctataatatataaatttgaagtcaaagaagtgtttaaaaccattcgattaaaagagcccagagtttcagttactgttcagggaccataggaggaattgaacaatttaccatatgggctgaatcacatggtcccaggtcccaaattgctttacccttcagtaagaagaaattttaaaactgagacaggaggaaaagaaacccacaaaataattccattactgagaggtttttgttttccccttttcatttaggtgacaaaatggaatctcttcaaacgaaaatctaaacaaactaccaactttgaaaatccaatctatgcacaggtaatttttaacaatttttcttagcacagacattttttcttagaaattatttgcttggttaaattggacacacacttagattattctgagcagagtggccacaaatagtcttctttatgaaaaaccgtgtatggtgaccttgggggaataaatggctgattcctgttacattgtattcttagatggagaacgagcaaaaggaaagtgttgctgcgacaccacctccatcaccttcgctccctgctaagcctaagcctccttcgagaagagacccaactccaacctattctgcaacagaagacacttttaaagacaccgcaaatcttgttaaagaagactctgaagtatagctataccagctatttagggaataattagaaacacacttttgcacatatattttttacaaacagatgaaaaaagttaacattcagtactttatgaaaaaaatatatttttccctgtttgcctatagttggaggtatcctgtgtgtctttttttacttatgccgtctcatatttttacaaataattatcacaatgtactatatgtatatctttgcactgaagttgtctgaaggtaatactataaatatattgtatatttgtaaattttggaaagattatcctgttactgaatttgctaataaagatgtctgctgatttggttggtgatcattatagtaaatgatccaacaagaaaaggaattgactggggacctttagccgtgtctaaagaagaggcaccactcatatttcctataaaattatctaggaaaggaatccaggccccgctcttgggtccatttttacacattagcacttaattaatgttcaatattacatgtcaatttgattaatggctatgttgataggggccactatgtgttgtatagacatctggacttgactgtagactcctcagataatacagaaggtaggaaaagcaattcagtttggcccttctgtgtgttggcattgtctaaccagaactctctgtttcatgtgtgttctctcactagctgccaagacaacatttttatttgtgatgtctatgaggaaatcccatatcattaagtgccagtgtcctgcattgagtttgtggttaattaaatgagctcttctgctgatggaccctggagcaatttctcccctcacctgacattcaaggtggtcacctgccctagtagttggagctcagtagctgaatttctgaaaccaaatctgtgtcttcataaaataaggtgcaaaaaaaaaaaataccagttaagtaaagcctcaactgggtttttgtttctatgaaaatatcattataatcactatttatttcctaagttgaacctgaatagaaagggaaaccattcttattaagctttttattaggccctgtggctaaatgtgtacatttatattagaatgtactgtacagtccagatcttttctttaattcttattggttttttttttttttttttttttagagatggagtcttgctatattgccaaggctgatcttgaagtcctgggctcaagtgatcctcccacctcagcctcctgagtggttggggttacgggcgtgagccactgtgcctggcttccagctctcctcttaaatagtgggtatagtctgcacaacaggaaccatggcaggaatatacactttcccatagcaaatagcatacctgactctctgtgctaatattgcacatttgttaaacaatgaatgaatggatggatggatggatggatgaatgaatgaaacatatactactgattattttattccagagttctcaaaatatttgttgctgatattttgagtgctgactgtaattactttgattagataaacaactggaaataatgctgctgaaaaagttctaataaatgtgtattttatcaga

SEQ ID NO: 24 - DNA, 233624 bp, Pan troglodytes
  misc_feature (17319)..(17830): n is a, c, g, or t
  misc_feature (50744)..(50753): n is a, c, g, or t
  misc_feature (78666)..(78865): n is a, c, g, or t
  misc_feature (91489)..(92414): n is a, c, g, or t
  misc_feature (92534)..(92534): n is a, c, g, or t
  misc_feature (92600)..(92600): n is a, c, g, or t
  misc_feature (96548)..(97238): n is a, c, g, or t
gcagggggcgggccgggcggcagggggcctgcccgctggattcccgcatgcttgttccggggcggtcgggtctaaagggctttatgcactgtctggagggtggggactggcgcgggtagaaaacgggatgcctcgggcgtgggggcaggcttttggccactaggagctggcggaggtgcagacctaaaggagcgttcgctagcagaggcgctgccggtgcggtgtgctacgcgcgcccacctcccggggaaggaacggcgaggccggggaccgtcgcggagatggatcgcgggccggcagcagtggcgtgcacgctgctcctggctctcgtcgcctgcctagcgccggccagtggccaaggtaagagcccagccggagcctctcgtggagcgcccacttccccggctgtggcagggttgggtccgcgggaggccggaggggagagcgtccgggcaggggctagggccgggcggcggcgcgggagctgctcccggtggggcgctcaagttgcttcgcgaagccggagcgggagcgcccctcttcgctcgccaggaactgagcggcagcaaacttgagaaagcagccccgccagtttcggtgacagcgcaccccacggagaccctgtctttgttcccacgggcgttggtccgatgctcctggaaagcactttgcgggagaacgaggttctccgccgtttgcagcctgccctcccgagcggagttctctgctgggcggcgcggtccggggctctgctcagagcgcagctttccacctgcagcgcccctcccgggatcccttcgcgcgcccagggctgcgggccagagcactcctcccaccaccggcgaaacttggtcccgcggtgacccccagagaccgctctcaccatacagatcatttacgagccaagataaggccgggaggtgggattggccgagagagtggctgagggactggagtcttttcttgaagttttcctttccagctgggagctgggggcttttgtgttgatgaatggggcccgtctgcatggccagagttttggggatcgaatgcagaaagtttctagtatgaagtgctttaaacttctctcaagttgtccgatagtttatgttttaacagaaacagagaagagggaaagagagggagaaagaagcggagagaataaaactagtaagaagggaagaggagagagcgtaagagaagcaaataggaataaggaaagaaggagggaagagagaacgactggggcgggagaagagagagagagaggacagagaggagagagacagagagagagagagagagacagagacccggccgaggatgaatgggaagggcgaggaggaggctggaaccggcgagctctccccctggctttgcgttgctaggtagcagccgggagctgcgtgtgaccgaccaccagacagacagaggggacgctgctgccaccgcagggactaatctgtctgtggggatgggagagtcccccctttcccctcctgctccttccctcctgtcggacaacttaattgccctacaatgaaaatgaaacccctattgttgtaggattagccaaagcaataaattgattttcctggatcacatattggggttgatgggtggggaatgtggaagcccccatttacggaggagtgaggggagggcttgtggatgggccgtggcatgtattcaaatggttaatctgctttctttcctcaattcttagcgtaagctccttagagggaatcaagtaagtaattatacagcaactcctagcagcacccatttcagacttcctgggaagaagtttggaaaccctaacaaaccccacaggtcttgcaaaagtcttcagaaaggcaggagaggcaaggagagatcattaataaccttcctttgaacaccctttctcagtgttggtaacgcagaaagagggtttattattattgtgcagagtttgcacaatgcttagggttatatctcatgtcctaaatatagctacaggatttactatatgttcccgtcagtgcctggcaaaaggaaatcttaccttgattcatctatgtccttgtacaaccaaaacagatattctttttcctgggttgatgatttagtcactaaataaccaatacctactcttcttgatagttttttgcacccatccatcttccattctatgataataatatataataataatgtgtatagtaatagtaacccagcatacacatatatgtggcaggctttgttctaagcactttatgcttattgactcaattaatcttcataatatcctttggaagtaagtactcttattatcactgttttacagatgagaaagtggaggcacagaacaattcagtaatttgtctcagttcatactgctagaaaatggcaaactcaagggattctgaattcagagtctataattgctacagtatacagtatctggttttctctctctctctctctctctctctctctcttttttttttgagagagacagagtctcgctctgtcacccaggctggagtgcagtggtgcaatcttggctcactgcaacctctgcctcccaggttcaagcgatcctcacacctcagcctcccaagtagctgggactacaagcccggggcaccatgcccagctaatattttgtatttttagtagaggcagggttttgctatgttggccaggccggtcttgaactcctgacctcaagtgatctgcccgcctaggcctcccaaagtgctaggattgcaggtgtgagccactgcacctggcccaatttctcttttttcttttgtacaaaaaatgtcatgctccctaacttactgtccatgtgtgaggttcctaaagaagctgaggggcaatatgcaactcataccacctgctccttcataactgtggatctttttccagaatctctcctcaggtttctaagaccagaacccaagtctccccattcccagtcttcctacttgatcattttaagatgcatttcctctgattgtcctctgcctgatacgttgagatttctagaatcctgttgtaacgatcctgacttaatatatgaagtaaaatccaatgagattgtaagagcctttatttaagcactaccttttaggtaggctaccattgcaaacttcgcatcactaaaattggagggggaaaaaaagagctctgagtattctatgtttagtctttgaaaaaaattataccacatctgttgttaaaaattatttgcattttctttatcttttgtgtaatgcttttcaagaaaaaacattttgcagagcctgaactcgagtcaagctgttgggttccaacattggctttaccactttctagctgtgtgaccttgggaaagtcaaccaactttgcatagctcagatggcttatctgcaaaattgacaagataataagagaatttacccaatgacatcttgtgagcataaagagataaaatatgccaagtgcttagcatggtgtaaagcatatagacagtgaaaataaactagaaaataatctaaaaatataatatttttattatatttatcaacccttaaagtaacatattgttttgcttcctattcatatttccaattttcaaatatacaaaggaaagtcttctttaagcatttttcactaacagttctctgaagacttctcagaccctagcatgtgattgcaagattttttctttcttttttttttttttttgagaaaatcgtattggccttaaacaaagttgtattctgtttactaattaaaaaacttatttttcaaaaatagaaatggggtctcactgtgttgcccaggctggtcttgaacgcttggcctcaaatgatcctcctacctctgcttcccaaagtgctgacattataggcaggagccaccttacctggtccaacattatatcctttaatccaataaaaatgtggtaatgtttttaagagttagtatcagcttttatgacaattacatcttcacatgaagtttatatgtttaaaaggattgtgggggcaattgcaaacttgtatcgtttttattccatcacaactctggaacctcactgctgctttaatttcacagttgttggcttctctttctctacttgaaaaagtttctctttaccagtcttcataagacttctgcctgaactcccttcagtcatgcacctgtctcattttaatagaaactcagactttttacagctagagggaaccttagatatcaactggtcggcttgcattttttttttcttacagataagcaattagcccaggagggagaagaaaggggctgagaggatgaaagggaaggcggttaataggtttcttgcctaaggacatctagcctgtgatagagctaagatataaatttgcagtggaccattttttagattcatgccttctgaatgtccccagcctgtttggttggttgagatttctagattccttttggaatcctgacttgccagataaggcacagtctgataagcagatgaatcttaaaaacaattggatgggttacctgtccctggccaaagaggaatcctgtgataggttattacaaccatgtaccatgcgctttcagcctggtccagaactgatgccatgtcagtgcccctactcccaaagaccatacctccagatccatttttcaaattcttgagccatcaaagcacattcctgaagatctttgggttttgtagtgcaggctgctgtaagactaggttttcagtcttactaaaggtaattattaggtcataatcattgttcatgttctctagtcgggcactgtaagaacactgacaggtttttaaaatatttacattaaaattttaaattatcatttaaaaataatgataccaggaacctagatgtatttcctgtgtagtcagaagcaagtgcattgtcatattggctttggagtttctgttaagtcctagtagctagaacaaggtaagtagaaagtagaaggtgctgagctgggcgtgggggctcatgcctgtaatcccagcactttgggatgctgaggcgggaggatcatgaggtcaggagatcgagaccagcctggccaacatggtgaaaccctgtttctatttaaaacacaaaaattagctgggcgtggtgacgcacgcctgtaatcccagctactcgggaggctgaggcaggagaactgcttgaacacaggaggcagggattgcagtgagctgagattgtgccactgcactccagcctgggtgacagagcaagaatctgtctccaaaaaaaaaaaaaaataaataaataaataaaataaaataaaataaaaatgaataaaaaagaaaagaaaagaaagtagaaggtgcttatgaaagagtgttgaatggataggaaaggggttctcaaggttgactgcacgaatctagagcaactaaaaaaatactaattgtgaagccctattctagcatggaaaaaataagcttgatggaacctttggtataaatcaaatggttctatcgtatcctattaactttatagtcttgagtaattaaaaaaattttaccactattgtgtattctgtgaatgtttattttatttttcccatgaatatttattaaatatcagcagtgtgctgatgagtcaatagtatcaatactacagaaagattaaggaagatgagaactgaaaacaggtgtctacatatctcacaattaaaatggactgcagttttgcatttaagattctgaaatagtcattgactcgttcctaataaccctgcccaggatctcaccagcattagaaagattggagatgtttcagcatccaagttctgggatgcttcttgataatgatcagatagtagttgttttgaaatgtcaagagcgtttctgtggttcttcacatgttcctaatgcaaatgtttccgaagtaatttcttgacagttacagtgctttgagatgaagtgggaagggcttgtgattttgaagttggaggatcttggtttgattcctacctctgccatttattatctgggaaatccagtaccacacatgctgggtgctctggggcagttttcttatctgtaaaatgggcatatatctacctcacggggtggttatgcagaggcaatgaatgtgaaatgtttaataaactgtgaagtctcatatagatttccattcatcattattaccctctacgagaattttactttttccaaacttgagaggaggaagatattgcagtattttggtatcttctttaccatgggtctgtgaatgatgcacctgtgcatgttgttacatccttatagtggctaccacaacttcacatgttattcagtactgttatgttggtgaatgtcacaaaactaagttaaactgcctgaggcaaaaaaggaaggttattgaaatacatagttgaggctgggtgtggtggctcatgcctataaatctcagcactttgggagtctgaggtgagcggattgcttgagcctaggagtttgagaccagcctgggcaacatagggagactccatctctgcaaaaaatacaaaaaattagccaggcatggtggtgtgcctttgtggtcccagctacttgggaggctgaggtgagatgatcgcttgagcccaggaggttgaggctgcagtgagctgtgatcgtgtcactgcactccagcctcagcgatagagtgagaccctatctcaaagaaaataaatacatagttgaaaagatacagataattaggttgatccatttgagactgatttttttcctatgcagaaatagtcaaatattggcaatttcatttggttcaacctaatctaaaatggaggttcaaactacgtcaggccaatcttgtcttttttccatctcctggctctgagatgattccattcttaaacatgttcccctttgatgtaaagcggctgtcggtggctctggagccacctcctatcagatcacgtccactgggaaagaaaaagagtttttatcttaactattcccagcaaaagtttcagttgcatctcaggggctctgcttaggtcataaactcattggagaaccaaccactgaatcccgggtcatgatgtgttcccatggcttaggcttgggctgtatactcagtctttgagatcatgtatgaaggggtggagtccagagagaaacgggggtaattattgggagaatggtgaacgaggctgggatgcaaaaataacaggtgttcagtataccttatcagataaaattgactgacgatgttactttcattttatatgtgaagacacacttgaaaaagctacagaagtttctcaagagctggcagccctggggtaacttacagaattgaaagggaaaaagtattggaaacattaagaaaaaagatacggtgatctgtgcccatgtgaccatgttgcaactttaagtttagaaggagaacaggagaaagaaggacttttagaaggtttatttggatcctaaagttttcttatttggagcagagctttgtgatagacaggaaagttctggaaaatgagctgagcgatcagactacaggatcccttgagtccagtgcagtatttcatttttctgtgaatcttaggctcctactccttttccaatttacttcactccaatgtttatgttcctaagagtttgtctgttttccaagcactagtcctttgctataaggatggggtagagagaaagaagcttaaagagtttgcagacaggttaagatgcttctgtggagacagaacacatcttggtgcacatctgagtgtccttagcacttcatctatggacttctttcataaatggtagaacatgtatccatcacaccttattggattaattcagaaatgccaaatatatgtactctttgctgatggttactttgttggtctctaatttaagtcttatctctaatcacattagctgagaaaatggagacattatcattctaaaagtaagatggttaacttttatattagggcacttctgatttaggatagcactgaaattcagtgcaaagaaatgtaagtctttcctagataatgacagattagacaatttgaagtttcacttttggtcattagccctcaggtcatgcctgacctcaaggttactggaaacagtgagaaatgaatgaaaggaggaaatgtaattaccattctgtgcattgaatagttgagccactgttaccatggatacaacagcgcatttattgtccagatcttgagatccaagtttgtaagcaatatccaaggtctcctttaaatttatgtactatcagccaataacacatgaagattcctagtaactttgaaaataagtctttcctcactgatctactgattcacattaagtaagagcatatgtacttttgaaggtgttgaggaaacctgaaaaagacgaaaaggaaagtagctacacttctgttatgctggacattcttggattcctctataaaaatattctgtcttatactgtcagtgatttgcttgtcactttgggcccagttctttggtttttatgtcattaacaaggagaaaatttcctgagtaaaggttgaaaaaatcaaaatcgcttatttttattttttgagacaaggtcttactttatcacccaggccagagagggtctcactttatcactcaggctggagtgcatggctccctgcagcctcaacttcccaggctgaagagatcctctccgcttaaccccccaagaagctgggactacagacacataccaccactcacagttaatttttatattttttgtagagatgaggtttctccatgttgttcaggctggcctcaaacccctgagctcaagtgatcctcccgcctcagcttcccaaagtgctgggattataggcgctagccaccatgcctggctgaaatcatttattttgtcaggaaattcttaaagttgaatttaagaatgaaagtattttatcagaaatatggcaatcctacccacattttaatctcactagaaggggggtgatacatgctagcatgtacttccacactggtttaattttgatgtggggaagggcgtggaggatactttttgttgcaagaaacagaaaacccaactcaaaatggcctacacaataaagggtatttcttggcttatgtgagtaaaaaatactgaggcagagaggggttcaggcgaggtgcagtcagggctccagttctctttctttgtgttttccttgaccctactcccctctaagtttcacctttgtgtgcggtctggcttcccatatgattctgatatggctgccagggcaaatggggctacgtgtttccttgatcctatctagggggaatccaactttgagaaggttttagttatgttctcaaaagtattatttcatcacaataacttacagattgttagaatttctaaggaccccagataaagtcagctagctccccaaacttggcatatcatcaaaatcacctgaggaacttaaaaaagtatagagattcttaaatcaaaactcacccttactaaagcaggggtatgaaaatctgtgtttttttaaaattttattttattttactttcagttctgggatacatatgcagaatgtgcaggtttgttacataggtatacatgtgccatggtggtttgctgtacctatcaacctttcatctaggttttaaggctcacatgcattaggtatttgtcctaatgctctgccttcccttggcccccaccccttgacaggccccggtgtgtgatgttcccctctctgtgtgtgatgttcccctccctgtgaccatgtgttctcattgttcatcttccacttatgagtgagaacatgcagtgtttggttttctgtttgtatgttagtttgctgagaatgatggcttccagcgtcattcatgtccctgcaaacgacatgaactcattcctttttatggctgcatattattccatggtgtatatgtgccacaaccaacccaaatgcccattaatgatagactagataaagaaaatgtggaaaatctgtatttttaaaagtttcaaggtgattctgagggctggaccaattttgggaacatctgatctaggtaccctctcatttttcagttttgtaaacagacttagagatgaactgacttgccactgcaaatttcttcagtggcatttaaatatactgttaaatctctttcttttggatgggaatgttacaagctagctacaacaagaaggacaggactcttttaagtctgagggtgacatgaagtactaccctcattcctggccacctccttttttggccagcgtggcaggtcctgaacctctccctaaatatgccactgtttgtgtcttaattgtatgttttgctcttaccttggtcacctttgaagttccccccagaccctcctaagaacgttggattcattgaggtaaataactgttgcaggtcttctaatcttttctcacctatgtcaggaattcatctcagaacacccctgacacaacccactggcttctagagaagctgtctgttccatgcttggaatgggagtattgaaaaacttcatagctcatttcctttgtatcccagcctcaactctttgttgacctcattgggacttacagtttgttgatcctatcgcctcttcaccgtctctcaaatccctcacctatttactgcctcagcttatattttatggccataattaatttcacttccctgcatacatatgccctcagcagcttggcccctttatctggctctgttgtgcttggcaaggccctgatcctggttaaatccagttctccacatctgcaactctgtagctaaacatggcaggagaaaaacacaactatactgactagcctcgcttgaggtttctacattcatgaagccaatctcaagcttaggatttgcttcctagcctgtctattgcctctcttgcttccttatatcttctcctctttcctcaaacctctgacatcaccttctcacatgtagagtgagctttttaaaactgtgaaaatggaagcaaccagaagagaattccataaacttctataactcaaccatcatcgtttgaacttctgcttatatcttctgtctttcctcctattactctggaagaattttccaagctcttaagtccaaccatttcattcatgttctagatctcattccctctcacctctctgcaattgtcccctctttcttttatgaaatcctctgttccacattaccttctaactatcactctattttttcggttccactttacagtaaaattcttgtacagatgtgcctatatccactgtaattacctttcaatttttcctcaaatccatgccattttgctttagccctcatccttgatagattttttttggtcaaagtcactcatgacttccatgttgttaaatccaatgatctattttcagctctggtccttatttaactggttagcagcatcacacacagtgtatcctgacttcctccttgaaacacttagttagattttcaagaaactgcattctcctggtttcttttcttccttgctggccttcccttggtatctcatgcttgttcctgtctatatccctgacctgttttcatctctagctacactgcctccttggtggcctcatcctgtctcatggccctctttgaagcagggagtggtttcccaattcagggaggcggcatggactgtggtggaaagaacatcacatgtcaagtcaggacattcatggatcttgttcctgaagaaagaaggaaaaataggtacaaccatagagggccccaggctgctgaaaaggacccagggccacttgtcctctggggatagtctctgtcatctcagtccccctttttttttttgcgatggagtctcgctctgtcacccaggctggagtgcagaggcgtgatcttggctcactgcaacctctgcctcccaggttcaagcgattctcctgcctcagcctcccaagtaagctgggattacaggcgcacaccaccatgcctggctaatttttgtatttttgtagagatggggttttgccatgctggtcaggctgctctcaaactcctgacctcaagtcatcctcgtccctcggcctctcaaattacaggcatgaaccactgtgcctggcctcagtccccatacttttgaggactccatatttacttctttaccatgtacatactgacaactttcaaatttatgaatctaatccagaccactaccctatagtctagacccacatatccaactgctcatttgacatgtccacctggctggccaatagtcatctcagacttcacatgtctaaaattgaactcctgatctccactaatgtccaaacttgctttccgtgtggaatttctcatctcagcaaatggcttcctcatccttgctcaggcctcaaactgtatcctactttgacttttcttttgcttctctaccccatatagaattccttagaaaatcccattgttttgatcttcaaaatacatctagaatccaactacttttcaccatcttcacttctgccaccctgattcaaccgactgccctctcttgcctcaacgattgcaatggcttccatactgatttccttgctgtagcaacttttttagaacatcagtcagatcacagcacccctctgctcagaagctcccatggtttctgtcatactgaagttgggttgcccaaaaacagacactgagatggagcttggagtatataatatttattaagatcaatacctgtgaagggaaagggaggaagcaggatgggcagaagaagaagttgaactctggcagccgttggtcaacccagaggaagctctggagcacgagttgcctgttagagtgtcctatgtcaggctgaaatggccttgcttaatcactggatgtggcctgtcctggaaggacacgaccttgggcaggtggctttctatagctgaggcagaccccaaaggagctgattgcaggaagaaagtccttcctcgtagctggtccttcctataaggggaagctgcatggcacatctctgggtgcttcccatctcatgaagagtcaaagtccaagtccttactatgatctacaagaccctaaccatttggccttcacgtcacctccctgacctcatttccttctcctctccccatgcacagtgcaccaggtgcagtgatatccttgttttccctgacatggtgagcacttttgggcctttgcacttgctcccctttttcctgaatgctcttgcctcagatggtgcatgacttacttcctttcctcctacaggtctttgctcataggtcaccctctcagtttggccttctctgattctttcccgatctcttctttcctgatttactgtctccattgcacttaccaccatctgacataaggtatgtaacttagttgtttgtttatttccttacttattatcttcccttccctaagatgtaaatggcacaagggcagggattttcatctcttttatccattgctttccctagtgtccagaaaagggctaaataaatgaatatacattgaataaatgaatggacagatgccaccatgggtgctaagaaggggcatcctcagctcatcaccattccctggtactaccaggccttaattcctcgaggcccctggaggcccagtcagggtcctgatggagaaaaaggaaaattgctgtctctatcaaagcaagtggcttagcaacgctgtttctctcgatctgactccccccttttctccaccccagtgcctcccactcccgccctgctggtgattcccaatgcatttgagtagttgaatctgcatccttctttttaacttccatcccagatacttggttaccctgtgagaattcccctgtacatacagaatgggtcattctgctatttttaggacagatttgatacagtagcttttacaaaaagataagccaaagtttttagacttcatgttagtggactgtcattctgtatttaaacagaacacaaaagaaagctgtctgagaccatgacacagtgaaaacagccttgatcaaacaaaaggccctctttgaagaggggagtggtttctccactcagggaggcagcatggattgtggtggaaagaacatcacatgtcaagtcaggacattcatgggtcttgttcctgatgaatgaaggaaaaatgggcacagacgaagagggcccccgactgctgaaaaggacccatggccacttgtctcctgggcatagtctcccccatctcagtccccattcttttgaggactccatacgtaacaaataggttggaggcaggagaatgatggagttccacacaaagatgagtagagaagttgggaaataagccacaataaaagtgactaaattatttgagtgctttctataccaggcattggcctaagtgttttgtaggtattagtttacctacttatgtagtaacagcaaaaattttatggataaaggaccaagacaatgacaggtgaggtaatttgcccaaagcaattcagttactaagtggcagaaccaacatttgaacccagaacccttatttgtatatgttatcactatggataatttggagcaagtggaagatagtcctctgtacgtaaccaaatgaagcctcatttaatttctcatattatgatcagataacctcatttcagaggctggtaccattgcgacccaacttttggacatttttttgctactcttggcagttcattcattcattcattcaatatatgttgcagccttatcatgctctaggcatgatgtaactaggtactgcagagtatatagacagagaccctcaacataggccacatccaaaacaacttactgtcgaacagagtatatttccacttccttctagaagactagaagactgtactttttaggtacggattgatttctctctgctgggtttctcctatattactatttcattatctaggaacaccttttttttttttcctctataattatgtgtcttttaattcaaaggacccttacctaatcagagagttcaattttaaccttccgttagggacagcagtcatctataaattttcagaggttgttgttgtttactattaatgaaaaaattattaagttctcttatttaaagtcactgaagaaaaaaatgaacaaccaagtgagagctgagtttctttacttcccggagaacactgctgttgtagagatggagaagacatttcctatgtgctggatgtgcttaaaagtctcttggtcccaaaatatctctcactacggccaaagatctctgctctgtcattgctaaagtcagttcttcagagtaagacattctttcctcctgaaactcctattacaatgtggaaatgttcactcctgtagggtaaagtagttagttgagatagtaatgcacagtaaatgtttgtcagagcaaggttcagagagaaggagacacaaagctgctatgttttaatggggatgaaagagggaaagaaggtactagaggtgtgatatagtcttgaaaataagccaacttccttttctggggaataaagggttattatgcttgtgctttttcttagaatggctttatggggaatttcagctgtgatctattaggaaggcctcaaagatagaacttaaaagcttctagtatggctgtccttcctctagttagcaattgaaactgagttgttacaacaaaaggaaaagttgtccttaaaagcaacacatttgcaagactccatcaactattccttggggattcatcagtgcctggtaagtttgagaagagacccttggattttaatgtacatggcagttataatttgtctagaccataatgattactattaatagggaatcctgtttttctatttttaaaaaaatttagagatgggggtctcactatgttgcccaggctggattcaaactcctgggctcaagtaaccctcctgcctcagcctcctgagtagctgggactaaggtgtgtgccactgtgcctagctctgtttttctttaaagttactgtataataaaaaaagaatttgcaaatgcataaaattgaatatacacatgtcccaagtcaattgtcaaatgattggtttttatgtaccaaaattctgcatttttttttcaaggtcacttctgatataagaatttacttcttccctaatatttggttcagtgaagtgttgaaagaatttgctaagtaatcattgaaagctaagattctagtgaaaaacaaaatgcatggtttaaaaattgaacgtactaactgaaagacagtggaagttagatgcttcttgctgtaaataattaaacccaacagtgcagacgagagaacatggcaccaagagggacttgggctaagaaggatcatattgtattgaacactttcgtttccctgtaagggaaatcaaaagggtctttaatagttgttgctgattgtgaatatgtgcaacaaaatcccactgtaatccagatttatttttcaagcattttgctgtgattgaaggaaggagaaagggataggaagaggatggagttttattaaagctgtagttacttcttccctttaggaggtctaagtgtgacttgtcacagtgacctgggactttgattccctccagggccttcctgttctatgggcacattggtggatcaaagacaattgacttttgttttgttttgttttgtttttggagagaagcagtggttctgctaactcagaacaagaactacaagagtcatgtaggatgtttttctgagtttctctaacagtgctcgttttttttttttttttgaccgccccctcttttccttttgaggtggtgccaagtggtcaaacctccatttttctatctgtaaaaaagagaatcggcctttatgaagtgctttaattttaaaaattaacataggctaaaattgctgtgtgtgtgtacagttctgtaaattttagtgcatgtatatatttgtgtagccacaacctcattcaggattagaacagttcaatcacccccactaattcccttgtgctactgctttgtagtcacaccctcccaataaagtgtgttttaagttccttttttggaaactgactttcccagatgaatgtctctgttgccttttatttgttcatttttatttacccagtgttccttgctcatttttgaagtaattcaaaatgacacacatggtaaggtgcaagatgtctttcgcagtatacggaaaaaactctggaagatgcagctcttcagtatagtcataagacaaatttcccaactggctgggctagatggatcgtaagaaannnnnnnnnnnnnnnnnnnnnnnnnnnnnnnnnnnnnnnnnnnnnnnnnnnnnnnnnnnnnnnnnnnnnnnnnnnnnnnnnnnnnnnnnnnnnnnnnnnnnnnnnnnnnnnnnnnnnnnnnnnnnnnnnnnnnnnnnnnnnnnnnnnnnnnnnnnnnnnnnnnnnnnnnnnnnnnnnnnnnnnnnnnnnnnnnnnnnnnnnnnnnnnnnnnnnnnnnnnnnnnnnnnnnnnnnnnnnnnnnnnnnnnnnnnnnnnnnnnnnnnnnnnnnnnnnnnnnnnnnnnnnnnnnnnnnnnnnnnnnnnnnnnnnnnnnnnnnnnnnnnnnnnnnnnnnnnnnnnnnnnnnnnnnnnnnnnnnnnnnnnnnnnnnnnnnnnnnnnnnnnnnnnnnnnnnnnnnnnnnnnnnnnnnnnnnnnnnnnnnnnnnnnnnnnnnnnnnnnnnnnnnnnnnnnnnnnnnnnnnnnnnnnnnnnnnnnnnnnnnnnnnnnnnnnnnnnnnnnnnnnnnnnnnnnngaagtaattcaaaatgacacacatggtaaggttgcaagactgcctttcctttattataacggagaaaaaactctggaaagatggcagctctttcagtatagtcatataagaacaaaatttccccaaacttggcttgtggctagattggaatccgtaaagaaaacacactcaagaaatctctcttgaagaggaggacagaggtttattttttatttaacgatttaccccttgacacctgggaaatgattagttgatgttttcaaagaagattaagtcagtgtggttaattaactgtggtaatcaggtgacttaaatcaattaactccttgttaacaatttccatcaattttgtaaataaatgactaaatcagtaaattgtactcttaagattaaaggctattttctgatttatttttttgatgacaaattagagtgtttccttctcatctcattcactccctgccactcttgctcttaatcataagccagttttagtttgagaggagcacaccagggaaacttttaatatatggttttaaggaaaagtcaggcttaaggacacctttgctccttcatctcagcacatttggaaagaatgatttagtgagagcagtggttgggggtgggtgtagaaagtaatcctgaaacacactctaggataagcttttattattaagtcacttaatgtcttgttttatttattttttctaagttaaaactcgatgagggatataataaaatgaaacagggtttggctcttagctaaaaataaactttaatggatatcttacatgctctatttagagggaatttcacaaaatattgggatatattgattgcattcatttgtaaagcttgattgcattaaaaataccatacaaatatacaactaaaatgctgttactttttagaatctttgtaatagaaaattctcttccctgcttacataactttattatgtctttgtctccaatgaaatatgagctggacaaactaacacaagaacagaaaaccaaacatcacaggttctcactcataagtgggagttgaacaatgagaacacatggacacagggaggggaacatcacacactggggcctgttgggggttggggggctaggggagggatagcattaggagaaatacctagtgtagatgacgggttgataggtgcagcaaaccaccatggcctgtgcatgcttatgtaacaaacctgcacgttctgcacatgtaccccagaacttaaagtataataataataaaaaaagaaagaaatatgagctggaaaattgtaaaaccgtatcctatgcccctgaatatgccattgcattctctgaggattttcattgtaggacagatgatataggtttatttatggtttcttcaagaagggatatttggcatcttgaataacttttgaggagttagtaaatatttatgtatttgaaaaaattctatgctatgctcacattttataaagagaaaatttctatggcttcctttaaggtattaaggatagattaaattgtgaaactgagctgaagccactgttgtaaatgtaaatcactggctgccaagcaaaattctgggctcttcctattattatagaagctttctggccataccccaactaccccttcccaacttccctggacatagttaacctgtggccaaaccctttctggtactgggacatggtctggaatcacagctcagagatttagctcgactgctttccagatgtgcacctctgaagctctctgagcttcagtttcctggactacacaatgggtgttagtaatttctaccttacaggtacctgggaatatttaaaggatattgtgaacatgcaaggtcctggcacttggtgagcattcagtaaacatttggccccacagggaacctgatattaaatcattcatggttgaccagctcttggttaggtcatgcagcaaagcagccaccatgctgtggttttttgaaataaagaaaccacttgtcaaattctctatccatagaaattgctgggggaaaatacagctttttaaagcagatgaaactactagacaaaaaaatgttagaagacaggccttgtcacctgcctttcttcccccaagaatgtttggttcttcacctcccaggtcttgaaggcacagatccaaatgtaaagttgccaagaagttcaaacgttggtggacctggtgtttccattttaggtgtcctgtgcatgctttctgtaacttggttttatgcagaacttgctgatgatgtctctgtaactctgagaacaggaatgatggaagcatgggtctgagtcgaggtcagatgtgtcctctgggcaaggagaaggatttgcccagggaagactacacttgaagaggagcacttgattttgtgagaggttttaggcagagcatgtaagaatcacagtcaatgaagagttttctctcttgcaaaagttccttattatttcatgaaaccacagaaaggtcagtgagatgttcaataggtgagaaagctgtcaagctagacttggttaataattacagttaaaataatcactgatgtatttctttcacacacgtttatcgccagcatattttatcaggaactgacatgcatagatgaataagacatgcaaataaacaattgtgctacagggtgagaggtctataatagaagtttgggagcacagaaaaggcagtgatgtagtcacctagacgtgagaggaccaagggccaaggaagaccgcacagattgccatttgaactgaatcttgaaggagttgggagagtggactatggaggattttgtatgtcaagctaagaagtttggtgcctttgaagaaatgtaagctgggaagtacaatgctcacattttcattttgtaaaaagaatacttgctgcaatgagagaaagcagatgaactagttaagttagaggattactgggattatctgggtgacagatgatgagggcagaactagacttgtgcacttggaagtgatgagaaaaggagagagtcaccatggaacaaagagaaagcttttatttgttgccatttttgataattcttgttatttgttttataagttggtatgttttatttatgggaatattagacatgtcttttcaatgtatgtgtatgttaattacattcataaatattcaacggtttttttttttaattttcctgcctgaaaaatttccagcttgctgtctgtctgggcatagcgtgtgacattttctttgttttagttcattgattcctagttggttcatctccctcagggaacctttggaaacttatagtagcattttttgattgtcacaatgcctgagtatccctgccagcatttagagggcagaggacaggaatgctaaaccgttgcaatacacaggatagttccatactacaaagaattgtctgggcttaaatgccaatagtgcctctgttgagggcccatcttggttgataggaagtgaatagagaggcaggaagggatgctattggtaataagagcagtcatacactgaaacttattatatgcctgatatatagtcaccatagctatagcatttgttcttgtgacactccagggaggtagataccattactattccctttttactaatgagtgaactgaggcagagtaggatatttggccctgggcctcacatacttaactctaatactctgtttttcacatgctttactttcttgtaactttaaattaataataagaggaaaaggagaaccacacttgctttgtgctttactgtttgttacatatcagaatatacctcctggaaacatttctgccagtttagtagaatattgacaagttatcacctccaagcattttttaaaatacggaaaatatttgaagaaatttttttaaaattaggatgcctttgtagattggaagaaactcttatttgatggaaaaacagttggtgctccataaatgcctggggaattgaattgactctggaggcacttagtgtctttagagggtgtcaaagatcttgcaaatttattttaattttaattttaatttttttacttcacataaaagagaatctgcctcacgtatgatctttgtaatttgaagacgtgccagggacattgatgaagaatgtgactttttcttggacatgccttgcacttccctgtttctgtgccagttctagtttgtttcctctgtgaggcgtcccctcccctcagatccatctatctgtagcttaaatgcacctttctctacaggacctttcttgatatccactgaatgttatctgaacctctcttacagcatgtctcctcatgccatgagatacaattatttgtgtgtgtattttatctcttcctctagaagagtaccacattttgggagaggcatagaacaggaccactgatgctaagagtatgcctagctcctctggtctcttgtgtctggcacagtgtcaggcataagcatgcactcaagaaatttttgtttaatagaaagtcaaaagaacagcatgtgttatagtaaagcaactccatcatgttggggaggtaataggcatgctctactctgggctcctgtcgcagagaggattttgtttggcttgaacaagacaaacatttaattctctcttacataaccagcagtggaaggctggtctggtggttccatgataccattagagacacaggctccacagtcctctgctggtgactcccattcctgaagtcacctcattgtccaaaatggctgctgtagccatagccatcctttctctatgccaggtagtgggattgcagaaggagaaagaaggacatgccttctctgtttaaaggagactttccagaagtcccacacaatactactgcttgcatttgatctcatcgattaagacttagtcctatgatcacatttggctgaagtttggaaaatgtagctttttagctcagcacatagttcacctgagtaacactgggttctattactgaggagaaagaggcaaatgaatgttaaagtatgccatgactgcttctggccaaagctggtcgggtgacactgcacgtcttcttttcagctttgaataccacattttgggagaggcatagaaaatttgaaccttatttgaaagagagaaacaagaatgatgagaaaactggaaacaatattacgggggaatgatggaaaaactggagatgtttcttttggacaagagaataggggaacaatggttagctctccaaatatttgaggaactattatatgaagaaggataaaacttattctaaatgactctaagagatgggaaagaaattgtagatatatcgtgtgcaccaaaagaatgctggaatttgactttagggtcacttttaacctttgaccttatatagtacagatgcataccatatagatgtatccataagtttgtgcttttgaggttaaaatattgcttattctctggttacttcatattggaattctctttactgagggttgctatggtgacaacacccttagcagtctgcattttgaaaagctttggacttttccttttgtgagatgtggtctctatgtttcccccatgcttggcgtttttcaaaatgtcatcaagtcagaaacaatctccaaatttatcagagtgaagtgaggagaattttaaaattgtagatactaataacaggggttagtaattctatattgtacaactcagtgattcaataaatattgtcactatcaacttctttggattaagatagctatgtttaggcaactggttagtgttatttagttaagcatgtatttttaaattattactaaatttcttaaacacccttgaaatataattgttgaaaatgtcttaaaaacacagctagtatcaaccagagaaataatttagcaaagagttaatttatttcactaagtagtgatatatttttgaaagcatatggaatagatgtgtgcctataaacttgactttgtgaattaagttttatttttctagttcagttttactttgaatatggatatgttgttgttttgtgaatcttagacatcagaaagatttagttgggaagagaagtaataatgtaaaataaaagtaataataaaatactcaaatttctgtattaaattagcttttgggggaattagctacataattaggttattttaatagtttttcaaactgggttgcagatgatgaatatagaagagctatatatatacataaactctcatataagcaaatatatatgaagcaaaaaaaaaccctgtagaattgagagggagacaatatttggagttgaaaggatcagaaaacactggcctaaaaatagtatcagtaatcaatttttattaaacacttactgatatgccagacccatgatcctcactctaccctcatattaatgttatgagtaagagctcttattatctccgtttttagatgaggaaactgaggcacagaaattaaaatggctgtcagatagtaagaggtggagcagtggtttgaatccctagtatatgactagaaggacttcaccctggacagttacttggcttctaagcagtcttcgcgtgctcttccccttccttgcccttctgtaatattacagtagtttcccagtagtatgcagcatctggctattcagactttgtctcttaaccttgtgtggaaaagctgttgacttttagacatgctgggcagaatggaagaaggaaaatacagactgttatacttggagaaataatgatttcatatgtaagagtagttgaatcaataggtggacaaatttattgaaacttcttgagttaatccagtgatggtaaacgaacacatggccaaatgagcactctgtaaagcatgccttctggaatgcgtattgtcttgtcttgtctttttccttccttccttccctccctcttcctccttttttcttttctttctttccttctttctttctttctctctctcttccattctttctttctctctctctttctttctctttttctttctcccttcccttccctccttccttccttctttcttttctttctctctttctttctttcctctcctcccctactccctctcttcctccttccctacttccttccatttctttttctctttcttttgctctgggttcgctctgtcagtcaggctggagtgcagtgcagtggcatgatcatagctcactgcagcttcaaactcctgggcgcaagcgatcctcccacctcagcctcctgaatagctaggactacaggtgtgcaccatcacacctggttaatttgttttgtttttgtagatactggctctcactatgttgcccagggtggtctcaaactcctgggctcaagcgatcctcctgcctcagcctcccaaagtgttgggattacaggcgtgagccaccatacctggcctcaagtctgtttcttgatcagtaagcctggtaatattgggctgtcttgtgtacatatatgtagatgtacatgcatacatacacatatattccactttgggtggaatggatgaatcttttgtttccagtggaaggagttctttgagttacaaatagtagaataagggctttcagtttaaacagaacccacatgagtgtttcattaatcatgttcacgtgttaatggattctcttgaggcctttggagtcattgcttttgcaatatttccttagggcctttttcttcagtccagattaatctaaaatatattgcactgatccagagatgtcaccaaattctcctgaaaagccctttgactgtatttgggctggcctgtgctgttatggaaaaatgctatctcactgctgatgaggtttctggcattagcaaagatggccttatacatggtaccacaacctatgtggtacgatgttaggagccctgataagatactctgttcccctacaatctgctccatcaagccggtgaggaaggtatgtaggcattaggaatgcctaaaatgccacaattagaaaattcattccttggagggcttctgttttctgctgaaagtgcaaacacccgtagaaggctttaagaatctctcaaacgttcccgtgaataagttcacctgggagcagatttttggggtcagggtcgtgagccatgaaaaccctggccatgtcatggggatctgagggagagagaaggaaaggatttttagacagcggtgggggaagtcaggcggaggtgggaccgtttaactagataaggctctaatcgtctcattcctggactatcagaacagccttttaagtttaagttgcttttccctctttgtaaccttacccaccaaactttgtgaagtgttgagtgcttatagtaaacagagtgaacataactcttcccagggaagaactggctgactttagtttcttggtttctggaaggagatgggatagttgtattggcttgcttgaggatagccaaatggttgtggacaagagggcttgtttcctgacaagtgttattctgcctgaagaatacaaagataaatggtctaccagagcttcagtacctgtttgttgcgttgcatttagtttgaagtgtttgctctgtgcagtggagaatactttggagggtggtcaggtctctctgtttcattactggaaaagaataggagtggggtcatggcaatggggtatttcattcctctgtgtgtgtgtgtgtgtgtgatggagtcttgctctgtcacccaggctagggtgtagtagtccaatctcagctcactgcagcctctgcctcctggtttcaagtgattctcctgcctcagcctcctgagtagctgggattacaggcgcatgccaccgcgcctggctaatttttttgtattttcagtacagatggggtttcaccatgttgcccaggctggtgttgaactcctgacctccagtgatccaactgcctcagcctcccaaagtgctgggattacaggcatgagccactgcgcctggcctcattccttcatttgcaggggctggatgtctaggtttatggaaatctattctcattcaaacagaaataaggtaacaacttaagataataaagtttttctttgaatgaattagaaaggcattattgtatgttattttagtcaaagaatatttttgcatttattgcattcttctgttatataagagaaagtttagagaattaggatagtgaatatttttaatgcttgttttttttttttttttttttgagatgaagtctcacttagtcacccaggctggagtgcgatggcactatcttggctcactgcaacttctgcctcctgggttcaggagattctcccagctcagcctcccaagtagctgggactacaggtgcatgccaccatgcctggctaattttttgtatttttagtagggatggggttttgccatgctggccaggctggtcttgaaatcctgacctcaagtgatccacccaccttggcctcccaaagtgctgggattacaggagtaatccaccacacctggcctttcatgcttttaggaaaaatttgaaattcttttaaacgtgggacctggagaatcgctgaacttcctttttttttcttctattgagacagaatttctctctgctgtctatgctgattacagactcctgagcttaagagatcctcctgctatggcctcccaaagtgctggggttacaggcatgagctactgtgctggccagactttttgaatggaaaactttttagcttggtttcagttgattaaccctcaatttctttatgtccttaattctatggcgtatgccaaggcatgagttgaggtcaacagaaatccttttacgatgatagaaagataacgatgtccaagtttaatgtacagtataatgacttaaggtcaattctaggaaagcctgtatatttatcatcaatttctttttggtgatggaattatatacctacagtatttcatgtaaaactccagaggatcacctgaaatatgaatgatttacaatagacaaaataataaaaatgctaatcgtaggaaaatacaaaaatatataaacaagaaaataaacataaaaatgcataaacaagaaaatagcaagttgggagcaagcttgcttttgactctagtttgacctgtgtttctcagaataaatcttgattttcactcttgcccttgaccgaagcatcctaccaagcaaggtggcttagattttgaaagttttctctcagtcagatagtaggggaacaactcttagaatgttagaattagatgagtagtgggaatgccctggaaggaaccacccttcatggagggacggctgtgcttcaggcattgtgccagaggtttacagggacctctttaatcctcaccgtaacctgattttgcaggtcagaaattttgtaggtaagaaaactgcatactgtatcagtttaaattcaagttcatcaagctaaaccagttcagtaacaaatatttattgagtgaaggttcagtggtaaatgagacacaaacagttcctgccctcatggaacttagagtttggaatgacatagggacagtcagtgctttgccagagttgaaagccatgcatctcttggctttctggtgattgctttttccattggtattcttattttagccattcttactgaatttaatttaaattttacttaattattataatgcctatggatccatgttctgcatattagctcactcatactcatccaagactgtaactataggtacccaacacccagaattgagatggccactgaaaactctattcttgaccaacactctaatataattttattttctttaattgcctttgtaaaaagtataatacaaacaaaactccagtaagcaaatggctttaattatttgtgtgtcagttagtagagattttattgtatatattttctggtatagtttattactgaagccatacttctttttagcattaaaattctaaaattttatatttataatagtgacaaaggtttttactgtaattactaatgatatttaaaacacagattaggcaaaatcttaggaaatataccctgctttttttccttccatttctggcaatcactgcagataaacttgtaattttattcatgttgctattaatatggggacattataaattcatcatgtctgtgcagaaacctgaacaccactttatcacacgtgggtatcagttggtgacaatgtaatattgttgattctgtgtcaacaagctattgaattgtttcaagtcatcacaatcacattataacgtgaagtgataacattgacagagcctgaaagtggtttggagacctcctcatgctatttgagcccaggcataacaaaccagggccaaaggactcctggtgcaaagataacctgctggtgaggcatgttctgaagttctttttgctcaatctgttaaaagcaatgcagtaggggacacacaggaaatttaatgtcattctaccatgagagtatttgcaaatataatatgtccttctttatagatttacaaggcaatgatttggcattacatttgtttctgtatagggaaattaaaatcatgattatgctatattagcaaattgcttataaaacaaattacaatttttgattgtaggataagatgtactcttgtagccccctccctccctccctccctccctccctccctcccttccttccttcgttccttccttccttccttttcttccttccctccttccttccttgtagatctctttgtcatcttttggacatcatcttagtttcacacatatattctaacacatcatatatagttcgtttattgagggtaggctgggtactaggaggtcctgtaacaggccctgggaatacagaggtcgcttagtctcatctgttctgttccttatatttcatatatccaggtcgtggcaggagaattttgaactttctgcttataaaatcatttccaaggcataacttgtcactaaaggggaaaaatacaaaaatattgtgtaaaacatcagcaaaaccagtttttaaaaaagagaatgacatattacatttttattaaaaatgttgacttcagtttactagatgattaattatcagtacttactgcccaagaaaaggcttttaaacttattgttggaaatcttttggcactcttgctgcacaatatttcttaatagtttaagaaaattcttactctgttggcagaagccatacatgcccatcactaaatggtcaaggttgaggcatgcctgtgtgtgcaactcagttattcatctaatgaatgaactgtggataaagtttagtgtttgtgtgaataacaatgcaatgagcctcaccatcaccaagcataaacatttctgataagagttgtcatcagagttgcttattgatgttgaagcattggtttcgttagagtaaactatgtatatatatgtgtatgtgcatgtacgtatgtgtgtgtatatatatatgtatatacctgatctctactttctgaaaatttacacatttagaatgggaggttatttagttcctagcatgtaacgtgtgacttataaacccacttagcaattacatactgcttcaatctgaatttgggccatagctaaataagggtgagttgccattttgtaccaaattgaggttaaggtgcaagatgccaggtgtcatttaaaccaaggttaggatgcaagatgctaggtctcatgaaatttagtgtctggacactgattgctaaccttgacatctctcctttctgccctctttttctctgtctccctttttctttttcctcctatttttgcctcttctctctcttctcgtttctttagagcttgttgttactattgcaatagtcaagaactaaataacatggagttagggagaaggaatacagcaaggtgtttataagattcagtcaagaaggtccatttagtagttataaataatttagcctatgactatggggaattaccaaatctaccaattgagagtcaatttcttctcttcttgttgctattgtcataatttgcagtatcaaactattgttcacttgataacctggtgatctcatctcattattaagatgaccaaaatgaaagtgatgcttatagctttaacatatgtcagtttgatttatggttcaacacttggacctaattaatcaggaaaaccctaatttgatgctgtctgtcaatgctagtctgaaacaccattcaaaagccttaagcaagaaagctgcctttctaaagtctctcttgtcatttatttctcatgaatgtccattttcttttttagtgtttgattccactcaaccattttccagtaatttatattgctaatcaaaaagctgtataggaattctctgggtgactaagactggaaatgtgctctgaaatgggaatgatttgtagattttgcacagggtgtgttaaatcatgaggtgctgaagggcatgttattcttgtaagtagtttgattcattgggtccttatttacctgggcaggcaggccatcttaaattttcttctgtttggatagtcttcttttcaacatcctataagtgtagctcttttaccatgaaagatgtaaataaccagttagtctctagtggggattgggggcagaggagaagaaagtcttgggcttagtttccttccatgtgtagggaaggttcctctccaggaacctcagtgacttagctgatagaggaggcactgcatgagctattcagggggagcacagaaaagactggtacaaatacactttcagtgctttgatgctggctaacaggaagttttcattgctcagcgttcttggtaaaaacttggacattcttttgaatgtttgagcgcttaagtgattgtcaatttatatttttaattttttgtgagtgtatgcagttgggatggggagaggacatttggagaaattatttttttgctctgataatgaatacggatgggaaaagtttgcaccataacgcagaggtgcttatgactgtttttcatagccacaatcctttacattaatgatgaactacttgaggatttcagatgcttgtgtttttctagtgtggtcccctccccttgaaggggtagacctgtggacgtgtgatggaatggagcattccagggtgaaacaggccttcctggaaattagattctttatcacactcccaggggagttcatttcaagttgctggtactagcagtggcagcgtgagattgcccaatcctaggtgctcttattgatgggtgggaaggagtgggattgctgttcaagaaattttattatctttagaagggaagaatgtattatatttttttttagatgatctctttcatgtgggctaagataattttgagctctgactgtccaagctgcttagaggttctgagttgttctccactgggggtggtactgccactttcaagcggcatagatgtgcctgggagtgtttttgtcaccgtgatgtgggggagcactactggtgttccacaggtgggggccagggatgatgtacatactgctttgaccaggacagttctgcaagatgagtaattgtcccaccccaaatggcgatagcgtcctctgaagaacctctgagaagtgtggctttgcttataatgttctgtagtgctgatggactgcctgattgtagaggtgagaggtgcataatgaaaaaacaggtgggatgtaagagccttgggggagaaagacaggtgactagtgtttaaatggaaacggagaagggtagctcagttataaatggctcagtttaaatctctcattgctcagaattgagaggctgctcaagtagtacatctcattctgctgccatttggttattggaaaggcactttattttaattactaagcaaatatttaagtaatctttgagatcaactatcttgagagctgactggattctgtggcctggatactcagacacgtccagcttggagaggatggtgggggctggtcactaggatgttgttggcaatgccctaaggcagcagtccccaagctttttggcaccagggactggttttatggaagacaatttttccatggacagcagggtggtggtgggggagggatggtttcgggatgacactgtttcacctcagatcatcaggcattagattttcataaggaatgcacaacctagatccctctcatgtgcacttcacaacagggtttgtgctcctatgggaatctaatgcagccactcatctgacaggaggtggagttcaggcaataatgctcactcacccgcctctcacctgctgctgtgtagcctggttcctagcaggccacggaccagtaccagtttgtagcccagggactggggacccctccctcatggaacctgttcgtagtttgccatgcaagtggacctgctttggatgcttctggggcagctggaggggctgcaaggtgagacccttctctgctagcagcctcttgcctgcacctaccagcctgcttactgggctcagtgttggggtgaggttctggggattgaagtggagctccaagctcttttcatggtcaaagtctgtatgctagttcaggctttacctactcagagtgatcttcacttttaatgcagttattgtctgagtaatcaccctcatactcatttgataggcactctttggcttggcactcaaagctcttttttctccatcttctcagccttgttgcctaccactctccaagaggtcaccactgcttgggtcatacttattagaccctcacccatgctaagcttctgtcaagtttttgttcttttttttcttagagacaggtttcaccgtgttggccaggctggtcttgaactcctggcctcaagtgatctgcctggcatggcctcccaaagtgctgggattacaggcgtgagtgatcacgcctggcctgtcaagttgttttgaccctacacacaaagcctggtctccctcttcaccttcccaaatcctgcttattcacaaagacccagtgtagtcttataattctttgtgaagacttctctgatgacaccggcctgcagtgttattttttttcgccaaagccagttagtttttattatctccattgcttatttggaaccaaattgtctgttgtcagaggcatagctttggaatcagactgcctcagtgtaaatctgtgctccactacctaatagctgtgagatttgttcaagccttgttgtcctcatctatgaaatggggccattgataccatctcacaaagctgttgtgaggataagtaaggtaatgcatgggaagcagttaaaatattgctggcaagttctgggtgaacaaatgctgtcgctttgcaggacatgaaatgatgaaataagtacaggctctggagtcacacaggtcctggggctaaatcagacttcgacattttctacctttgtggcccttgggggagttggttaatgtcactgaggctcaggttccccttctattaaataagtataaatctcacatcatacagttctgagaggatccagtggatatgtataaagctttatatattgtataacacatagtaggtactcagtaaacaatatcagctgttgttattgcatggatatttaatttataacatataaatcacttttgcccccaataaacttataggctctgtcaaaaaaggaccatatcttatttttcttttttcttccactgatcctaggacaattgcatatagtagttatgaatttatttgtggctttagtgaatctggcatcatattcttttggtccttatttatttattcatttatttttgcacttaaatgatgtgtctacatgataatgcatcaatttgcattgtgggttttgtccccaaatctttgacttcttgaaatgtccttatagtattgttttgctctaagaaaacatcagggctctgaatcaataattgggacaaagcagtctattcagcagtttgtaaactggattaaaaaaaaaaccaaaagaattcctgccacctatttggtgatctgtaaggaaaaccagacagttaaaatgttgcacagaaagagactagcaggttggtttgctgttcctgtcttgtttcagtttcattaactaaatccttgactattctatcaatttgacactagacagggtagagtgctccatacaatttgttatccttggctatcatcactatagtgtaaagttttggaaataagcaggtgaccctaaatcttcaaaaggggactggccttgtttatgtgggcaaggtatgggaattgtagtgaactgtcagccaacttatgaatatcagaaggatgtctatccatactaaaggaatcaaaattaagtacagaaaaagtgaagcaaaaattatggataagttaaggaattgcctcttaaatttgtttgtttctttgagttcagtgaaggtggaactattaaaatgtgatttactcatacaaatttttaaaaagtggactgtacctcctcaggtagaccaagtgtttggaaggaccagcatgtgttaagaggatctagcggggaaataggatttgccacagaaattaccttactctgttaactttggacaatgttccattgactaccacttgtctttgtcttataagaatagaatttacggaaggagaaagaaacttacaaggaacgggtaaaagaatgaaactgctattaacatgactcaatgtttttttctttctttttttttttcaaaaaaaaacttctagatattccccttttttcagattattccagattccatttttctttctatggatttaagatggtaaatttctatttaaagtctcattgtttgctctgatagctttctacatctctgatatataatggtctcagcaggctgagttttacaaagagaattctacacttcctgacgaacatgcattagctattccataagcacccggtgctgtgccagaggctgtaaatgacacagaggaatgttctcaatccagcgttgttccttgctgtggaaaacaaacaggcaaatgacttctcttctctgggcgctatctgttactctaatatcttatcttaacacattcttagtccaacacttacccaggaagcttgggatatggctacttatgaagaaaggattactcttttttttttttttccccctagctttgggctctttatgaggttggaaaacaagtttattcctatgtctaataaaattttactaccgatttcaaaacgcttaaattttttttgcattgctttcaattgctgcaatttttcctaagcccaataattttttaatgctatgttagtcaccaagtaaactactctttttctccaactgaagtatataagcactatggattctatgccagcccaataatgaactcaattaatgttaattgagagcagctttgggggaaaaaatcagatttttacattcattcttgagtttagtggaataaacttttttttttggtgaaagggaacatagagtagtggtcaagtagcacgaatgctggaatcagagctgtcagattcaaatccttgctttgcacatatttgctgttggatctttggcaagttaccgaattgctctgtgcttcaatttatttatttgtaaaatattcataataacagcatctatttcatagggttattatgaggattaaatgagctaatgttggcagagcacttagaatggtgtgtgccatttaagtgctatttgagtacttcttttcatctttgcaccatctattctgattgatgggacagacaggggctagtgctggagagatagggtgttcatttggttctgatggttcctttgtgatgattgcctggttcttaacaaaaggtttttatttcaatgtggattgtattttcctcctttcctccttggtttttactagagggattttttttttttttaatcaggcagcccccaaaccagagaggctcctggagaatgttttaaagttacataaatgattgtttgcaagattacttcttggctaaaactggattggttgaatgtggcagttttgagactattttctgaacaaagttttaaagctggctctatgtagattttttttttctccctgtgggtggctccaatgtatgaaatcatccccttagctttttatttttttaaatcttcaaataaataacaaaatgtagataatatctagataaaacttttggagggcttgtgagtaaaggctacttatttaaaacaaaacactcaaaataaattgcatatagactaattgaagtaaggggcacctgcaattgttattagacctaatctagaccttttcactagtggtttatttttggtttatttttaaacaacacatattccctttatgagagaatgagcttctgaggccagtgaagcattttggctgatggctgagaggtcacccagcaatgataaagtatcagtttgttttttctggagagatatttccaaacaatagtcatttgggagttataaacaggcatcaaagttactactgaaaaggtgaatttgacaaatgaattatagatctgttgataaattgagtaaattggatttgatatattagataatggagtgagatcaagtgtgaaaatcactacctataaaaattacttaattgcaacatttccccatcagtttcatttttcatatgtgtgattttaaataattgactttgaagtgttttataaaatgacttttgggtctctattttgtgttcttttcatgatgtgtttaacttggtattttagtttggcaaaaacaaacaaatgcccccaccccactcctcaaaaatgggacttgtaataaaagttgcttaagaaatagcattaattatatatattttcaaaacaggcaatatatattgttctgataatttcctcctaaatactcagtctctaaatttatatttttcttttctccatagcaatatgaaactgtctgtaagaggactgttctttatgattgttataatttttcaaccagaagatactacctttacaacctcagatactaagggagacaaatgtactgaaattacaaatgtattatgttggattactaacaatagacctaattgataaaagtgatttaatatatgttgtgttaatagctaaacctccaaagcccctaatctcccatggaaatattgctttgtagaacaaaatccaatgagaagttctgggattccagagtgaatttgtacattccttaggggcatttttgcaagggaggttgttgtgttttaaaggtagttgataagagacctgcaccaccaaccccagacctgcaccaccaaccaccatcatgcattagtctatagaaggtatttgggtgtacgtactcctgtaccactcggtaccaccatttagccaagcgaagtttctgaccatttgcagcatacattataaatcaggatgtcactaccagacaatcagatttgaacattccatgaacaaagtagcctatataccctagaaatagatcacttaactatgtttatgtcatgctgttgatatgcctgcatttacacaaatcaggatagcacattgcttatttattttaggagtaggtaattgatctgtatatttacctaattttgggtaattagccaaaaattgaaatgggtaatttagcatgattgcttaaatacatggggaagatataattattcttccaactgcaaaaatttctcctttatcccttgggtttgtgaaagaataaaataattttgagtcttctctaagtggggctggtagtggctgctttctttgaaaaatttttctatgtggcatataatgcttgggaaggtcactggccaggtatttggggaactttgtcccttggggagacctaggaaaatcacaggatatattagttcagtgaagtgagcttgtttaagttatattgtccttccagtatcactaggggctatcactgccacttggggtgtcaacttttggtgtcaagtttgtatactcttgttggctgcagagattttgttttgttttgtttttggctctttggtttaaaaaaaattgtttgcagagatgagcttatagatctggcaagttataatttaatttttaaaaattaagacaaaatattagtctgaatctaagaatgaaaggccataacttgctatatatgatttagtaataaaaaatcacttaaaaaataaggtgaggaactcaaaaaagtatagtcaagcaaatgaaaagttactcacgatgttatcaatcagagataaccactgttaacattctggtctttttacgcttttttttttttttttgcatatgtaactctgttatcagtaaaaatttacatccttgttttggttacattaaattataagtatttctctaagtacttagaatttctccataaccattttttaagttactaatatgtcaatataaagatgtaaacaaatttaatccttttattgttggacatttaggaggtttgcaacttcctttgctataaataatgttgcgatgaaaatctttatacataaatctttgtctacttctttgattagttccttaggaaaaaaatccttgaagtaaaagtactaaattaaagatcaagtatttttaaaaagcaagatacgtgttgtcaaactgctttcccagtgagttccatcaaggtacacactaatcaactgtgtatgaaaatcactttcttcccacggatgttcaaataaatatttttatattagcattgggagaatgtttacctaattttctaatttgcatttctttgattatctaattagttgaataatttttcattttatcaaaaatttatatttcttcggttaaatatctgcatggcataagtttttacaatttctgtctattattgcagaatgtgacagtgcgcattttcgctgtggaagtgggcattgcatccctgcagactggaggtgtgatgggaccaaagactgttcagatgacgcggatgaaattggctgcggtaagtgaggaggggccaggctaagttctattttgagtaacttaagtgcttcgtggtgatttcagctgtaacaaagagaagagctatgccttttagtgacagagccagggctgggcccaagtcttttgagatctgtgtggttgaatagagaactgatggcattaacaataatttcactcccttctgaggtaggggttcaattcacattgatgatagaacatcagtttctatctcacccttatcccttgaccacaactttgatatggaaacatatttgggtgcagttttctggagtctgtaagtgattatttctaatattcactctgtaaattttgtgtacccacaagaacaaacaaaaaataatgttatctgaactactgtgatttgtaagtcaaagaggagtccatttttatgtaaaggatgtagaataacttgtgtcaattaccataaagaaatcacagaattggttagtgtgatttatgttttttaaaaattctagttttaaaaaatttgaaaaatacgataatgtagtaaacttcaaatctaattaattataaaatgactttcacattcattttgtcatttagttttctcactaatcttctgaggtcggtttcagattaggaaattgagacttggagaagttaagtcatttattaaagttcttacagttggtaagtctatgcacagatcccattgctcttcccaacttcctatcggtgatcagtcatacatctgcaatttccttcatcccagcaggtgaactaatgagggttatctttcaaaaatcaggaaagcagttgaaaaatttttgttttgaattgttggccatcttatggcataccatagcagtcaaactttggtgtgtcatttagatgacaacgcatttgaaaatgggaggaagggtaaggatggggttctgtacagtgctcctcaaatgctcatgcacaaatggatcacccaggagctcattaaagtgcaaatttagattccatattttgaggtgggacctgagcttctgcgtttctataaacttcctgatgatgttgatgctgctagtttgtggactgcactttgaacaagggactaaactatatttgtagagacacaatcatgtgctaactatttgcctcctctgggcttactgagttcattttgattaaacaataaaagcaaaaaggcaagggcagtgtatctggggtaaaggaataagtgaacagctatgccagcaactcttcagagattgttacctgtattatattttattgacctgtaaaaataataacaataacaacaatatcaatgacgatagtgatagcaagtaacattacatgacactttcacatacattatttaacttatttttcacaacaaacagtgagatgagtatagtccccattttatgatgcgtacattgaggttcagagaacctgccaaagatcttaaaggaagtaaatcatggaaataataattatttgattctgggttttctttcccaaatctcatgaattttccagttcatcatgatactttactattagttattatgaaacaaatagtttaacagtaactcacagttaatgtttacttgaatgaagcttttaatctaacacctttatcataatttttgtgtgtgtatgtgtgctgtttgttttattctctgtgtttttaagttgctttggttcatgagtttgttgtgatgctgttgctgagcttatttgacagtgaactctgactggcgtccacagactctagtataagggttgtttactatttgccttcaaataaattgggcaggagttgacatgatacactcttctggaacaagcattgcttgctagtataatggggaggatgattgccataatgagtcctcttttggtttgttttagctgttgtgacgtgccagcagggctatttcaagtgccagagtgagggacaatgcatccccaactcctgggtgtgtgaccaagatcaagactgtgatgatggctcagatgaacgtcaagattgctgtaagtgtttggagaggaatcttgctttggctttgtggacacctaaaacccaacctgtcgcaaagaagttacacacaatgggatgattctttataaatgtggagcagagccttaaatcataagggaacctatgccagcaatctcattcaggggttggatgatattgaaagtacggatgtactgaagaattatgaatataccccagcaatttggaagtgagataggttcccaatctttaattttgattatgttatgctcaagaaaggaaccaaatatttattggagtgtatagctgggtgtcttcatgtgtgtggttgacagctgaatgagtcctttggctctgtggcatacttggtattcaaaccttccactccttctgccccaatattaaattctcttctttttgactgagtggaagtaggtaggtttgttggagggcttcttggtggttacttcagtgactgctgccacagccaccatagagagagcttgaacaagaaagaaaatagtagcgatgaagcggatcttggcaactgcggcatccctggacattgagggggtttggttcagtaacctggaaaaaacctttaaattctaatttctttggaatcaaactggaaaagactgttttaataggtctaacaataattttattttatatatttttattttattattatttttagagtcagggtctcactctctcgcccagactggagtgcagtggtgcgatcacagctcactgcagcctcaaacacctgggctcaggtaatcctcctgcttaagcctcctgagtagctgggactatgggactataggtgtgcaccaccatgcccagctaatttttaaattttttgtagagacatgatcttgttacgttgcccaggctggtctggaatcctgggctaaagtgatcctcctgccttggcctcccaaaatgttgggattataggcatgacccccccatgactggcctgaaaataattttagatgagagtaatgttgggtaaatataagatggcgacctatgagcaatttgtctatcacatgtatcattccattcctttctctattaaggatatttgtataatttaaaatcattcttgtatcattgtggatgtttttggctgcaaggaaagaaaacacaactcaaaaaagttaaacaaaaaggggatttattatctcacataataagaagcctaactatagggttgttccagggttgattaattcccagctcagaaatattatccagttttttctcacttttttgctctgccatatttatcctattggcctttcttgattgcataatagctgctcaagtctcaaaatttgcatcctgaaggcctgacattctctcaggcagagaggaggttcttaatagatagatactaaatgcataaatgatgggttgttcatctttaggctatatagttttgagtgtattttctcttactcctctcacagagtgggaagaaagctgagctttattttgcgattcaatgtgtggtggatgaccctttgctaataataatactttacagaggggattggaactactaagggcaactgcttgggaaaagagactggagataagtttatagcagtcatttaaaaacaatattgcatatcattttaaatgactatacatttcatgaggcaattctcccatttttaatgatataaaaattctccattagatatcttttaaccacaaacaaaatatgccacctctgtattcactaaagttaccagataactcctgattgccaatgggcacttttccttccttctcacactggaagggcgtttagattgcacttgactctggagaccattcctccttcttgacaccactcccttggctgccatgactcccagcagtcctggctctcttttgagctgctttggtcattccattttattttcctcttctactcagcccttgagtattggtgttgctcagagccctgccctgagcagcttttctcattctggacactctcaggatagtctcaccattctcatgattttagtgaccctctgtggcctgatgagacttaaatctatgtttacaacccagatttttgcccacacttgaatcttgtatactcaactacctttggacctctgcaagttgccttgaactcaaggtgtcccaactgaaaataatcatcttccctcctgaactggattttccttctatatttgctagtctacatattttatctttattaatagaaatagcatttaacccactatgaggcactggcagaaaatacaaaatcagtcttaaactattggaaataggcagatggaggctctcttacttgttggatttgtgaaacgtatttcataatgaaagtattttattagatgaagaagaaagattgctgtaagtgacatgaaagatataatcaattaacatgaaaaggctatcacaatcccctaggcacccatgctagaaacttggaaattattcttgattccttcctctttttcactgcccacattgaatcaccaactcctgcctaatttgcctcataaatatttctaaagttaatctcttcatttctctctcttttatttttattttttggcaaggacagattttttttttttttttttttgagacagggtcttgctctgttgcccaagctggaatgcagtggtgcaatcatggctcactgtagccttaacctcctgggctcaaattgtcctcccacttctcagcctcctgagtagctgggactacgggcgcatggcaccatacctggctaatttttttttttttttttttgtagagatggggttttcccatgttgcccaggctggtctccaactcctggcctgaagtgatccacccaccttggcctcccaagtgctgggatgataggtgtgagccaccatgtctgacccatctctttatttctgctcccactgccaacatctctcatttgggtgtcggcagtagtctctgggttggcctccctgcctccagtcctgtggatccttagattctctctgacactgatgttggtctaactaagattctttggtagctctccattaattccaggagaaagttccaattccctaacacggtttacagtggcttccaagatgtgactagtgcttattttcctatgtctatcatttgctattcttgccttgaagtggccacttgggcacagcagtgcttttagttcctgtgggtgtgccatgctgtgtcctagccttttgtctccgtgcaagctgcctgaatgctgaatgctcggttctagacagtccttctttgcttttggcctacctgactgctgcttctttaagacccagggaggtgtcactttttcaaggaaactgtccccacccatgctcccatcccagagtgaattaagttcctggattgatggttctatcattcctgtgtgcctataatccactttcataattgttttctaattactccttagtgtcccctagaagtctatgagcttcttgaggttagggattgtgccttattcatttgcagatccccatattgctatactgtgtggtacattataggccctcaacagatgtttgtgtaattaatgaatagatgaatctcagcattagattggttgatggaattatataattttaatttgttttctctctacatttgaatgagcttttaattgcttcttcgtaagccctttgaaaacctaagcacaaaatttagaattatttgggcttgacgtaaagaagaaagccaagttaattgaaatagtactgattcctgacctaggttcttttcatattttgtttgagacaactcatgacttgccttctcgggaataaaagaaagttctttaattttatgtgaaaattggcaatatatacttaaataaattatttggaaatttaatgaggaagtattaatctctttaacctttttcagataaaattgtgtctctgccatgggcagaattcagacacttaagtgccttctggaaaaatctatctattctgcctttattaatagaagtaaaattggacccacaggtataaggtacttagagaaaatatgaaattatttagtgttagaagtaggctgacttgaaaaattttgtttgctgttccagaattataagacaccattttactaattaaacagaaagaaggaacaaaatgacaaggaagatataatcaattaagcatagagaagggtgttaattatggttttataattattatatcttatcacatgataatttctataagtttgaattttcaagtaccaccttgaaaactgtcactgtctacttatcttttacgtatttttttttttttttagagacggggtcttgctttgctgcccaggctggagtgcagtggcatgattacagctcactctaactacataaaaagagaagttttttttggctcaagtgatcctcctacctcagccttccaaatagctaggactacagatacttggaagtgagccactgtgcccagctaaatttagttttattttttttaagatataaggatctcactatgttgcccaggctagtcttgaattcttggcctcaagtgatcttcttgcctcaatctcccatagctgggattaaaggcacgagccactgtgccaggtttacttgtcgtttgaaaaggtttttcatgttaagttttggtggtacattccttaacagatctaattttatcacaaaaccaagttttgctgaacctaaatatctatactacatataagtaaaagaagctctgtaggctgggagcctcggatccctgacagttttgcagaacgctgatatctatggactctaaaatagacttcatttatagatacccacggaccactaatggacaaaaacatgaatcggtatgtattgtggcattcaaatcctagcgctttgggagaggagggaggttccaagatggccaaacaggaacagctccagtctacagctcccagcgtgagcaacatagaagacgggtgatttctgcatttccaactgagctttgaagagagtagtggatctcccagcacagagtttgagatctgagaatggacagactacctcaagtgggtccctgacccccgagtagcctaactgggagacacctcccagtaggggccgactgacaccggatacggccgggtgcccctctgagacaaagcttccagaggaacgatcaggcagcaacatttgctgttctgcaatatttgcagttctgcacactccactgatgatacccaggcaaacagggtctggagtggacctccagcaaactccaacagacctgcagctgagggtccttacggttagaaggaaaactaacaaacagaaagggcatctacaccaaaaccccatctgtacatcaccatcatcaaagaccaaaggtagataaaatcacaaagatggggagaaaccagagcagaaaagctgaaaattctaaaaatcagagcacctcttctcctccaaaggaacgcagctcctcaccagcaacagaacaaagctggatggagagtgactttgagagttgagagaagaagtcttcagacgatcggtaataacaaacttccccaagctaaaggaggatgttcaaacccatcgcaaagaagctaaaaatcttgaaaaaagattagatgaatggctaactagaataaccagcatagagaagaccttaaatgacctgatggagctgaaaaccatggcacgagaagtacgtgacacatgcacaagcttcaatagccgattcgatcaactggaaaaaagggtatcagtgattgaagatcaaatgaatgaaatgaagtgagaagagcagtttagagaaaaaagagtaaaaagaaatcaacaaagcctccaagaaatatggggctatgtgaaaagaacaaatctacgtctgattggtgtacctgaaagtgacggggagaatggaaccaagttggaaaacactctgcaggatattatccaggagaacttccccaacctagcaaggcaggccaacactcaaattcaggaaatacagagaacgccacaaagatatacctcgagaagagcaactccaagacacataattgtcagattcaccaaagttgaaatgaaggaaaaaatgttaagggcagccagagagaaaggtcgggttacccacaaagggaagcctatcagactaacagctgatctctcggcagaaaccctacaagccagaagagagggggggccaatattcaacattcttaaagaaaagaattttcaacccataatttcatatccagccaaactaagcttcataagtgaaggacaaataaaatcctttacagacaagcaaatgctgagagattttgtcaccaccaggcctaccttacaagaactcctgaaggaagcactaaacatggaaaggaacaaccggtaccagccactgcagaaacatgccaaattgtaaagaccatcgaggctaggaagaaactgcatcaactaacgagcaaaataaccagctaacatcataatcacaggatcaaattcacacataacaatattaaccttaaatgtaaatgggctaaatgctcaaattaaaagacacagactggcaaattggataaagagtcaagacccatcagtgtgctgtattcaggaaacccatctcacgtgcagagacacacataggctcaaaataaagggatggaggaagatctaccaagcaaatggaaaacacaaaaaaaggcaggggttgcaatcctactctctgataaaacagactttaaaccaacaaagatcagaagagacaaagaaggccattacataatggtaaagggatcaattgaacaagaagagctaactatcctaaatatatatgcacccaatacaggagcacccagattcataaagcaagtccttagagacctacaaagagacttagactcccacacaataataatgggagactttaacaccccactgtcaacattagacagatccacaagacagaaagttaacaaagatatccaggaattgaactgagctctgcaccaagcggacctaatagacatctacagaactctccaccccaaatcaatagaatatacattcctctcagcaccacattgcacttagttcaatattgaccacatagttggaagtaaagcactccccatcaaatgtaaaaggacagaaattataacaaactgtctctcagaccacagtgcaatcaaactagaactcaggattaagaaactcactcaaaaccgctcaactgcatggaaactgaacaatctgctcctgaatgactactgggtacataaagaaatgaagacagaaataaagatattctttgaaaccaatgagaacaaagacacaacataccagaatctctgggacacacttaaagcagtgtgtagagggaaatttatagcactaaatgcccacaagagaaagcaggaaagatctaaaattgacaccctaacatcacaattaaaagaactagagaagccagagcaaacacattcaaaagctagcagaaggcaagaaataactaagatcagagcagaactgaaggagatagagacacaaaaaacccttcaaaaaaatcaatgaatccaggagctggttttttgaaaagatcaacaaaattgatagaccaataggaagactaataaagaaaaaagagagaagaatcaaatagacacaataaaaaatgataaaggggatatcaccaccgatccctcagaaatacaaactaccatcagagaatactatacacacctctatgcaaataaactagaaaatctagacgaaatggataaattcctggacacatacaccctcccaagactaaaccaggaagaagttgaatccctgaatagtccaataacaggctctgaaattgaggcaataattaagaggctagctaccaaaagaagtccaggaccagactgattcacagctgaattctaccagaggtacaaggaggagctggtaccattccttctgaaactattccaatcaaaagaaaaagagggaatcctccctaattcattttatgaggccagcatcatcctgataccaaagcctggcagagacacaaccaaaaagagaattttagaccaatatccctgatgaacatcgatgcaaaaatcttcaatgaaatactggcaaaccgaatccagcagcacatcaaaaagtttatccaccatgatcaagtgggcttcatcccttggatgcaaggctggttcaacatacacaaatcaataagcgtaatccatcatataaacagaaccaaagacaaaaaccacatgattatctcaatagacgcagaaaaggcctttgacaaaattcaacagcccttcatgctaaaaactctcaataaattaggtatcaatgggacgtatctcaaaataataagagctatttatgaccaacccacagccaatatcatcctgaatgggcaaaaactggaagcattccctttgaaaactgtcaccactcttattcaacatagtgttggaagttctggccagggcaatcaggcaggagaaagaaataaagggtatccaattaggaaaagaggaagtcaaattgtccccgtttgcagatgacatgattgtatatttagaaaaccccatcgtctcagcccaaaatctccttaagctgataagcaacttcagcaaagtctcaggatacaaaatcaatgtgcaaaaatcacaagcattcctatacaccaataacagacaaacagagagccaaatcatgagtgaactcccattcacaattgcttcaaagagaataaaatacctaggaatccaacttacaagggatgtgaaggacctcttcaaggagaactacaaaccattctcagtgaaataaaagnnnnnnnnnntccaatagaaagagagtcaaatgtcccgttgcagatgacatgatgtatattagaaacccatcgtctcagcccaaattctttagttgtaagcactttagcaaattctggtacaaatcaagtggaaatatcaagcacttcttatccacaataacaacaacgagcgcaaatgggggtactctcttcacattcttcgagggaataaatccttagattcaattacgagggagggaggaccttttcaaggagaactacaaccattctcagtgattaaggacacaaacaaatgaaggaacatttttgcttatggataggaagaatcaatattttggaaatggccatactgcccaaggtaatttatagattcaatgccatccccatcaagctaccaatgactttcttcacagaattggaaaaaactactttaaagttcatatggaaccaaaaaagagcccgcattgccaagacaatcctaagccaaaagaacaaagctggaggcatcatgctacctgacttcaaactatactacaaggctacagtaaccaaaacagcatggtactggtaccaaaacagagatatagaccaatggaacagaatagagccctcagaaataataccacacatctacaaccatctgatctttgacaaacctgacaaaaacaagaaatgggaaaaggattccctatttaataaatggtgttgggaaaactggctagccatatgtagaaagctgaaactggatcccttccttacaccttatacaaaaattaattcaagatggattaaagacttacacgtcagacctaaaaccataaaaaccctagaagaaaacctaggcaataccattcaggacataggcatgggcaaggacttcatgtctaaaacaccaaaagcagtggcaacaaaagccaaaattgataaatgggatctaattaaactaaagagtttctgcacagcaaaagaaactaccatcagagtgaacaggcaacctatagaatgggagaaaatttttgcaatctacccatctgacaaagggctgatatccagaatctacaaagaacttaaacaaatgtacaagaaaaaaacaaacaaccccatcaaaaagtgggcaaaggacatgaacagacacttctcaaaagaagacatttatgcagccaacagacacagaaaaaatgctgatcatcactgagcatcagagaaatgcaaatcaaaaccacaatgagatatcatctcacactagttagaatggtgatcattaaaaagtcaggaaaccacaggtgctggagaggatgtggagaaataggaacacttttacactgttggtgggactataaactagttcaaccattgtggaagacagtgtggcgattcctcaaggatctagaactagaaataccatttgacccagccatgccattactgagtatatacccaaaggattataaatcatgctgctataaagacacatgcacacatatgttttttgtggcactattcacaatagcaaagacttgggaccaacccaaaagtccatcaatgatagactggattaagaaaatgtggcacatatacaccatggaatactatgcagccataaaaaaggatgagttcctgtcctttttagggacatgaatgaagctggaaacgatcattctgagcaaactatcgcaaggacagaaaaccaaacaccgcatgttctcactcataggtgggaattgaacaatgagagcacttggacacaggatggggaacatcacaaactgggacctgtcgtggggtggggggagggggaaggataatattaggagatacacctaatgtaaatgactagttaatgggggcagcacaccagcatggcagatgtatacatatgtaacaaacctgcacgctgtgcacatgtaccccagaacttaaagtaaaataataataataaaaaaggaattataaaaaaaagcagctttgtaaaaattgagagcaaatcttttttcttccattaggggattatattatattttttagatgatcacgttttcccccaaagctctttgtatgtagacaatttaaaatcccaggataagataatgttaccatgttatggtaattcctgcctcagatttacaggatagctttcacgtcatgcttgcgggcatcagttcactggattttatctgttttatccggaggcaaatttcatgaactgctgatgccctgctttcacctgtactaatcaacatgggatgaaatcaagctagcttaaatttttttctctttataaaattgatacatggtcaatgtagacagtttataggatagaggaaactatatagaaaaaaataaaatcactcatattcatattcacaccacgctggaataactgctattaaagctttggtatatttccttcttgtttatacaaggatttcaatgggtgtgttgggggtccttggttaatacctatacttgcaaaatttttatttcattaaactttttaccatataggtttaaaatctatattgtattctttacacatgttgataacgtaattgtgtacatagcatgcttgagtgtggacactattctctgggcattttgataatattatacttctgtttttgctttgtaagctcagcttggtggtagccgggtactttaccttgtgtccctatgaactttatgctttccaatatccttgttaatgccaatagattagtctgtgtctagcaataattataaattaagtaataattttttctcttcgcagcacaaagtacatgctcaagtcatcagataacatgctccaatggtcagtgtatcccaagtgaatacaggtgcgaccacgtcagagactgcccagatggagctgacgagaatgactgccgtgagtctgttttagtccttgcactgtatttggtttcacccttgtccctttggcattttaatcaatttgttagatttgttgatggacataaatgcctacaatacgcctcttgttattgcaatctcttggcagattcttttgtggattaggggtgatgttctgataagagtctatttttaacaagacattctaagagtgtcctgccttagtgcatcaagtttctgtattttttatagtaagagacttttaacatgaacatagattctgaaaggaaggataattaaatacattgagtacagaatcaagtttggtaaattttaactgttattacacagctatagtaagtttctaggtcaaatttctcactagttttcctgcttttatgaactcaacatttttcagattacctttggaaaagtgttacattttgaaaatgtcttttcctataacagcagcatactatatctctttgtaactgatcaccacaaaataagacatataaatcatagtattcgatgtataatgtataactattaccacaccaaaataagaaagtgcaatcatggttcattatgtagtaacaggtaagtaaagaacaatcttcctctttcgaggcttatatagaagtgttaggatatgagaagataggaattagtctgctgtgtcagtcctatagtccatataattgtctttaatctcaggcataccacagtttctctctctttctgttttttattttttatttttgagaaggagtttcactcttgttgcccaggctgagtgtgatggcatgctctcggctcaccgcaacctccacctcccaggttcaagcgattctcctgcctcagcctcccgagtagctgggattacaggcatgcgccaccacgcccgactaatttttgtatttttagtagagatggcatttcaccatgttggtcaggctggtgttgaacttctgacctcaggtgatccacccgcctcggcctcccaaagtgctgggattacaggcatgagccactgtgtctggcccctagtttctctgaaaagttcttacaagtctagcgtttatgaatttttccagaagttccttgtgtttttaatatatatatatattttaatatatacatataatatatatttctgacaggccttttcgtgcagtcctgcatttcataaatttactatgtgctgtataaagatatagtcatgtgtcatttaatgagggggacacattctgagaaatgtattattaggcaattttgttgttgtgtgaacgtgatagagtgttgttaaacaaacctggatggtatagcctactgcacacctagggtaaacagtatataccctaggcatatactcttgctcctaggctacaaacctgaacaccatgtttccgtgctaaatactacaggcaattggaacacaatgttaagtatttatgtagctaaacatatgtaaacatagaaaaggtacagcaaaaatatggtattataatcttaggggaccattgtagtacatgtagtccatgcggtctgtcattgaccgaaagagccacatgcggttcctgactatacttccttttgtttgctcttaaatttatatttcaaacttcaagaaattatcccagtattccattaattggtgagcaggtttttgtgtaccttagaaatcttgatcataaacttttcagttattatgtctccaacggaagattcaagttttagcctattctcacgggatatctcctctattgttttataattttgatttaattttagttctctggattgtctctaaattccttcctttgatacaaatggtttattttatgctttctgataaaagaactatcttgtgtaaattttgctaaacttcccaatatggtgccgtgactagggtaggagctaacatacattgattatggcaagcaaattgtttctagtcacgtacatttcaaactatactgttcatggaagaaatacttgtatatgtgcaaaagcaagacctatgcttccatccataccatgaccacatggtgcatttttaaaaacgacccttctccagtgctttctcccttgcatgttatttttctttgagagaagcgtctgtgctatttgtcattgtctctccatttcctagcagagttcctagtacagttctgttctaattttcatctgaaatattcttatttatctatttatttttaattttactttaagttctgggatacatgtgtgacgttcccctctctgtatccatgtgttctcatcgttcaactcccacttatgagtgagaacatgtggcgtttggttttctattcctgtgttagtttgctgagaatgatggcttccagcttcatccatgtccttgtaaaagacatgaacttgttcctttttagggctgcgtagtattccatggtgtatatatgctacattttctttatccagtctatcattgatgggcatttgggttgattccaagtctttgctattataaatagtgctacaataaacatacatgtgcatatgtctttattttttgaaagacattacagtgtttccactttggatttaccttcactctggaaattatgaaaagaatttagactaaactctggcaagtttagagatggtagcgtgtgtctggatgccacagaatagcaagttcaggggtcaaagattctcctttcagtgctttgtaaagcacacagtagattcttcattgaggcaaatgaagaagacatttttgattaataataatgataaaccatatattatattttgtagcattttataaatttcagagcattatataaattctagttgttactattaggttcctttatgaggacaatagggcaggcactattataatcttttatgaataaacaaaaacttcaaagagaagagtgacttgtttgaggttgtatagtagagatagggcttaatttgtcttctagttccaagtctggtgattgcttttcatggagggctttatttacagaaggagaaagtcctatcttgtacaagttaagagaccaccagaggcctgtaccaccagccaaaagtctgtgtctttatcccttatttacaagtagatgaaaatgagtgctttactgcaaatgcagtgggactaaaggaactgctactttggggaaaataaaagtcagctgaaacagaatgtttgcagccaagactaaagtcactaatacaaccggctcacaactttgccaatgaaccttctggcaaaaacctggcaggatacgaatatgtaagtagccgctgtaaaagggaacgaagcagaggaaatgaactttgtaagttattatatctgggcaggaatttttaatcaagttttttttatttaaaaaaatttaagtacaaatagttggtgaaataatgattcactaaggaaagaaaaccaaatttggcttactgtttctggaatcatacaagtcatgaacccttcagggcacactgtgacctaaaatgaatcacatgcatgtaagggattttgcaatgaggcattctttcctatttccctctaccttgtttatttattgctaagtttcatttatggaggagtgtaaaaaaaaaaacctcagaaatcagaggaaatgtagaaaagaatcttcttattcttttgttagtgctttgatctggtcacagtcagatatatacaagaaggaaatgaatggcctcaatcaaagtccttagaaaatgctagtataggggatgggttgcaggagtgatcccattttgttttccttctttgtttaaagctcttgtggaaagtgggaaagggaactgccagtcaccgagcaccagccaccaccttacccacttttcatgtcaatgctgcaaggtgggtatgaggaccagctctgttttacagagattgtagagatgatcaagatgtaagaggaggggagccaggattttaacctaggtctaaaccatatgcctgtgctcttaaaagattttgctttaggaatagaaacgtgtaacttatttttgtttaaaggttacttagctattttattatttttacatattattgtctaaaccttttttagtatggaaggttttttttaacatatacaaaaggagcatgaattgtatagtgaacctctttgtatgcatcactcaattacatcaccgatgaactcataactaatattgttttatttattctctttattctccccattattctgaagtatttcttagacattgtataattccacctgtaaatatttcagtatttatctctaaaatataaggactaaaacataaccataatatcattatcacacctaaaaattaaacaactcttctttaaaataatcagatattgagtcagtttctaaaattccccaatcatcttgttattttttacagtttgattatttaaatcaaagtccaaataaaatctttatgttcaaattagttgatatgtctcataagcctttcaatttgtggggtttccttctatttctgttctttaccccttgcaatttacttgttaaaaaaaaaaagaacccaggtcacttgtcctggagtttcccacagtctggcttgtgttcattgtgtcccctgatgtcctttaacacattctctgtcctctgtatttcttggcaattagtagctagacctggagcagggtttctcgaccttcactctaatgacatttgggaccggacagttctttcttgtgcattgtagaatgtctaacagtatctctggcctctatccactagatgtctgtagcattgcccagtcgtgacaatccaaaatgtctctggacgttgtcaaatgtcctccaggagcaaaatcatccagttagaaccactgatttaggggactgaacaggtgcaaggattttcttggcggggaaacaagggaaggcaagagtactttttatataaatctgtgtattttcattaggagacacaggatagctagctgtctgtgatgtgagtagccattgatgatcattgctgaaatccatttagtcatagcagtacttagttattttaaatgttgcattagatatataacagctgttattagttgctttaaattagaatgttttcatgtgatcaaagattaaatgaggcttagccagaaatcatcttcatgagacatgacactttattatttctgcagtgacgatgcatggaaattgttacttgtggacaaacttagaattagcctgtgaatggggcttttgtttttctatttctcagaaatagaatggcctatagggaggaatatattaggtacctggaaaccacctaaaaatagtaaaggatgttggaaaagctccaaagaaggactcaattcttccctctaatattcaaaaggattagggagcttgatgttgtagtttgtagccctgccattcattccaggcccctaggttgtagttcataccctttcaagcttctaaaatcaagacactgagctccaagacagagtaccttgtgtccattccgagcattcctttatagaaaaaagagtggtgtgtaagagtcctctcagggaggcaggcagggagagaggaggtgagagaatggtcgagatggtaaggaaggggaggatattagggtctcaacaaaaagattatttttgagataaatgtggtatagtatgagagattcttattgcatttggtctttttatctgcttcgtctttatatgcataagatattggtggttattttacccttttagaaaaatttctgaatatatatatattaaaagctgtgtaacaggtaaaagctcattttcccccttagttcttttattattcaatctggtcatctgtaaaatggcatctcatattaaacagcttgtcaattaactttttttttttttttaaggaacagagagattcaaaactgcggtccattttacttctaatgggattagcatcaaggaaaaaccactcatgcagggtctaagataaacatcagaacaatgcagcaattataggtcattcaattaatatattgatgtgactttcagttgctcaaaaatagtacagtttttttctgttaagtgaaaagattattttgctttttcaagcaccatattagaatgattttggtgtgaataaaactattgctaattatcgttggtttgcagcacttctcttttgttacttaggaatgccaaagaaagggtaaaatccctgttacaatgaaggctttcttgctggtaatcagcagtatttggtctgcctgcaactggggctgctttgtcccagaagttttatttctattgactttctgctctttagaatttaaacatttttctttatatctttaactgctgaaactccagctgagggaacagtgggaggggaataaagaagaaggttaaagtcattttgtggactgtgagggtgcatgaagaacatgttcttcaaactcagttccacatttaagctgcccagcgagccttgcccttgctattctctctctccctgaagccagaaagaagaagcaggcgactctccaaaggaccccatcttacctgtcacatcacagatgtacctttttagcattctcacaattgagataggattcagagccctgaaacctggaggaaggaaagaaaactctcttttatttagtttccatcatacaaggatgttataaatatcccccatctttaaaaagatcctaagatccctcttagctgttgccaattactctgctcccttttacaacagagtttcctagcattaatgttaatggctgtttccatttaccctcgtcctgtttctttctttaaaaaattttttttaacacatgtaatatatccaactgattgtcctttttttagaacccactgaaaatagtccttcatcttcaccaatctcctgaaaatattctttcaatgctaccagtgactgccattatgctaagcctaacggttcttgttcaaatatcacttctcagagagctactccccacagttactctttaccttttacccagctctatttttgcaactttttttcccattgtgacatttactttaatagctgtaatttcactctcccaaatagaatgtctgttccatgagaaatgggattttatttcattctttagtaccttgcacactatagctgtgcaataattttttttgtatggattgattaataaaatgctgtgggaattgctacttcacttgtaattttgtttaccttttaatttaattcttagcacagtatctatgaagtcagatttcaataaatacatgttgagcacaagagaattctaattaagaagaaggcagcactctgtagaataactggtttctaggatattgacattcatccagcaatgatttgctgatgagtattcaaattatttggggctacatttccagcagggaggctgagccacaccatttctagtgattggaaagtggctactcttataatgctggggtgcagctagttttcctgtctctttgattagattttgtcttttgttctgcccaggtgggtccctgggaataactactaaagtatgaaaccatggtgttgtctggctttcaatgaaaacatgtagccccgtgccactaaacatgatgtacattataaacatttgtttaccccttagaaggcatcttacttctttgtactattccttggagcatttgatgcacatttttccatcttgttgctcggtcacttttgtaatagagcttgtgtgagtttttttttttaaggaatttagaactatgtcagtttttatctcctttgcagtttttggtgatagctctgttatgggaagaaggcagtgctgtggatctggactccttggagcaaccctctcaggcacatttctagttgaggtctaagattaggtcactgtggatagagaccagcaaggaatctcaggcttaagacccagctagtacaaagggagtgagctaaggaaaactaggtaacttagtttatttctctttttgctttggcttcctgaaagccacccagactaaacttgatgttagttcaattctacaagtcctcgggatgaccatattttctttctctttccaaggtgctgaatttctttctttctttctttctttctttctttccttctttctttctttctttctttccttctttctttctttctttccttctttctttctttctttctttccttctttctttctttccttctttctttctttcttctttctgaatttcttttttaataaatctggttttatataactttttattgaaagcttcttcaaattacttttggactgggggaggatatgcttctctttttttttccttgtgtattactgcattccctagcagctagtccatgatggcagtcactttagggacttgaaattcaccaggaatgggggtttggggagtcgtggtggtaccttcatgagactaactttatggcctgttttttggtattgactctcctgtttgtcctggtactccttctggaaagttatttttcctgcgtaggtttcctagaattcctagattatatcatattgaagtactttgttaactatgccataagttgtgggaaactagagttggcctcacttctcccttcttcctaatgtggatgggaaactgactggcagaaagaaaatcttccccccttcctcttgggtttcttctttttcttttcataatctcttttaagaattttctattaccatttcattcaatttctttcttctttaattttttgcttcttcctgttacttactctgcagtctataagtggtagatgtatctgtagtagtggttagtaacctgggttatggagccaggttgattggatttgaattctggctctccaactttaccagttatgtgacctttttcaaattccttaacctcttaatgctcaggttcttactctataaaatgggagtcatcatagtatttacttcatgaggttgttatgaagatgaaatgagtttatacatattgagtactttgacacatgtctggcacatagtttttaatacatgttattgatgatgatgatgatgatgattgcttgtttaactttgtgggtagcgtttgcaagtaagtgctggtggccaaactggtagattctttctggcaaatcattacattgactggattaatctgtcttggagccagaggaaataacataaagtaacttataaaggatgactctaggaccttgaaaagtcccaggtgtctgggctggacttgtatcggtaatttctcgtgtgtgtgtgtgtgtttcccaatcttggcttaagtttcctaacctacttttaagatcccttcttcataataatggttttttctatgttgtcctcagccatgttgtcaaattgtgagaataaaacatgtctgcagtcttcctgtcaagataataatgaacagtgccttatatttgtatcttactctgcttaaaatgatttccattctaagaggtctacaaggtcttcaaactacatttctacaccctcctccctgattatgtaaacagaactatagcatggaaatttcttgcttcaaaccaaatcattaacagtgaaaaaacataaaaactcttgtctgcataattttggggcagctcccaattatgggggaacaaatctgaacatgtatcatttgggattgggagaaagtaaagaaagggcaagcaaggagtggtatgaggaaggatattcttacctttttgtgttagaaaaaaccttaaaggtctgagccttaatttatagctacttgttgatctttccattaaaaccaaattcagaaggaagagtttccttggtgttcttatatatgatctcctctcatattgcactttaccctatacttaaattcttgcaggacattatagccacatgatggatttgctctgtgggaagaaggttagacttaggcttgccaagcaaatgaaccaaaaaataagactttagatatctcccagttggaagctcaaaggattgtgaattattgttttctggagtagattgaaactcattaacatctttagcaatggtagtagaatccattcatttctttctttgctcagtgttaacagtttggacctgttgtctctgtgtgggtctccaaagagggaaaaccattcagaaacagattttcaggtattttcagtatttagtggagttagggagctctgtgcaatctttcctatgagtatacatcccaggttaactatgcaccgaagagatcaaggtgtgcaggggttgagaggggtcctctgctgattgagagtgattctttatcagtgtggatggagacaagaaagctgtgtgttcctcattccaaaagtcaaactgctgacctctggccatcacaataccctccctgatgatatcaagctgggcttcttgtttgttgggtggggaatgggccttgtcagtaaacttgtagtcatgtcagtggttacagttttaatttttcccctttcaattttctggcactggctctcaaaaagcaggatgaggaaaacgagagatccatccaacacacttattccagattctttatatttataattatcaccttaaatgaagtagccaccgttcaagcccagattaattttcctccagacagatagcttatctattgcaaagagctgggttttctacgagtttttcttctgcttgctgctgctcttaaaaggctagataacacattgactctaggagctatctggctcacaggggcaaaggaattgcttgctgagctcacctggtcttttgcatctcttgaagggagaattaataaacatcacttgaagggagagttgtgtgactcatttgaaggcacatttgtaaggcatatcatctcagcgaggaaagacgcaataactctaggcactggctcacttttggactattaaaaaacaaaataaaattcagaaaaaattttaaattttaaccagctatttaaaaatgccttccattttaacatatgattgactatatgtaactctggcaattgagatatttaaggacacttaataaactagctttgaacctctggagatgagaagagttaggcttattcctttactataccaaaaaaaagatcattggagagtccatttttttaaaaagtgcaagttgttaacatggcacaagtttagtacagtttcagcacagaattttgtgcatggcttctgcttgaaaagacttgggactatccaaagaattatcttcaatatatttatatctctataaaatctcaaattgggttcttaagtgcaaaattgagactcaaagtcaactaagacataccttttccttggttaaaaagaaatcagaagatgacctgataatcattacaaaaataatctttcatgaagaagatggtcagaccaaggaagatatcacatttgtgaaaaggagggtattcaaaggccataaaaggcagaacttcaaaatattttaaaaagccgaatgaactaaaatgttcacctgtgataaataatagcaacattgaacatttctcgagcacagagagtaatgtcccactcctgtactaagtgtgcacagtgagaaatgtcccacccccgtactaattgttggggattctaaaatgagtaagacaggatccttgatctcagggagtttcattatgtcatggcggaaagagatcaacaatccacagaataaagcctccagtaagaagtcatgagagacaggtggtccaagtctggcaactagagaggagggacagatagcacgttattcctgtaagggacttcctgattttcaactgtgacctagaaaaccaggtccagtgagtagcagtgaggtggtcatatgtacataatgtggcaacaacaatttgtgctttgaaagcacattatgcttttcaacatgctttaccagacatggtcttttcaggccgctctaccctgtgcagtaggttatccaaatgtgcagatagggaagtagcaacatagagaggacatgaagcttgagtcacagtaaatagctgcttagtggtacctctgggccgccagggctcctgaactctaggcctgctttctttctccaacccgccagtggaagaaatggcctttcttttttccaagcttgtgctgtggtactttagtttcctgggatgttatctgtatcatgtaaaagaatgtttgattttgaactaaagttaaattctttctcattcttcatcttttggctcaaaagtcatttctttaggggatacttttctgggcccccaaatctctctgctatgcagtctcacagtcctctgtactttccacattagcacttatcccagtttgtagtttaccatttgtgtcttatttgattaatgtctgtctcacctgtcaagccttactctccatgaagccagggagcatatttcttttgtgtatcaatatatgcatttagtgacttgcatatagtaatcactcaataaatgtttgctgaaggaaatttaaggtttgtttactgtttccttttttttttttttttttttttacaatagagtacccaacatgtgagcagcttacttgtgacaatggggcctgctataacaccagtcagaagtgtgattggaaagttgattgcagggactcctcagatgaaatcaactgcagtaagtattgtgcacaagatgtgcagttgtgtgctgaagctggtttatactggtttgagagagccaatatgtacatctcttcccaagtttaggttcagtgaattcatgttggtagtttgaagtcagccgttggtaggagtatttacacactggaaatcggcaaacactacaaaccagggcctttttgttcctggataactggttcttaaacatttaccagcacaccactgcttaataagaatccctttttaaactggagatgctcttcctttgagattaagtggctacaatggagttaacttctctcttttctttcccttcttaaccttctgttgcagctgagatatgcttgcacaatgagttttcatgtggcagtggagagtgtatccctcgtgcttatgtctgtgaccatgacaatgattgccaagacggcagtgatgaacatgcttgcagtacggtgatttctttatgctgggtcatgttgttgggagtgttttgttttgtttcggttttgttttgttttatccccccgctcccccaccaatgtacctctttttttcaaggagaagagtcactacgtttgatggcagatggaatcagacggtcactaggggtcttggcacaagcctttgtggtgttgctcgacctgggctcctttattttccaaggatctgtgtagacgtaaagggctggtgatggacagtttgccttctttccttaggctccaggggtacaggatatattgtatcactggattctcaaatgacccatacctctgacaaccttgatagtagaatgagagaagtgtttttaagggaaaggaagttcctaggagtggctctaactctcctctttactttgaaatttctgctgcattaaagttggagggtcaggaaagtttctttttcttcgttttctttttttggagatggagttttgctttgttgcccgggctggagtacagtggcgcgatcttggcttactgcaacttccgcctcctgggttcaagcagttctcctgcttcagcctcccgaatagctgggatcacaggcatgcaccaccatgtctggctaattttgtgtttttagtagagatggggtttcaccgtgttggccaggctggtctcgaactcctgatctcaagtgatccgcccgcctcggcctcccaaactgctggtattatgggtatgagccaccacgcccagcctgaaagtttcagtgtggtataggtggctttcttgcctccacttcttcactctgaccttgcttttatgtccatgctgttgcctgcaatgcaaatgacctctcttattgttgccacctctccacttatgttttttggaaagagtaaagttagaagactctgtgaaagagttttactatgttcagtaagttggcagctttgagtggtgatttatttactagaatgtatgatttccctccacacctcttttgattggttggtacccatgccttagggtgttgttaaatattttcgatatcaccctaattttcaatgagccatgcctgacttcctttctggaacctgggcttatttcagtgacagagaattaaagagaatgtgacatcgtggaatggttgactcagaatcatttggtcatagattagcaattacggagcttgtagtaaagtatgagaacgttggatgttgtcatgtctgcagcatctttgtctgcattttctgttctgtgccaacgcattgcaaaccatcttgtttttaattttttttttttttttttttttgagacagggtctcactctgtcacccaggctggagtgcagtggtgcgatcttggctcactgcaactccacacacccccaccaggctcatgccatcctcccacctcagcctcccgagtagctgagactacagacatgtaccaccatgcttggctatttatttttatttttcgtatttttggtagagatgaggtctcaccatgttgcccaggctgatctaatttttaatcttgaaaaacagaaaccggcacctgagttcatttcctggacccaaagctgctgttatcttcttctttctctctcttttttttcctgctttttaaaaatttttgtcaagatatctaagggattaaattgatatagaaatttcaatttctaggagtactgcttaggcagtgaggtgagagcactttcagtttttcccggtgatttgtgtctttggagtgcagctgttgctttattccagactatccgacctgcggtggttaccagttcacttgccccagtggccgatgcatttatcaaaactgggtttgtgatggagaagatgactgtaaagataatggagatgaagatggatgtggtaaggaggggaagagattcctactgaaaagcattttcttcaagtgttttccagcgcttgttttttctcctttcctttttagaaattttgtgtgacaagcaagcctcaggattggctggagttgaaggggttgtttaggaactcagtgggtggggaagaaggaggtgactgcgctaacttctcctaagaagattcagaacacaaatacagattaaatgataatcctctcctttctatctttaaggcaaaataggtaggacagtctctgcctcttctataccccagtctgactttctccctgtaagactgcctgttttaaatagatttaaaactatataaaactaataggctggggaaggaaagaaaatagggaaaatgtcatttgtcttagaccttacaatctttaaaaatgactttgaaccttggtaacagttcagcttatttttttgttttggttttgtaaattctgattcccaaatgagtcactgacactcagtggtgaaagagaggccaccttaggaacacgtgggttggagctggggattggtaagtgtaggagaagctactatccagggaagtgcttaaagattccgtgagaaggaaattgccagtgatattcacccttttatgttgctgatattcacccttttatgttgctgatatcatcagcagtacctccaacaatttagcagttactaatacccataccctacagcaagttacctgcaccattccaatcccaggtatgataagggaaatgcttgttaaaactatgttttatgtttttatgttccagaaagtggtttttctacatttgggttatggtttttcttatactgttgacatttcactaaataaacgaagcaaatcaaacagcccaaccacaaattcaagtaattctggacctaacttgatggacctaattctataattcatgatttaaataactacatcttttcttaggggatcatgaatttagtttgttgataattgaggcccgtatctgcttcttcctcttataacccgactgggggctgcctcttccaggaaaagtggagtaattccattatgcctctccttagaatctcagtaaaagactagtggtagagttagaaatcactaacttattgtaaaatgtagatcatttatagatttctcttgttcaacttgctgtacatcctctgtaaaccactgattaacaaagagctggctgtacctcccctatggcctgtaactctctctttttccccccacagaaagcagtcttcatgatgttcataaatgttccccaagagaatggtcttgcccagagtcgggacgatgcatctccatttataaagtttgtgatgggattttagattgcccaggaagagaagatgaaaacaacactagtaccggaaaatactgtagtgagtatagatatttacctggctagctttcagataaagatatttctgttttctagaacagacgttcaaatacagtgtatctgttggcgtttgcataacaaagcaccccaagacttagtggcataaactgagaaacgtgtcttatttctcacagttctgtgggttggctaggtagttcctttggcctgtatcagctcactcacacgtcaggatgttgcagtaaaagcttgggctagcctagccttgttgacccagaggctgaaagagcaaatcctagggctcaagtactttcaaggttctacttatgccaagtttgctcaagtcttattgtccaaagcaagacacttggccaaacccagagtggatggaagaaatagactccatctattgatgggaggagcctaacaattttttagcaactccccgttcctaatccctaacacacacacagggaggattgtttcaatggcagttttgatgaccttaaagatgttctggagattttattacctggcttatactcatggaaaaagtctggcttttccagactttttttgtctggctgtactaaaaaaaaaaaaaaaaaaaaaaaaaagcttctggttcctgggttatgtaccttgagttactctccaatggcaaaactgagttggccatgcacagtgttgttcgattatgtgttgtgtgaccacactcatttatgaggaaaccgactggaactagggattttttttctccttttttgggactgtagaatattcaccccaccaacaacccatcaactctgtggacagctgatggtcctgtaaggaaataccatttaaaaccttgatttcatcaataatatactctaactaaatttgtgattgcctagaagtgcccatgtaactgcaaccccaaggttattttttgtttcctgacaaaaattgtacataatatttaaacaggcagagacctctatggcatttttttctctatttcatttgggagcccatttaaaaaagcttaaaaattaataagagatatgtagtcacagtatgaaagttggaaaataaaaattaaccaaaagaaaaaaatataatcacctgaaatcccatctcttgaagccagccacagttaatatttttagggcttattcttgctccagtcacttgggagttcttagccctttttactatgtagacacaaagatagacccatgcatgacctgatttttttttcataaatgagacttttaatgacttatacttgcacatagttataactttaaaaaggagctttttttttcttttgtttccactcgaggcagcctcttgttctgtcactcaggctagagtgcagtggtgcagtcatagctcactgcagcgtccatcttctgggctcaagtgatcctcctgccttggcctcccaaagtgctgagattacagttgtgagcctctgtgcctggctaatgcttttatttttaactttttgtgaatatgaggtgtagctacattacccaggctggtcttgatctcctggcttcaagcaatcttcctgtctcagttgaacttttattgcaaagttttgcagtaagctttgaagggtgacagatttttctgtacatctacttcatgcttacttagctgctactcatggaaaaagaagctattagattaatcagtcttgtccagaggtcaccattcatttaacaaagttcttttcttcgtttaggtatgactctgtgctctgccttgaactgccagtaccagtgccatgagacgccgtatggaggagcgtgtttttgtcccccaggttatatcatcaaccacaatgacagccgtacctgtgttggtaagtgatggggggcggcggctacttgtctttcattacagtacactgatgagtcccctgatctctgacatcaaggaggttgcacttgtggagagtcgtcatggtctgtcataacaaagaacaacccagacctcacagaaaacctggcaattagggaattttaactctgagaaggtttggtgtggtgtacaaggcaaaagaatgcttctgtcatgagcgagttgactagctacctggaacctatccattacttgatgagggcggtagtccttttctgttttcttttcaagtatttggcatcaggattggtgcagccatactggttattgaatactgaactacttccatgaggttggtagatagctgctgcttgagcccagcaagcacccctaccttgctcccctggcctcttctccaggatgcacaagcatccccaggatcccacaactaaagagttgttacctgacacagcagaggatcaccaggtcattgctcaggtgactacactggtgggccagtgcctttgctgggctggctactcattccactgattgtgacatccacttggaactatcattcaagatgagcagattctttatcatggtgcttccagatggtggctggcattaaactagacaccagtacaccaactatttcctcatatctctcctctctgacttcagaaatgatttctcccaatgagatttttgattttgatgccagctttatatctcactgtgattaggacggggccttatgatgggagaattagacatgaccaactatcatcagtttttgttttctcagtgagtttttggtgctctgatcttttttccttctatctgatttttgatacatgaacaacgaacatactagcaggaagtgatcacagagggagtttaaagaaaactatttttactgctgttgggaaaaggcatctgtaaggcaattgaaactattcattaaaatttggtagtcatctatgggtctccaaaatgattcagaattttcccaggatatttatattcttttgatattccttagaaatgtgaggtattctttagggcttttgggatagcaacaaacatgaaatgtgtaagaaatgcttctagaaaagtatttcttctgaaattattattttaatattattaaaatattaaaattttaatattttagaactctttggtaaaatttggtaaaaattattgaatatagataaacctaatgcagttattcaatctttagtctcagctcattgcttccaacataattatactttgtcaaatacagctaatcttaacaactactcatagccagaaaagcctttctttttttctttattcttcttcttcttcttcagcggaagtgctagcaaacagaaaaatgtattgataccagaaataaactctggtttgcaaattaaacttgaaattcttgagaaagtctgctcctcagcgttactgaaaactataatcgttgggctcacttacctatcatatgctaaaaaaaaattggatttttatatccagtaaagcaatccatttgagcttttccttgtgttcacagtgggtaactgtaggttcttaatatcaggaccacatcccaaagttgcccatctaattgctcctcttaagtaactatattcaacaaggtactttaagatcaagtgacttaagtgaactctggaataatttaagaaggcccccaaatttctaatcattttaaaacattctataaataaaagttatgatctgcaactggacttaaataagattgcaggacacattttgtgttttattgttatcattaccattatattgggaatgcattcaagtaatttacagatacttttcacacgaatgcccttattagttaggtggtgacctgactctgggagccctgcctggatttcaggcagccctgcgcaaaggggcagcctcacttctgctcagagtggggctcgtctgtgggtgtgaggccactcctgtgtctttagcaaatgtcaggctcctttgcccccctcactgctacccagctgccaatcccattcccagccttttagttctttaggcattttccttttctcttaatagaaaagaagttccaatagaaataccagaagccacattctcagtattacatcagcttttctctctttttcctttaccaactcccaaagaggagttggggctgagctgtcttacagttgaaacttgataggccatgaagtcctttcaggaaaagtgatttgttctttcagaatccctaattcagtcttgtgatgccccacaagctgttctcagttttttgttccaccctagagcccagataacacattttccatattttccaacatataagtctgtggtgagccttgggttgtatttccaaatgtctagggttttctaaatgtcagagattgaggccacttcaattttcaatagcctctcacaaagcgaaaggctgtcataacaatgttcttgttttataaaattttgcatttaacctactagtgaatgtaaggcagaatattgcagtattatgtgtgcacaggataatttcaggattagagaagataccacaattaatagcacattggaagtagtgtgttctaatactggggcactaatttgaagttccacaacagacaacttctttcattcctgccagcgcgtttctgggactttagtacagacaacctcatttggagataatctcaaaagtctacatttgagggcctttgtgaatatgaggcctcctgccacctgcagagaccttttctgtgacctttgctgtccttcaacaatgtgtcatttgcctctgagttttgaggctgggttaacatttatttcacatttgtttcaaagaagactgtatttttctctctttatagagaactctttaaatacatgacgttaggaaaccagttacacttgtttcagctgagctgaatttttaggggaattgttgctttggtttgctctctcaagcatttcatttcaacaaatactctctgtatggctataaccctctgcatggctgacgcattacacaggcttcaggtgttggaaacctatgcaacatttattatcttagacatggctccccagtgaatacctcggtggtaatcaagaataacattgaataatcctgacacgaaatcttgtgtctttctaccattcatctgcctctggtagtcttgacctggcagtggaagctctgaggcatgctgaagcagtttactgggctcattgtttctgattgacaggacatgctgtttgttgacagaatgacatcgtggtgcagagtgagggcagggaggtcattcagcatggtggggtttcacacagccagatggatcagagggtggccaagggggtctcagttaaaaaggggtttttgaattattttcacagcagtatttgttggtgggaggagacaaagaataaaaaggaaagaaaaatagataaaggtattggagtgagagggggattgtaaagtagtgttttagtgttttgtgtggtttccactatcttttctactctcacgaaaaccctcaattctacttttatttttcttgtcttcactctggctgctgatggatgttaattaaccttcatatttctctatagtgatccaaggatacaatcttattgtcacaaaagtgacagcaattttatacactcattcaaatcctgttttttgtgatagggtctcactgtcgcccaggctggagtgcagtggcattatcacgctcactgcagcctcccacttcagcctcccgaatagctgggactacaggcacgtgcctccatgactggctaatttttttttttttttttttaattcttagtacacataaactcttgccatattgcccaggctagtctcaaacccttggactcgagcaatcctcccaccttaccctcccaaagtgctgggattataggcgtgagccactgtgcctggcctactcattcaaatctttaaaccacttgtagtgcaggtgataggaagggcatttgtgctagagaattcctagttatgacttctccgcctttggtttccttctgtttgacatcagaacttctgcttagagtgactccagatccttagacgtagtctcatggatcttgcattcaaaatgaagttatgacattctgggggtttgagggagaatgtcctgtacttttttttcctgctgaggcaaagccttaggtggagctttctcagggctgagttaaggggacagaagggattcatcagtgagggcatttctcaccctcatgtggcatttcacttggtagtgtccagatcggattgggttttttttcctctggttagtcacggtccttggaaagaaagatatgctggctcatgttgttatgtttaatctgcagggaaaatgggatcattagaagaaccttcttggggctggatgcggtggcttacgcctgcagtcccatcactttgggaggccaaggcaagctgcttacttgagatcaggagtttgagaccagcctggccaacatggggaaatgccgtctctactaaaaatacaaaaatattagccaggtgtggtggcgcacacctgtagttccagctactcggtaggctgaggtggaaggattgcttgaacccgggaggtggaggttgcagtgagccgagactgtgccactgcactccagcctgggcaacagactgcgactccatctcaaaaaaaaaaaaaaaaaagaaagaaagaaaaaaaaagaaaaagaaaagaaaagagaagaaacttggccttttggtgggttgtggaatggtgggccacccagcaggaatggttgaacccaattcacaactctgacagttgctgcaaatgcaatcagatcatagaaatctggagaattctagacttgggagtgcagtggtttcagaaattataatctacttgagaacttcctgaaaccagagggtgtgggaactctattgttatagtttgtataggtcatcgtcccagggaagcgagcagggtgaaggatgatggagagtggacgtggacttggaaagtcagatgtaccaatttctgcacccctgaagccttatagtctttaagaaagactcttctagtattttgttctgttctcccctccatattctattgtttatgtcaattatattggagctatttttacacagtagaactgggacttctctggtaatgaacagagctctgtcatgtaagggacttcaatgaacacttactaaatgagtgaataataagttaaccaataagtagaggagaagaaatttttgatgtcttgaaaagaagttcaatttaattttggttataattttttgacatcagaggaaagacagctgggtaaatagacctttccaagtactttattgcagtcatagatttgtttcttcctgaggggctgtctataggcaggtcttattttattcagaaatagtgctgtccaatagaactttctgcagtgatgtaaatgtgtatcttcactctctcatattgtaaccactagtcatatgtggctattgagtacttgaaatgtggcaagtgactaggaaagcaaattattaattttattttattttaattaatctaaagatacatttagatagccacagggggttagtggctaccatgttggaaagcatagtattaaagggaaacatttacaccaaaatttatatatttgtagactaacattaataaatgaaatgcaataccatagggctatgaattcaggaagtgttgtgcattttctgtaaagttatccttcatgtaggtttaaaaaatgatgtaaatgttcttcttccttacatgaagatggttgttataaattcttagaacctgtgcctaactccagagggtgtttatttagacatgggcaacaccacattcttggccatcttatctaggatttttgtcagagagtgcttaataaatgctgataaccttgactacaaatgtgtattttccatatggcagagtttgatgattgccagatatggggaatttgtgaccagaagtgtgaaagccgacctggccgtcacctgtgccactgtgaagaagggtatatcttggagcgtggacagtattgcaaagctaatgattcctgtgagtaaattatggacacctgtgtctctgaacagtaaacagattctaatagcttctttccttccttctgatgacaacagaattatcagcatttttgctgttggcagggctttatcattacaaatcagggatggctcctactgcctagaaaaattggtcaacattaatttcatactttgattattaaggaccaatttgtcgattaatggtgaccattattaatattttttaattggctgcttgtttactttgcctaggctatcatgtcacccacctttaattgtgaaataaatgctatgcctacatttgattggcttggacatttaacttttaattaattacctaccacaaaagtaggtgataactatctacagaaataattttcacagtgttcttgcaaaatttaggggcatttccaaatggacatgctaaatttggattaaaaatttttgatgccaactctggtatttgaggacatgaagattgaaataaagatacaatataaaaaatctgaaatctcaaatttagccaactttagctttattccggcagcccaatctcattcaatatcatattaattctgttctcaactatcccaacgaagcctttttttttaaactttcgggattagccattaatatttattcatgatatccattaaaaaattatcccagtccnnnnnnnnnnnnnnnnnnnnnnnnnnnnnnnnnnnnnnnnnnnnnnnnnnnnnnnnnnnnnnnnnnnnnnnnnnnnnnnnnnnnnnnnnnnnnnnnnnnnnnnnnnnnnnnnnnnnnnnnnnnnnnnnnnnnnnnnnnnnnnnnnnnnnnnnnnnnnnnnnnnnnnnnnnnnnnnnnnnnnnnnnnnnnnnnnnnnnnnnaaaatagatgagggctccaaagcattttgtcgctgttgatttctccggacgaaggtctcaatataaactcctattttccaatagttatttcacacttgattttgaagtgtctttggtgtcttctgaaacttaactgctcccatgactgaagaatggcccattttctacttgtttttgtgtagaaatacctgatttgctgtgtagtaacttttaggttcagcggatttttaacaattcaatgtgtttatttttgcataggtaacatatttatatgttcacaaattttaaattataagaagatatgtagtgaaatgccttcctccataactattcccctctgcatggttttcacctcctctttcctatgagtaattgccatttctttattttagttctagagattttttaatgaataaacaagaacatacaaatatagatatttaactgtatttacatatctatatatggtagtaaactatatgcacagttctgcatcttgtgaatgtactgaagatattttccagagctttccatatcagcacatgaagttatttcttaattattttatttatttatttttatttatttatttttgagaatgagtctcgctctgttgcccaggctggagtgcagtggcgccatcttggctcactgcaacctccgcctcccgggttcagacaattctctgcctcagcctcccgagtagctgggactacaggcttctgccaccacacccagctaatttttgtatttttagtagagacggggtttcatcatgttagccaggatggtcttgatctcctgacctcataatttacccgccttggcctcccaaagtgctgggattacaggcatgaaccaccgcatccgtccttatttatttatttttgagatggagtcttgctcttgttgcccaggctggagtgcaatggcaagatcttgcctcactgcaatctccgcctctcgggttcaagcgattctcctgcctcagcctcctgagtagctgagattacaggcccccgccaccatgcccagctaatttttgtatttttggtagaaacggggtttccccatgttggccaggctgatctcgaactcctgacttcaggtgatccgcctacctcagtccctcaaagtgctgggattacaggtgtgagccactgcgcccggccttaattattttttttataatggcataatattcctttttttatgttcataatttgtttaactagtcctctactgatcaatttttatatcattccttatcttttgctattgccaataagactgcaattaataccttgttcatatatcattttgcatacctgtgagtaaacagacagaacagatttggaaccaccattaccatctttttcagagtgattccctggtaatccttaaaatgtcttctgtgtttaacaaaatctaaagttgcacatggggctaaggtgcccatatcatcaaggagtctcgaaaatatctgagaaatactctcctcagtgtcattgaaagtgcattggactagcatccagaatgcttgaattcttaccaaattcttcctaacttactgagattttggacgcttcattaagcctttttgtgcctcaatttgcccttctgtaaaatggatagaatgatagctatctgtctgcctcagaggtttatgttaaaatcaggtaagacaacctagaagatagcatttgaaaaagcagaaagcatatcatttgtaagctacttcaccatccttgctcatctgaaggagtggtgatgccttccttcttcgcatttagttggcgaggcctccattatcttctccaatggtcgggatttgttaattggtgatattcatggaaggagcttccggatcctagtggagtctcagaatcgtggagtggccgtgggtgtggctttccactatcacctgcaaagagttttttggacagataccgtgcaaaataaggtaaatagaattttcagtagctgaatggaaccctgagcacaaagtgttgatagcttttcacttttagagggagtagaggggaaagttcctttgttttctaacaaaaaaggcccttgagatattttatgttaatcagcaccttttccatgctatactattacatgtgacctattaaacaaagcagtctattatatggattagccttgagcaacttttaattttattcgaagtggagtccaggagcctaattaaaagaaatagtagacattctttcaaaactggatagatatttggtagtaatttttgaaatttgatcatttaaaatgtaaaaagcacactgcttttctggatgataaaaatcagatttttacctgcatcttctaaatggaactgtaattcgggatcgagtaacaaatattgacggtattttgtttaatggccaaaatttttttccactgtcttatttggaaagtgtgataggtttaatttcatcttggagtaatgcaatggagatttttgaaacataaatttcagaaactcttaaagagttatggaattttatttatttcttcttacattttattataccattaatacaattctcatttatttaaatgataacttgcatgacatttctgaaaattgagaatttagatttttagcacttctgatttgattatagctaaaaaaaatcaaaacaaaccacgtagttagtgatgctgaagaaatataataactttggtttttctttcaggttttttcagttgacattaatggtttaaatatccaagaggttctcaatgtttctgttgaaaccccagagaacctggctgtggactgggttaataataaaatctatctggtggaaaccaaggtcaaccgcatagatatggtaaatttggatggaagctaccgggttacccttataactgaaaacttggggcatcctagaggaattgccgtggacccaactgttgggtaagtgatgtgaaaacatattgattcctgtatttttagaattttctctctccctctatacactgaacatccactggattaatcaaaggctcattctgatttcttttagactgtatactctagaacccatgtctattttgtgcccttatttatagaagctttaagagagtttattaaatataatcctatttgaggacatgtcacccaaacacacctagtggtgtactaaaaatatttgttgttttggggctatgaattttattcttagtgtttgccacgttttcctagctaagagattggattctgtgttctaactcaatctaataatattattacaactaaacattacttatgcttcattattattaagatgattactctaacatgaattagctgtaaagatttttaaagatggaggttggaactattcctttcagaactttcttgatacaggctgggattgagatatcaatgctaatatctcattacaagttgttcagtctgaatcaatccaacaacaccgataatgcttttcctcaggtttaaatttaaatttcccaatcttcacatttgagaagtgttataggagacttagctttctcctagaatttcacaattgggtcttaggacccttggataagctttaggctattttagtctttgtgaatgatgattattcagttctacttcattatatcagctatccttccttgaaaatgatggaaatgttctctgtgcctcagaatggaaaactgaggagcaaaatggcttgatagcttcttttaaaaggtatttgtaagttttcctgggtataaaaaagagaagcaaaggacaaataaaggaaagagaggagaaagttcagaaggtgaatatgaatttttttttttttttttttgagacaggttcttgctctgttgcccaggctggagtgcagctgcacaatcacggcatgctgcagacttgaacttctgggctcaagcaatcctcccacctcagcttcctgagtagctgagactacgggcaagtgccatcatgcccagctaatcttttaatttttgtagagatggggtcttgccatgttgcccaggctggtcttgaaacatgggcctcaagcaatccttctgtgttggcctcccaaagtgctaggaccacaggcatgaaccactgtgcctggctggctgaatatgaacttttagactgccatattagtgcatcataatagttgctatttggaactgttgacactcctgattgacccccacagtctctttaaaaaaaaaaaaaaacttaatttccctgttgttttatactgtggttctctaatcagctggataaaatttccattgatccaaacacactattaaaaaaaattcccaggttaacttgtaaaataccagattctttcatcttctgtttttcttttgtagttatttatttttctcagattgggagagcctttctggggaacctaagctggaaagggcattcatggatggcagcaaccgtaaagacttggtgaaaacaaagctgggatggcctgctggggtaactctggatatgatatcgaagcgtgtttactgggttgactctcggtttgattacattgaaactgtaacttatgatggaattcaaaggtaagaagtattttttatggcttatggctttattgcagggaaagtgcataaaatggctggagagaaatctcaaaggaccagaattaaaatattgctttgttggtggacatgatagctttaatgacctttgtactgacatttgcatgaagtgacctgctctgttttgttaacttttcttatgtcccataacacaagaggtaaacgctcgttaaatataacctccatcatttgttctttgatttctcctctccaactcctcccctagtcccacatgatgcacattattttcattcactcctgagttcatttgtgctttgtttctcaagatcactttcccttttaattttctaaccttcccccaataaatacatgttttattaggtatttgatgttgcctgctgggaattaattggattttactctgctcttatatatttcaaatttcaaggagaaattctttgtattgtatttttacctggtatacaaagatacttaaacggcaatatttgaatgtagaatatggctttttttttttttgagctggagtctcactctgtcacccaggctgaagtgcagtgatgcgatctcagttcactgcaacctccacctcccaagttcaagtgattctcctgcttcagcctccccagtagctaggattacaagcatataccaccatgcctggcaatttttgtatttttagtagagataaaatttcaccatgtttcccaggctggtcccaaactcctaacttcaagtgattcgtctgcctcggcctcccaaagtattgggattacagatgtgagccactacacctggccgaatatggcacatttttttttttcatctttttactctgattagagataactataacttaatgtaaaaaaaattattttagatcctctcctttcggtattttcaaaaattgggtaaaacatgttcttcaaattttgacccaaaatattattctttgtggattcagcaaataggctggttaacttaatttttcccaatgacttgattttattgttttctcaatgaaagcaatattatagttttgtttcctcttgtatttccattttgtaaggataatatcacagtttgccattggattatatatccttgggacaatctctgcttggttaaatgaagtattgggtattaatatggtgacttcctatcactgaaactggcttccataaggagaatatgaataaattttatgaaaaaattaactaacccaataagtcacataaaataattgtgaaattgcttaaattttttctctttgggatgttttagcattatattatatagtctaacttttgctgaagtaaaaaaaagtaaagcataaaagataaaaatcaatggaatttcaaaaagatttgagtggtttgctggctgtgaagaaacatcaaagaaatattaaagctcacaagtacagctgtaatcataaagtcattgcctctcgctttgccagcaggtggcattcagggttttggaatttgctaactgagaaagaaactattctctaatcttaatgtaccatgtcattatagaatgtttcaaagtgtgcactaacctgccaccttaggtttctttgtttactcccctttagtgtgtttcccagctttaatatcttcaagtcttttcttagagctctattgtcctttttagttttcaggggatgctaagatttttctttgaggtctttgtattacgccaaaataaagaaaataagagttttcccgtatcaaccgtcctctgcctcactctgttcatgagtctaactgaatcattgtttatggagacatagtcatggggggcgttgttgatttcctctctttgcttagtgcctaattttacttctgttttcttcccagttaagtggctttgggcctccattaaaagtatgatcagttgatagttccatcaagcagatgcataagagtggtagtggcattgcttcttgctttccttacagtgacatcaggaacagatgtgggcgtttgctggggcgtgaaccctaccactcgctgtcctgctccctaattgctaggaaatggtcaatggtgcagtggaaaatagttggcaaaggcatcttttcccagacttccaaagtcttggtatactctttcacttatggtattcaaaatgctatttcacatcttagccttttagatgtggggcaacctaaaaggaatgaagaacaaaagggaaaacagtaaattccaagaaagtctaggacaagctaaaggattgactgggactggaatgtaagtctcaagggtcttttccaagagacaacatgaaaatccttctatcatatatagatggaaatatgtatacatctaaaatgtatcttttctatctattccgtatttgtgacaagacattatttagcttttcaggcatttaattgaactaactacagctttaattataataaagcaaaactaacacattgtatgatacatatgtgtcttttataacaggaagactgtagttcatggaggctccctcattcctcatccctttggaataagcttatttgaaggtcaggtgttctttactgattggacaaagatggccgtgctgaaggcaaacaagttcacagagaccaacccacaagtgtactaccaggcttccctgaggccctatggagtgactgtttaccattccctcagacagccctatggtaagcctcagaacagtggtaaccatgcttggtaccggacttggtggaaaggttttctcaaagctttgaaagttaataatgaggggtcttatgtgatttgggtggcattctcaagtatatgaagggttacccagagtgttaaactctctgaaactggttctgcaggttaggagcattctgaagaaactgatgtatttcacagttaaatgccaaatctagagggaatttagagatttatttaacagatgtttattagcacctgcaaagatgcttgggggtatagcagctcacaaaccaaaccaaaatacctatcctcattctactgggaaagacatctatttcaaacttctaatattacagttaaggaaacaggtcccataggagaaaatgacatgtctaagtgtccattttcggtagcgtcagagccatttttttcttcttctctgttgcatatgtatggcacctgttctttggttctgattaatctgtcataggccaactgggtttggtgtctctctggctggtcacatattttaaaaaaagaaatattttgattcagacactgcttagtcttctcctgttattttaccatgtgactttttctttttattttttctgagatgggatttctactatgttggccagacttttctggaactccgggcttcaagcgatcctcctgccttggcttcccaaagtgttgggattacaggtgtaagccactgcacctggcctatcataagctttgtttatgtttccaggttatagcttgagctttgatacgtctatcaggactgtatatagctcttttctgtatttgcttgtagatcaaagaaaaagaaacataaactacactacgttggtagaaagcttaatatcggtgagcaataatttagaggaaaacagatttgctctaaaactcatgttaagtgatggatctatttaggatgaagaaagactgcaaagtaatgtggttaacttaacaaaagcccaaccactagaactgatacattcagatgaatctccttcaatgtcatcatcctgggaaagtataaacttgtctaaaaatagatattttatctgaaaacatttttggaaatatctattttgaatagtttttacactcaattcagaactaaactcacacctgccctcacattagatccattagatcaatgatcaatgtgatcactcaaattactattttcattatttggttcagaatgacatctgcctattgtttccccaaatcaatccacctgagaagataaagagaatattttaaagaataagtcaaaggctaagaagacaattttaaaagcagatataaaatttctagctgtggcagtgctcttcctaaggtcactactttgagagtggcttttggaagtataaactggtttgtgttgcagacatttaaggttttggaatcagatctggctttgaatcctagtcaagctgtttagctgctgaataatgttgggcaagttatttaactgtttagattcttggtttctcctctgtaaaattggaggactaatacttacctcttagagctattggttaagttggtttacttacaaagtaagcatccagtgagtaatatttattatatcctacaaatggcaaaaaagcagtgaagtgtgggttttcttttgacaattatttctaatcatggaggatagcagacatactctgacataattattggggagaaagttgtaggagttctttcttttttttgccaccgtctgttggagagtggatgggagagcagcagtgaaattgggagggttagtgtagccagatgtggatgtatccagtagtaaccagtagtaatgttttcaacacgttgctaatccattactctgtttcacctataggtgaaaagggctagaagtggcttcgtgtcttggataattacacatttctaattgcaatttaaccctgtgcatttttccttccagctaccaatccgtgtaaagataacaatgggggctgtgagcaggtctgtgtcctcagccacagaacagataatgatggtttgggtttccgttgcaagtgcacattcggcttccaactggatacggatgagcgccactgcattggtaagaagtctgttttggacgttgttggcaggtgacacaggtgtatgtgtgtccaaacctctaactagactaactgctactcttgaactggaccagctccctgtctaacttcttgactgcaaataagctttctgtagcccacagggcatcttccttggtaggcaccacttctactatacacagaactatgtttgaaaatgtaaatttctgtcttttgggattttgctttaatcccacatctaaggttttcttgggttcccttccccctttgtttcctgaaacctttttctcctattaactatgatcttgaaattccatatggttgaactttgagctcttctctatgctatgtataccttttccactttagatgttagccttaactttgatgggaagtactctacttctccccactttgacttctcctagaccaccacgtatgcccctttcaaccaggtaatcacatctgaatcttatctggcttttttttttctctctgtattccaaagtaaactcctgagcattgggtggctcagttactcacacagtttttcacctttcagttcaaactttcttgtatctgcctccatattcctgatttcattcttaccttgaaggtttcctttcttcctctttggtttcctacacatctattcacacttaagccattgcctgggccccagctaatgatgaaatgcactcctacaatatttgtttttcttattttcacttctacaattctcctttctgtgcctgtgacaaattcttgctctccagatgttgcggtttctagcgtagtatataaattatcttattctaacccacacaaatttgttaacttcttaggtagttttagattcagaaaaatcaccctcattaaaaacaacatgtatttctaactattatatcaatagtgcgttgtctaataattttgcttttaaattccgttactgcgatttttatctttgtcttgggcatacctccttcatcttcttgattccctggcatcctgtcacaatctcctctttgcttttaaacatcacttcttcttacctatttcctttatccctccccttccttccctgctttcactcctttatatctttatatttctgattgctgttaattatcttggtatctactgtaaggttcttggtgtagatctctatgcagaagttaaaccaacttgaggattgttacggaattgctatagagttcagctctgtatgatttttaaacaaaagattgatggcacaggtgagaaaggtttctgtgtgtgtgtgtgtgtgtgtggtgtgtgtgcatgttttgcctgtttattgtaatgatacttataacttgataattaaaactcagtatctaatttttaagcagtcctttttattttatttatttatactattttactttaagttctagggtacatgtgcacaatgtgcaggtttgttacatatgtatacatgtgccatgttggtgtgctgcacccgttaactcgtcattacattaggtatatctcctattttataaattaagcatatggatatcatttttcatataaatacattttaaggatacatttcttaggaagaaggaagattctaatacttgtatctccctcatagttgcttatctttttttcttccctgcattatttctaactatgctttccaaaaatttatttttacatttatttcagaattatattttataatttaaagtttgctctgtggatgcatttatctagaatttgggaggagagaaaggaaccatgctgtgactgactgtgctgtgttcttcttcctacagctgttcagaatttcctcattttttcatcccaagttgctattcgtgggatcccgttcaccttgtctacccaggaagatgtcatggttccagtttcggggaatccttctttctttgtcgggattgattttgacgcccaggacagcactatctttttttcagatatgtcaaaacacatgatttttaagcaaaagattgatggcacaggtgagaaaggtttgtgtgtgtgtgtgtgtgtgtatgcatgttttgcctgtttattgtaatgatacttataacttgataattaaaactcagtatctaatttttaagcagtcttatttatttatttatttatttatactattttactttaagttctagggtacatgtgcacaacgtgcaggtttgttacatatgtatacatgtgccatgttggtgtgctgcacccgttaactcgtcatttatgtcaggtatatctcctaatgctatccctccccctctccccccaccccacgacaggccctggtgtgtgatgttccccatcctgtgtccatgtgtgctcattgttcaattcccacctgtgagtgagaacatgtggtgtttggttttctgtccttgcaatagtttgctgagaatgttggtttacagcttcatccatgtccctgtaaagaacatgaactcatccttttttatggctgatagtattccatcgtgcatatataacacattttcttaatccagtctatcattgatgaacatttgggttggttccaagtttttgctattgtgaatagtgccgcaataaacatacgtgagcatgtgtctttatagcagcatgatttataatcctttgggtatatgcccagtaatgggatggcttggtcaaatgttatttctagttctagatccctgaggaatctccacactgtcttccacaatggttgaactagtttacagtcccaccaacagtgtaaaagtgttcctatttctccacatcctctccagcacctgttgtttcctgactttttaatgattgccattctaactggtatgagttggtatctcattgtgattttgatttgcatttctctgatggctagtgatgatgagcattttttcttgtgtctgttgcctccataaatgtcttcttttgagaagtgtctgttcatatcctttacccactttttgatggggttgtttgattttttctttttattttattttattttatttttttattatactttaagttttagggtacatgtgcacattgtgcaggttagttacatatgtatacatgtgccatgctggtgcgctgcacccactaactcgtcatctagcattaggtatatctcccaatgctatccctccccactcccccctccccaccacagtgcccatagtgtgatattccccttcctgtgtccatgtgatctcattggtcaattcccacctatnnnnnnnnnnnnnnnnnnnnnnnnnnnnnnnnnnnnnnnnnnnnnnnnnnnnnnnnnnnnnnnnnnnnnnnnnnnnnnnnnnnnnnnnnnnnnnnnnnnnnnnnnnnnnnnnnnnnnnnnnnnnnnnnnnnnnnnnnnnnnnnnnnnnnnnnnnnnnnnnnnnnnnnnnnnnnnnnnnnnnnnnnnnnnnnnnnnnnnnnnnnnnnnnnnnnnnnnnnnnnnnnnnnnnnnnnnnnnnnnnnnnnnnnnnnnnnnnnnnnnnnnnnnnnnnnnnnnnnnnnnnnnnnnnnnnnnnnnnnnnnnnnnnnnnnnnnnnnnnnnnnnnnnnnnnnnnnnnnnnnnnnnnnnnnnnnnnnnnnnnnnnnnnnnnnnnnnnnnnnnnnnnnnnnnnnnnnnnnnnnnnnnnnnnnnnnnnnnnnnnnnnnnnnnnnnnnnnnnnnnnnnnnnnnnnnnnnnnnnnnnnnnnnnnnnnnnnnnnnnnnnnnnnnnnnnnnnnnnnnnnnnnnnnnnnnnnnnnnnnnnnnnnnnnnnnnnnnnnnnnnnnnnnnnnnnnnnnnnnnnnnnnnnnnnnnnnnnnnnnnnnnnnnnnnnnnnnnnnnnnnnnnnnnnnnnnnnnnnnnnnnnnnnnnnnnnnnnnnnnnnnnnnnnnnnnnnnnnnnnnnnnnnnnnnnnnnnnnnnnnnnnnnnnnnnnnnnnnnnnnnnnnnnnnnnnnnnnnnnnnnnnnnnnnnnnnnnnnnnnnnnnnnnnnnnnnnnnnnnnnnnnnnnnnnnnnnnnnnnnnnnnnnnnnnnnnnnnnnnnnnnnnnnnnnnnnnnnnnnnnnnnnnnnnnnnnnnnnnnnnnnnnnnnnnnnnnnnnnnnnnnnnnnnnnnnnnnnnnnnnnnnnnnnnnnnnnnnnnnnnnnnnnnnnnnnnnnnnnnnnnnnnngactaagtagtttccattcgtaagaagtcatgtagctgatgggatgcatgatctataataccttggcagatgccatttcacgatatgatcttctaccatgagcatgaatgttctccattngttgtatcctctttattccttgagcagtgtttgtagtctccttgaagaggtccttcacatccctgntaagtggattcctaggtattttattctctttgaagcaattgtgaatgggagttcactcatgatttggctctctgtttgtctgttgttggtgtataggaatgcttgtgatttttgtacattgattttgtatcctgagactttgctgaagttgcttatcagcttaaggagattttgggctgagacgatggggttttctagataaacaatcatgtcgtctgcaaacagggacaatttgacttcctcttttccaaattgaataccctttatttccttctcctgcctgattgccctggccagaacttccaacactatgttgaataggagcggtgagagagggcatccctgtcttgtgccagttttcaaagggaatgcttccagtttttgcccattcagtatggtattggctgtgggtttgtcatagatagctcttattattttgaaatacgtcccatcaatacctaattgattgagagtttttagcatgaagggttgttgaattttctcaaaggctttttctgcatctattgagataatcatgtggtttttgtctttggctctgtttatatgctggattacatttattgatttgcgtatattgaaccagccttgcatccaagggatgaagcccacttggtcatggtggataagctttttgatgtgatcctggattcggtttgccagtattttattgaggatttttgcatcaatgttcatcaaggatattggtctaaaattctcttttttggttgtgtctctgcccggctttggtatcaagatgatgctgacctcataaaatgagttagggaggattccctctttttctcttgattggaatagtttcagaaggaatggtaccagttcctccttgtacctctggtagaattcggctgtgaatccatctggtcctggactctttttggttggtaaactattgattattgccacaatttcagctcctgttattggtctattcagagattcaacttcttcctggtttagtcttgggagagtgtatgtgtcgaggaatgtatccatttcttctagattttctagtttatttgcgtagaggtgtttgtagtattctctgatggtagtttgtatttctgtgggattggtggtgatatcccctttatcattttttattgtgtctatttgattcttctctctttttttctttattagtcttgctagcggtctatcaattttgttgatcctttcaaaaaaccagctcctggattcattgattttttgaagggttttttgtgtctttatttccttcagttctgctctgattttagttatttcttgccttctgctagcttttgaatgtgtttgctcttgcttttctagttcttttaattgtgatgttagggtgtcaattttggatctttcctgctttctcttgtgggcatttagtgctataaatttccctctacacactgctttgaatgcgtcccagagattctggtatgttgtgtctttgttctcgttggtttcaaagaacatctttatttctgccttcatttcgttatgtacccagtagtcattcaggagcaggttgttcagtttccatgtagttgagcggctttgagtgagattcttaatcctgagttctagtttgattgcactgtggtctgagagatagtttgttataatttctgttcttttacatttgctgaggagagctttacttccaactatgtggtcaattttggaataggtgtggtgtggtgctgaaaaaaatgtatattctgttgatttggggtggagagttctgtagatgtctattaggtccgcttggcgcagagctgagttcaattcctgggtatccttgttgactttctgtctcgttgatctgtctaatgttgacagtggggcgttaaagtctcccattattaatgtgtgggagtctaagtctctttgtaggtcactcaggacttgctttatgcatctgggagctcctgtattgggtgcatatatatttaggatagttagctcctcttgttgaattgatccctttaccattatgtaatggccttctttgtctcttttgatctttgttggtttaaagtctgttttatcagagagtaggattgcaacccctgcctttttttgttttccatttgcttggtagatcttcctccatccttttattttgagcctatgtgtgtctctgcacgtgagatgggtttcctgaatacagcacactgatgggtcttgactctttatccaacttgccagtctgtgtcttttaattggagaatttagtccatttacatttaaagttaatattgttatgtgtgaatttgatcctgtgattatgatgttagctggtgattttgctcgttagttgatgcagtttcttcctagtctcgatggtctttacattttcgcatgattttgcagcggctggtaccggttgttcctttccatgtttagcgcttccttcaggatctcttttagggcaggcctggtggtgacaaaatctctcagcatttgcttgtctgtaaagtattttatttgtccttcacttatgaagcttagtttggctggatatgaaattctgggttgaaaattcttttctttaagaatgttgaatattggcccccactctcttctggcttgtagggtttctgccgagagatccgctgttagtctgatgggcttccctttgagggtaacccgacctttctctctggctgcccttaacattttttccttcatttcaactttggtgaatctgacaattatgtgtcttggagttgctcttctcgaggagtatctttgtggcgttctctgtatttcctgaatctgaacgttggcctgccttgctagattggggaagttctcctggataatatcctgcagagtgttttccaacttggttccattctccgcatcactttcaggtacaccaatcagacgtagatttggtcttttcacatagtcccgtatttcttggaggctttgctcatttctttttattcttttttctctaaacttcccttctcacttcatttcattcgtttcatcttccatcgctgataccctttcttccagttgattgcatcggctcctgaggcttctgcattcttcacgtagttctcgagccttggttttcagttccatcagctcctttaagcacttctctgtattggttattctagttatacattcttctaaatttttttcaaagttttcaacttctttgcctttggtttgaatgtcctcccgtagctcagagtaatttgatcgtctgaagccttcctctctcagttcgtcaaaatcattctccatccagctttgttccgttgctggtgaggaactgcgttcctttggaggaggagaggcgctctgcgttttagagtttccagtttttctgttctgttttttccccatctttgtggttttatctgcttttggtctttgatgatggtgatgtacagatgggttttcggtgtggatgtcctttctgtttgttagttttccttctaacagacaggaccctcagctgcaggtctgttggaataccctgcagtgtgaggtgtcagtgtgccccctgctggggggtggctcccagttaggctgctcgggggtcagggacccacttgaggaggcagtctgcccgttctcagatctccagctgcgtgctgggagaaccactgctctcttcaaagctgtcagacagggacatttaagtctgcagaggttactgctgtctttttgtttgtctgtgccctgcccccagaggtggagcatacagaggcaggcaggcctccttgagctgtggtgggctccacccagttccagcttctcggctgctttgtttacctaatcaagcctgggcaatggcgggcgcccctcccccagccttgaaggggccttgcagtttgatctcagactgctgtgctagcatacagggagattccgtgggcgtaggaccctccnnnnnnnnnnnnnnnnnnnnnnnnnnnnnnnnnnnnnnnnnnnnnnnnnnnnnnnnnnnnnnnnnnnnnnnnnnnnnnnnnnnnnnnnnnnnnnnnnnnnnnnnnnnnnnnnnnnnnnnnnnnnnnnnnnnnnnnnnnnnnnnnnnnnnnnnnnnnnnnnnnnnnnnnnnnnnnnnnnnnnnnnnnnnnnnnnnnnnnnnnnnnnnnnnnnnnnnnnnnnnnnnnnnnnnnnnnnnnnnnnnnnnnnnnnnnnnnnnnnnnnnnnnnnnnnnnnnnnnnnnnnnnnnnnnnnnnnnnnnnnnnnnnnnnnnnnnnnnnnnnnnnnnnnnnnnnnnnnnnnnnnnnnnnnnnnnnnnnnnnnnnnnnnnnnnnnnnnnnnnnnnnnnnnnnnnnnnnnnnnnnnnnnnnnnnnnnnnnnnnnnnnnnnnnnnnnnnnnnnnnnnnnnnnnnnnnnnnnnnnnnnnnnnnnnnnnnnnnnnnnnnnnnnnnnnnnnnnnnnnnnnnnnnnnnnnnnnnnnnnnnnnnnnnnnnnnnnnnnnnnnnnnnnnnnnnnnnnnnnnnnnnnnnnnnnnnnnnnnnnnnnnnnnnnnnnnnnnnnnnnnnnnnnnnnnnnnnnnnnnnnnnnnnnnnnnnnnnnnnnnnnnnnnnnnnnnnnnnnnnnnnnnnnnnnnnnnnnnnnnnnnnnnnnnnntcttgaattgatttttgtataaggtgtaaggaagggatccagtttcagctttctacatatggctagccagttttcccagcaccatttattaaatagggaatcctttccccatttcttgtttttgtcaggtttgtcaaagatcagatggttgtagatgtgtgataacatttctgaggactctattctgttccattgatctacatctctgttttggtaccagtaccatgctgttttggttactgtagccttgtagtatagcttgaaatcaggtagcatgatgcctccagctttgttctttttgcttaggattgtcttggcaatgtgggctcttttttggttccatatgaactttaaagtagttttttccaattctgtgaagaaagtcattggtagcttgatggggatggcattgaatctataaatcaccttggacagtatggccattttcacaatattgattcttcctatccatgagcatggattgttcttccatttgtttgtgtcctcttttattttgctgagcagtggtttgtagttctccttgaagaggttcttcacatcctttgtaagttggattcctagatattttattctctttgaagcaattgtgaatgggagttcactcatgatttggctctctgtttgtctgttattggtgtataggaatgcttgtgatttttgcacattgattttgtatcctgagactttgctgaagttgcttatcagcttaaggagatattgggctgagacgatggggttttctaaatatacagtcatgtcatctgcaaacagggacaatttgacttcctcttttcctaattaaataccctttatttctttctcttgcctgattgccctggccagaacttccaacactatgctgagtaggagtggtgagagagggcattcctgtcttgtgccagttttcaaagggaatgcttccagtttttgcccattcagtatgatattggctgtgggtttgtcataaatagctgttattattttgagatacatcccatcaatacctagtttattgatttagcatgaagggctgttgaattttgtcaaaggccttttctgcatctattgagataatcatgtggtttttgtctttggttctgtttatatgctggattacgcttattgatttgtgtatgctgaaccagccttgcatcacagggatgaagcccacttgatcatggtggataagctttttgatgtgatcctggattcggtttgccagtattttattgaggatttttgcatcaatgttcatcagggatattggtctaaaattctctttttttgttgtgtctctgccaggctttggtgtcagaatgatgttggcctcataaaatgaattagggatgattccctctttttgctttgattggaatagtttcagaaggaatggaaccagctcctctttgtacctctggtagaattcggctgtgaatccgtctggtcctggacgttttttgggttggtaggctattaattattgcctcaatttcagaacctgttattggactattcagggattcagcttcttcctggtttagtcttgggagggtgtatgtgtccaggaatttatctatttcttctagattttctagtttatttgcatagaggtatttacagtattctctgatggtagtttgtatttctgtgggatgggtggtgatatcccctttatcattttttattgtgtctatttgattcttctctcttttcttctttattagtcttgctagcggtctatcaattttgttgattttttcaaaaaaccagctcctggattcattgattttttgaagggttttttgtgtctctatctccttcagttctgctatgatcttagttatttcttgccttccattagcttttgaatgtgtttgctctggcttctctagttcttttaattgtgatgttagggtgtcaattttagatctctcctgctttctcttgtgggcatttagtgctataaatttccttctacacactacttcaaatgtgtcccagagattctggtgtgttgtgtctttgctctcattggtttcacagaacgtctttatttctgccttcatttcgttgtttacccagtagtcattcaggagcaggttgttcagtttccgtgtagttgagtggttttgagtgagtttctggatcctgagttctagtttgattgccttgtggtctgagagacagtttgttataatttctgttcttttacatttgctgaggagtgctttacttccaactatgtggtcaattttggaataagtgcgatgtggtgctgagaggaatgtatattctgttgatttggggtggagagttatgtaagcagagattttactaagcttcctaaatagttttagattgagaaaataaatttattgcttttttatggattcaggtaaaacaaacacctttcctttattttagaaacaagttatttttgggaaccgagatgggaggattgcttgaggccgggagtttgagaccagcctgagcaacatagtgagattccacttgtaccaaaaaaagaaaaaaattagccagatgtggtggcatgtacctgtagtccccactacttgggaggctgcaatggaaggattgtttgagcccaggagatccaggttgcagtgagctatgaccataccactgcactccagcttgggcaacagagtgcaaccctatctcggaaaaaaaaaaaaaaaaagaaggttacaaacgtgtgtgtattttaacaatgaccaatgttaacataaaagaaatgtcacgtgtatgagagccattaacagattaattgactagacgctgtttttcatactcaagcagccagattgattaaaggggaagacatctcttcagggatgctggactatgtaaatgccaagggtttggtttgtaatagtaataaaatttgtaagcaatataacataccaactaagagagccagcttaggagctacactgcctggttccgaattccagcttcccacatttcctagctttgtaactttggggaagttactcaatttccttttgcctcaattttctagtctgaaaaatatgcagttcatatattgctcataaggttgttgagagaatttttggctaatgcatgtaaacacctcgagtaatggctagaaaatagtaaatattcagtaaatgttggatatcattatatctgttatcaatataaaaccatattgcccaccctcccctgcccctaatccagacctgctctggggagggaacagctcttttgactgtttcttcttttgtttgtctccatgtttctaaatgctttgtttatacttctatttcttgatttatcatttttgatatttacttccttgttctaggtgagcgttttgctttcttacatcattcttctctcccagcttctgacttccctccccctattctccttaaaaagctagattataatttttggttaaattaatcatatgtgtttatattattaacataatataaatataaatattgttcactgctcagccaattagtattctaggatgacatttcttgacaatttttgacaattgcctcattttcatttgcttagttttttaatataacaatcatgtattttccccaaatgctctaatagctctatcaaatgcctgtacaaagacagaaaacaatctataattttttttttctttctggagacccctatcctgtgttccagttgggacttgtttttctctggcctggtgcacagacttctctttgccactcccctgtgctggaacttctgtttgtggcaggacatttatttctttttctagatttatttcctcattttgctgaaacacgttacatgatagcttcctgagaaacataagtaggtggcatatattttgagtctttgaatgtctgtgagtgttttattttgctctccatcttgactgtttggctgggtacaggttgcaagttaatttaaacctggaatttgaagacattgctctagtgacgtctaatatctagtgttgagtccagtgccattctgagtaccatttctatggatatgaccttgatatggatatggatatgacattaaaaattaatcttcctctgtttccattttctcgggattccttttccttttgatttcttttcaactttcttctttttgatggaagctttttccaagtgtctgagttgctagtttggtattaagggtgaggttataaaacctgacccaaaagtctgtacatgtggataggccttgtcagctggtgagcttcaggcaggaaggtggcttggttgccagattgctccccaaggcaacattagtgagtcttttctggagatgatcaatttctccttcatagatgcctccattttccttcgtgaggtaaggggaagatgtggggagatggtggtctgttctgggggtgattaatttctcctccatagatgccttcattctccttcttggagtaaggggaagatgtggggagatggtggtctgttctgggggtgattaatttctcctccatagatgccttcattctccttcttggggtaaggggaagatgtggggagatggtggtctgttctgggagtgggcagaggaaagggagctgagagcgccctttcagtattcctataatcctcctgtactcagttccacatccatctcagttctctgttgaggactgtgccttgaacccatagccattctgcttcagctcctccagagaaaatcttggtcccttagaggagatagaggagtggcgtgacactcaggatctgggagggacctaggcattggattgttccttatcttgctttatctgagccccttagttcctcgcccctgcctttgttaggacctggtgcctctgagtgtgagtgcactgaggcttctgcatatgtgggtgtgtctctcttctgttgacacttagtttgtagcattttccccttcttgactgagttatcactcctccaatagcttacttttcaaacatttgttggaattactcatctgctgttattttactgtcttttaagtagaatttgggaggaagaggagataaacatgtttggtttgtcaatctgctattttgaatgagaaattatcttttttgaggacttagaatcaggcccactgagcttggagaactgcagtcgagcttagttctcggcaaaaggtagtattgggtttctagctgcatgcaggccaagtctcccacaggcacctccacagatcagcttccttctgttttgttgatctggaattctcatagtatttttggtaaacttcaagttcgtatgctaagcaacctaccttttttctattttttatttttatttatttatttattattacactttaagttttagggtacacgtgcacaatgtgcaggttagttacatatgtatacatgtgccatgctggtgcgctgcacccactaactcgtcatctagcattaggtatatctcccaatgctatccctcctcccctgccaccccacaacagtccccagagtgtgatattccccttcctgtgtccatgtgttctcattgttcaattcccacctatgagtgagaatatgcggtgtttggttttttgttcttgtgatagtttactgagaatgatgatttccaatttcatccatgtccctacaaaggacatgaactcatcattttttatggctgcatagtattccatggtgtatatgtgccacattttcttaatccagtctatcattgttggacatttgggttggttccaagtctttgctattgtgaatagtgccgcaataaacatacgtgtgcatgtgtctttatagcagcatgatttatagtcctttgggtatatacccagtaatgggatggctgggtcaaatggtatgtctagttctagatccctgaggaatcgccacactgacttctacaatggttgaactagtttacagtcccaccaacagtgtaaaagtgttcctatttctccgcattctctccagcacctattgtttcctgactttttaatgattgccattctaactggtgtgagatggtatctcactgtggttttgatttgcatttctctgatggtcagtgatggtgagcattttttcatgtgctttttggctgcataaatgtcttcttttgagaagtgtctgttcatatccttcacccactttttgatggggttgtttgtttttttcttgtaaatttgtttgagttcattgtagattctggatattagccctttgtcagatgagtaggttgcgaatattttctcccattttgtgggttgcctgttcactctgatggtagtttcttttgctgtgcagaagctctttagtttaattagatcccatttgtcaattttggctttggttgccattgcttttggtgttttggacatgaagtccttgcccacacctatgtcctgaatggtaatgcctaggttttcttctagggtttttatggttttaggtctaacgtttaaatctttaatccatcttgaattgatttttgtataaggtgtaaggaagggatccagtttcagctttctacatatggctagccagttttcccagcaccatttattaaatagggaatcctttccccattgcttgtttttctcaggtttgtcaaagatcagatagttgtaggtatgcggcgttatttctgagggctctgttctgttccattgatctatatctctgttttggtaccactaccatgttgttttgcttactgtagccttgtaggatagtttgaagtcaggtagtgtgatgcctccagctttgttcttttggcttaggattgccttggcgatgcgggctcttttttggtttcatatgaactttaaagtagttttttccaattctgtgaagaaagtcattggtagcttgatgggggtggcattgaatctataaattaccttgggcagtatggccattttcacgatattgattcttcctacccatgagcatggaatgttcttccatttgtttgtatcctcttttatttcattgagcagtggtttgtagttctccttgaagaggtccttcacatcccttgtaagttggattcctaggtattttattctctttgaagcaattgtgaatgggagttcactcatgatttggctctctgtttgtctgttattggtgtataagaatgcttgtgatttttgtacattgattttgtatcctgagactttgctgaagttgcttatcagcttaaggagattttgggctgagacaatggggttttctagatatacaatcatgtcgtctgcaaacagggacaatttgacttcctcttttcctaattgaataccttttatttccctctcctgcctaattgccctggccagaacttccaacactatgttgaataggagtggtgagtgagggcatccctgtcttgtgccagttttcaaaaggaatgcttccagtttttgcccattcagtatgatattggctgtgggtttgtcatagataactcttattattttgagatacgtcccatcaatacctaattgattgagagtttttagcatgaagggttgttgaattttgtcaaaggccttttctgcatctattgagataatcatgtggtttttgtctttggttctgtttatatgctggattacatttattgatttgcatatattgaaccagccttgcatcccaggggtgaagcccacttgatcatggtggataagctttttgatgtgctgctggattcagtttgccagtatttttttgaggatctttacatcaatgttcatcaaggatattggtctaaaattctcttttttggttgtgtctctgcccggctttggtatcaagatgatgctgacctcataaaatgagttagggaggattccctctttttctcttgattggaatagtttcagaaggaatggtaccagttcctccttgtacctctggtagaattcggctgtgaatccatctggtcctggactctttttggcaacctaccttttaaaatattcttcatagtcagtggttcaactctgtatgctttggtgagggaggcattacattgttctttttttttttttttgaatgagtacacagtatatgcaggaaatgagttgtcagaaatcaaatcagctaatgtggtggtgtggtgtagtgccagatacttgggaggatcacttgaggtcaggtgtttgaggctgcagtgagctatgattgtgccactgcactccagcctaggtaagacctgtctctaaagagaaagaaaaagaaatcatattaaaagtcaggattagctgaatgaacccctcagtagaactccctccatcaatgataccttctcttttccaaattctctttttctactgacttttccctatcatcagatatgctcaagtttctcccatcctaaaaaatatgcaatttacccttcactccatgttcctctttagtgataaccccttctctgcatttcatggtcaagtttcttgaaagattgatttgcactttcctatcccttcttccacatttctcactgattactcacctcttgcaatctgcccaccaggtggctgacactcctctcattctggtcacctctaatctctttcttgctaaattaaataatgcctatcagtcctgtatttggtacttcagccatcttctctcaaatattctttcttccatgacagcatactcctggatttccttctatttcttgatcttttttttttctagtgtacgctggagatcttttcttttttgcctgttctataaaaaactgtaaatctgttgttcaacactggttctcctctctctaaataatttcacacctttcatgcctttgattactatctacgtagcaactataaataattatggggagacttttataatagtgcatttactgagtgtttttcctcctaacctagggaatgagggaaagaccaagcaagcgttctgtgggtcatgataaaaatctctatgcaagttctctctctgaggttcagacccatagtgccagctgccttttggttatgtcacctggatatcctacaatcacctctaaaccaacatgtctaagtggatgcttcatccaacttctcacaggccttagaggaagggcatgaccactcaccccttcctttgtgccccatccccacctggtggtcatcatgaacatctccctctcttttagcctctatcattaactcattaacctccagccacactcctagaacatgtggaattttcagtctctgtgtctgtcaaccaccccagacctccgccttgccatgtggtccattaggaatctgtgctctcagaccatcctatgcatctctccatctcagcactcattactcttttatttttgtctcttggcctagttgcctcctcctctttcaccacctcactatgaattaccttgagggtggtgtccacacttctttccagatgcttaacttctctttgacttggttccctcatctgtagaataggaacgatactaatgcctacttgattgagtggctgtgaggatggatgaatccatgcagaatacttggtccagtttctgccacctagtaagtgctcatttaatctaagctgtaattattaacactattagcaatattgtgttttctaaatatatagttggctttctatcacatagagaactttcttttcaaaatttgctgaataaatgaagagaaaaagtagtaggatttttttcttcctactgcaaaagaaagaggtatggctgtttattctgattcagattttctttagtgaaaaaaagaaaaaagagggtaaaagaaggcataacaactccataaagaggaaagcgtttttttttttgtcttgttttttttaatcagttctgatttcctttctggtatctctgctggtcttttcaaaacttggcaactttgtggctgtggaagactgttgatgagagggttgggcgatgatacctcagggttaccctcaggtcgtacctggtggtgtcagcttatcagagccgtctccgggtggtagtaggtgaactcaggtatctcttcttcagatattctacagtgagaaatttttttctggaaggttggacatgggagtaaatccaggccataccattcctggttctgtttgtcagtatcatatctactctttgagatccaaagtttgaggaatggatagattctaggtttatctcacgttattgctcagcagcttacagagttttttttttttaaaaaagaattccacatgtgttcctgaaatatgctctaactctgacacaaaatttcagtgtgcattagtaggaaaattgatgccttacaaaatatacttagcttaaaatatgtccatattttaacttataggaagagaaattctcgcagctaacagggtggaaaatgttgaaagtttggcttttgattggatttcaaagaatctctattggacagactctcattacaagagtatcagtgtcatgaggctagctgataaaacgagacgcacagtagttcagtatttaaataacccacggtcggtggtagttcatccttttgccgggtaagtgtgttcatgttttcctaagagcttgaaactgtatgtcttttacagtcattgaaaagtgatgccctagggatttaggtaagttcagcaaatataagattgaactgtataagttgaaatcaccttaaattttatttcttttttccttcaaaaaactttattctgggggagtaaaaaaaattgtttttaaacccaaaacatttcttctaacttttggctttctcagtcttcactgaagagtagtttttttcacagttgcagaggaccaaacaatgtgatatagattcagtagaaaaggagtgaataggcaacagaattaacaagaaagacccaaattctttccctgctttaatatatttatataaagcttagcaaaacttgcttaatcattcagtagttttcagaataaaaagtttttcagaccacaaagtttcatgttttaccattctataattggtggtgccagacaaggaaagacagaagagttcacagtattcctttttggttcctacttgtcttatttaaatatgtttaacagctactgtgtttatttagaacaaatctgagctatgtgttgtatatgagtggaatgataaaaaagatggctgctaacccaccaatgcctgattacccagggaacatccatacctgttcttccgttagatatataatctcatcagcttccaaagctagtttgtgaaggaggtatgtgtaaatacccattttagagagaatgaatctaaggcgcagtgagataaagtgacttgtgaaagggcccgcagctattaggcaacagtcagtattcaaattccagacctgtctgactggaatgcctgtgtgcctaaaaaagtctgtttgctgcgtctagagtgtctgctttaatttcctctctgtaagataataaaagaaacacattttaaaactgatattattattgataagaaatttcattgccctatagagagttaaacagtttatttttttaatgaatttgtcttaactcaaacttttggcctttggttttgaaaaactgttgaattcctttcctgttgactcttttgtttaaaatgatatgaagtagttacatttcagaaagttacattttggaaaagaataattttgattcctctggatcccataaaagagaaaaagttgtttttttattttcttttgttttttttttttgtgtgtgtgttttttttttttttttttttgcctctagacttatctttttcccactctttagagtattaaaaaaatgcttgggtcagatactgtttgcattgcattgatttggatgctttcttcatctgagatgaatggtttcctgcaaatttatcaattccttatggaagaatgactagaggatcctgaatgtttaatctagagagaaagagattgaaatgttttcttgctgtgttcattgtttattattttattttaataacgcggaatatttaataggtaacctgaattgtgtcttgttagagaatatgttaggcgacaatagttttagttcctaaactctgagacagtggttctcttctctcaatgcccatttaaatgccatttgtatttgtgactttggttacatgttaactaaattttaactgagaattacatgagttatacactaagtatgttaagttcaatagcatataaagaaaacaaaattaattgcagtatctggagaatctctgtttgttctaaatctctggaagtcatgtagtttgtcccagtgttgacagccttaatttactactgctttttctaggtatctattcttcactgattggttccgtcctgctaaaattatgagagcatggagtgacggatctcacctcttgcctgtaataaacactactcttggatggcccaatggcttggccatcgattgggcgtaagtaggaatcatcatccccgatacttagttctcttttactgcagaacacataatgaggcaggttgggtgatatgatggagtaaggaaactggtactgctttccctcgcagaattttaaataattaattggtgatgggagaaggatattgaacaagaacacaaaggacataaacatagttggccagctactgctggggtgaaaactaataaattcatgagtattctgagaaaattactagagaaagctgaatgacaagatttagtggaaactcaagatgggggaggtgggtcccaagcaacatttaaagtagggtacagatttgttgaactgtaggcagtgtgtaatttcttacagggagcatcttgagtttaggaaatctttggagtcaattaatcaacaaatgcacctttgcttacatgcactttgggagaactttaaaagtataagctatggttctcaagaaattgatgatctatctaggaatataggaaaaggaatagagtaaataagcttataaagatgaaatgccaaagtaacttatgggagaaaaaaagggaagaaatatatttaaccttttaaacatagattactaccaatgtttttcttagcttgttgatttcacaaggagaaaataaaatttctggctcaaagatagcaacattttaagttttctaagacgattgattgaaagccacttcatgaaaagtagccgtctctttctgggggacataaaactgttaaatttttaatgaatgtaatttaaattttaaaaactttgtttaataaatgtgtcaactgaccctactgtttttggatgccctttgtgtaaagggtgctctgatagtttttggataagagataactaaatattttattattttagtgcttcacgattgtactgggtagatgcctattttgataaaattgagcacagcacctttgatggtttagacagaagaagactgggccatatagagcagatgacacatccgtttggacttgccatctttggaggtatgttttaaagcaataaaagtatgtattgtttttatacattgcaagttacaatagtaaactcatcctcatgtggcattttcacaatcccagaaaagctggccactttaaaatgaaaaaatttaaaatggtgctattatatatagacaaaacatttggtttgttgatggtgtatttcatttttagagtgtggtttttgttttgtatatattcgtataatgttgacagtgtatatgggtacagcactttgtagattacatgtattatacaattcaacatcccaagtacttagttatacaagtatcatgtgatgaaacagtaaattactgccttcattttcaagaataaaacagcaagagctgtttatagtaatcattgtagcatttcattattctccagtgtttgtaagaatctcattagaaatccttgtggaaaaaacgattacacatattcatcaactatatgctgactgaatgactttgaaacttttttattcaaaatgttggagaactgacatcatctttgttttatggaagtgttaggttatgctttatgaagaacagcaagacataatttttttttcgtcaacctttccaaataatttcatgctactagtgaagattgctgagaagcatgaattctggggaactacagtcacaatgagcacagccaatgcttgcctgtcttctcagctccccatttgagtgcaggcatgctgttgtgagttgagttgctgggaataagaatgtagcctggtaccatgaaacaggtggtttgcttagtcttgaaaacaggagctctgtgaatggttgtatagcttgtgcactgcataaaaatgccaggccaagagggtgaggagacactgaaatctatcctgggtctgtttgacaaaccatgattactccagttagaggggtcatgttttgtttaagtctaccaaaagccctgtgtatatgctagttgtgtccctggttgaaacttcctactttgaataattaacacagtgcttgaaaagactagacactcactataaatcaaagactttctcacatgcatagaatgtatgtgtggaatgaatagttagtaagtatattgcatatcttgtcctgctgtctgtttatctgtggaggagtgtgtggtatttaaaaaatgctcatgagatttttgatgagttaattataaatactcctcccgtcccccttccgccgccgccatccatttactcccttttcactaatgatgtcagacacatgctatttgctgtcgcatagaaacattataaaaagttgaattttgtctgctctgggctgggatgttttgggattcaagaaaatgtagttttaatatcttttggtttcatcagtatgaaaaaaatttgaatgcatacccatgaggacaacacaacattcccaaaatagcaataattatttatttctttcaacattgctgtttattgtgaatttcttttggaaagttcttttgttgtgcaacaccatagaaattgtgtacctttttactaaagggctagatcttcttgattgtgcaccacacagaactaaaagatttattgaactacttacttatttaagtatatgaggatgcctttgttagtagtgggactgggattgccagtctctagaaagatttagggagtccagtgactgattggtcattgattagaccacagataaggaaattggtcaaataaaatttatgacatcttaaacattttctgattaattagggttttctagttaaactatcattaaagagaaaatccacattgatgcaattctttcttttaaaaatatatgtttattttcctgctgcaatagttagtgtaaagtgaacatgattaaatttttgttgtttagaatcttatgtcgcctctctcttaccattctgagcatcatggaacattagtagtgtggttgtagctgaatccacacttgtgttgagatttttattgatcctcaaacatacactgaaagttccttttttgggctagacctgtacttttccttctcaacagcttcttatttaagtcaagggaaaaaattacaatttaagtgctgtcattaaaacatagaatatgaactgtttgacctgggaaggatctcaggaatgattcagactgtctccttcacacagcgtagtatttgcctaagagcactcagcaggtgagcgctttagcgggcgcagacctatgaggcctcatttaatgctctgtagaagaattccccaattcttattttcactattacctatgcagaactaaatccaattgctactaaatgccatcataaaactccatatgtgcttgcctgaacctgaaccctgatattattaacatacagacttccacagagcattactagggagtaacaagtcgtggaaaatggttagagaaacatattacagatatttatgggggagatgatcgtacttgcaagaagcatttcaagcctattgcattttctcaagtgatttatttataagttagctgtgattgaaaatactaatctacccatgtttcttttcagagcatttattttttactgactggagactgggtgccattattcgagtcaggaaagcagatggcggagaaatgacagttatccgaagtggcattgcttacatactgcatttgaaatcgtatgatgtcaacatccagactggtgagtgagattgcccagttttttttaatttttttgtatgggtttatttatttgttacagtggctcctgttctctttaagtacttattacttaaaggtgtagctcctggtagttttatattcttgtcgttcacataatctaagagtgtaagacgtgaaatctctgttcaatgctgctagccttaaacatgttgtcaggaaaaacacattttgggacttttccatacctaaatggagtgttgtatttggcgggttgatttccaagaggaagctactttttagtattgggtctgaaaaatgttttgtcccgtttgttttccttcacaaatcaaacccgtgacccacctagtgaaaatgtacatgactgactccctcggggctttgcttttgcaggttccaacgcctgtaatcaacccacgcatcctaacggtgactgcagccacttctgcttcccggtgccaaatttccagcgagtgtgtgggtgcccttatggaatgaggctggcttccaatcacttgacatgcgagggggacccaaccaatgaaccacccacggagcagtgtggcttattttccttcccctgtaaaaatggcagatgtgtgcccaattactatcgctgtgatggagtcgatgattgtcatgataacagtgatgagcaactatgtggcacacttagtaagtagctatgcactggcgatatttcctgggatgaatagagtagaggtgggctttaaagaaaataaataaaagcttgggctacttatatgggaaaaatatcttttagaatttcagattcttaacatgcactttgaaggcttttaggaagctaagcaagaaatttcattcataatgttatggatggtttctggccttgatttagactatcttcaacaatttttttctttgacattggctgtttggaccaatgcagtcattatgtcttggcaaactcctcaaaaagtcaaatcgaaataaactagatctgaccaggcaaggtggctcatgcctgtaatcggaggccgagacaggaggattgcttaagtccagaagttcgagaccagcctgggaaacatgacgaaatccggtctctacaaaaaatataaaatggcacatgtatacatatgtaactaacctgcacattgtgcacatgtacccctaaaacttaaagtataataataataaataaaaaaaagaaatagatgagctcagaaaaaaatatatatataaaattacaaatagctgggactattacaaaatacaaaattacaaaatacaaaaaaaaaaacaaaattacaagtagctaggactacaggcacatgccaccacacccagctaatttgtattttgtattttcacaaaatttgtaaaatacaaaaatttgtacttgggaggctgaggtgggagagttgtttgagctgcggaggttgaggctgcagttagccaagactgtgccatgtacttcagcctgtgcaacaggagtgaagccctgcctcaaaaaaataagcaaacaaacaaacaacaacaacaacaaaaaccaaaaataaagtagacctaacctttagcaaccgagagaataatatcacagaataactacttgcaatcatagcctttggaaaatctcatgtgttgtattccttttctcccatgttagagtaaaataaattaacaatgaaatggtggtcttaacctttatattcttcttttgatggtaatctagtctatatagtttggggcctaataaacactattgcagaaggcaaaagtattacattcaaattaaaaaaaagacagaggacagttgaaatctcagaaatctctatcaaggtgaagttaatactaatagtaacctttcttttggagagaaagaggagtgacagatttgcaagagtaaagtgctcacttgtacatttttctgaaatttcttaaattttcatctttttgtgtattatcttcttgtttctaagagcacaaaattttaccttaatattttatctatttgcacttttcatatgacatattttcaagctttctatagtctgaatttgaaattgtggttggaggaagtaacagcttgaaagttaaggatgagctttagagtgaatccaaccagagcgtgaatcataggcaggttcctaaatctctcaaagcctcaatttccttatctgtaaaatgcagacaattatatgtactttatagtattcttgtgaggatttaaagagaacttatatgatgtgtgtgggtgcataacttagaaaaatgccttttctatgataaataccaaataaatgccagccaataatgatgttagtgatgatgacatcacttgatgaacatttctccttattatatacaatgcctccattaaaaaaggtgaactgagcctttataaggcaagaactcatttaaaaggctgtaaaaacaaatgtcttcatgaccagtttgttactattgtagataatacctgttcatcttcggcgttcacctgtggccatggggagtgcattcctgcacactggcgctgtgacaaacgcaacgactgtgtggatggcagtgatgagcacaactgccccacccacgcacctgcttcctgccttgacacccaatacacctgtgataatcaccagtgtatctcaaagaactgggtctgtgacacagacaatgattgtggggatggatctgatgaaaagaactgcagtaagttttgagctggtttcccttgattggtcagcctcataaatagacttcaacaaccaaacggccttgcattctttcctctaaggctcatgcaattttcattgtctctttagtacttctattccacttgtcaatctctgtatcaataggttacaaaaacaaaggcatgtgcctgcacatgggattcttagagtccacctacaaatattgagttctatggaagcaaagcaaggactgcctctgatgtcaaacatttcaattcagataggaattgaaaaagtgaaaatccctcggctatctatttatatatttaaaacaatattaaaagtcatatagatatatccagacctttggctattgatgtttctttttcatttggtacaaggaaaaagacatcaaaataaagaggcacagaaaatttaaatttcctttgatcttatccacctgttttccatcttgccagttctgctttcctttagcttgttgttttattttatgtcttcaataatagtttaagatggagcaaagttccctgggctaagttctagtcctggttgcctgactaggcaagtcactatcatttggaatagatgagctttaagatcccttctagctttcataccctataagtctgtatttaatataatttcatgttgtgggtggggccagccactgcatccgactccaaggctatggtcttaacagcaaggtaggaccctggtttttagaattgttctgttcagacttttaaatccagttttgggggtctgtctacacactgttgctacgaggcatgtgggtcatactggttttgttgcctaactgggttccattgcttggctttggtctagagtcacggacttcatagtattcatgaaatgtagtccaagtccaagcacatgatgctcactttctaaatgtggtctattttccaaggtgtaatcacagtttctgactctgccctgtaatctttttattctcaattctaaaacctatcctagttttgagttcttttgcttagctgactttgatagtgtggctgattcgaaagaattttgaacccatgtacaattgagataacttctgtagctatttagccatttttagtttggctctggtacttgttgcacaggaaataaacttggttttgttttcggatgacattagattcaacagagacatgccaacctactcagtttaattgccccaatcatcgatgtattgacctatcgtttgtctgtgatggggacaaggattgtgttgatggatctgatgaggttggttgtggtaagtgcattgctttcgtttttgttcacaatgtttatttagaaaaatctcagtgttaacacatggaaacagggaggggaacatcacacaccgggacctgttggggggtggggagctagagaagggatggcattaggagaaatacctaatgtagatgatgggttgatgggtgcagcaaaccaccatggcacgtgtatacctatgtaacaaacctgcacgttctgcatatgtactccagaacttaaagtataacaacaaaaaagaaaaatctcagtgtttagtcattttagccctgagctaatttctaatgcttttctctttcattcttagtattaaactgtactgcttctcaattcaagtgtgccagtggggataaatgtattggcgtcacaaatcgttgtgatggtgtttttgattgcagtgacaactcggatgaagcgggctgtcgtaagtaacacatgcccagcatgtttcagacaaaggggtcatttcacttttgccagtattgatattgatattgccacaaattttccctaactcagacaaactgggggaaagtatcctcaaaggaatgcggtattgaacatacagtaaaattgagtagacattgccatataatgtgtaattaacaaatcaagtggtagtataaatggacacttcaaatagtctcttagatgggctaaatatttcttagatatttttgttttcacttttagtttttcttaggacttcccactttagtaggtttaaacttttgaggctctactccatataaagatattttacttttaagtaaaaaaaagatatttcttttaagtttcagtagagaagtcatatcatggtgtagaaatggtatggagctgtgtttagtattgactctgatgaattcattctttgtgctattatgtgttgaatatctgctaagatgttatctatggagattatagaaggcaagagacaattaagcaagagagacagttacaagggtcttagaaatggcacagataaaattctatggaggttcagagaaaagaaatttcttctagttggaggattcaagtaggacttcatacagtataattctgatggatctataatcttcacagactggaaacctatactcacatggtttgttatttgcccactttttgttttaaatggattttagacttgcaaaaactcatcagtgagttgatcatttgtttgaacaatggtgttttagaccaaaaaaagtaagttttcatgaattctcctcctgcgtcagaaaggtagtgtgtaaagccatggattaaaaagaaaagttaaataaaatgcttatatactttatagtttgcacaacatctagaaattcctaatcactaattttcctgtttcacattaaaaacataaaattctgtgatgagctgaggttaaactgtcaattgccgctggcttgctgttgccttgtgagatccctggtagagagttttggtttacccttgtcaaatagggaagcagttcttacgtatctctccaggattgctcgatgaacagtggaaagtttgcaaagaactgagtatttaccatcgtctttagttagtgtgtgatggtttcattaggtatagttcatctgagagaaaataataacactcaaacatgatatgaaacacatgaagttcaaagtaatcatagctatttaagctctattgtaatgttctggtgattctttcatagaaagatagataaactttattattgaatctgcaattggaagaacattaaaaacacaggaaaaggaaacaggatgttcttttgacacaggtactcatctgctagtcagcagttgtgcgttctgtacttcgtttgttgtcagagccactagttgccacaaagaaatatttctatgtaccagagtgtgggagaagactctatatcatttagccttaaatattaatttggtcatagttgttactataaacctactattggatccaaaatcatttcctctgagtctagactataaaagggatcacaaattacattcacaagccaatttaccccatgttttccttctagcaaccaggcctcctggtatgtgccactcagatgaatttcagtgccaagaagatggtatctgcatcccgaacttctgggaatgtgatgggcatccagactgcctctatggatctgatgagcacaatgcctgtgtccccaagacttgcccttcatcatatttccactgtgacaacggaaactgcatccacagggcatggctctgtgatcgggacaatgactgcggggatatgagtgatgagaaggactgccctactcagccctttcgctgtcctagttggcaatggcagtgtcttggccataacatctgtgtgaatctgagtgtagtgtgtgatggcatctttgactgccccaatgggacagatgagtccccactttgcagtaagtttcctgaccacagtttactggccataaactcattctgaacagtagcctggtgtgcatcaccattgtcacagtcactgtgtagctttgtaggaaggatttcagttcctctatgagttcacatctgtgtagggggtaaccataattgaattcaaatacatcaccattggataattttctgattaaatcctttgtacttggttatgtgtttttacttctttttatgtctttgtttcaaaaaatgagactaaattgaggccattagattgtcaaattaaatttggttctgttggtaatgtgctcattaatttttctaactttaatattttctaatttcaatcagaacttatcacaaaaaaatgaagtccagggatttgtgttgctgtgattaaagtgctgtgattggcatgtaatcctaattactgtcatttctttctttcctctttaatcaatgctcactctcagatgaaccccagccaggtatgatcgtgaagtatttcagattcttatgatttcatatgtgttgtgtttgttctgaaaatgtcctgattatattaacttacttccctttctaatgcatgttctgtgttatgactcttacaaatatgttagagtacacatggaaatagaaggcatttgcatccccaggcatgtgaactgtcttagggtggctttaggcattttcattttggccctgaaagtaaggcatgatgatatgttaccagatctgtgtactctaatgtttcaatgacctttcccctttgatttgttcacttcatagattttctggtcttttctcttaaatgtttgtctatcttccatttctgtatagatagtagaatttcagaggaagaaaacgagaaacaattttaagtgtctttgcatgctctatcaatgacacttttcttccttgatgtcaacaatattttcccaagggttctcattgcattaaatggagttatactattgggttgtagtgaaggtgatcgtactccaatggatatgaaggatggtaaatcctcaggcaaattagagcaaaccctgaacagcctgtggaactcacccaagagcatgctgcacttagctcttgtctgggcatcatattgaaggtggcatgagactgcataataaatattgcataagagtgaatcaaagaagcaaagattgttgattttcttttttcattattctctttcttttttctagatgggaacagctgctcagatttcaatggtggttgtactcacgagtgtgttcaagagccttttggggctaaatgcctatgtccattgggattcttacttgccaatgattctaagacctgtgaagacatagatgaatgtgatattctaggctcttgtagccagcactgttacaatatgagaggttctttccggtgctcgtgtgatacaggctacatgttagaaagtgatgggaggacatgcaaagttacaggtaattgctgaactaaccctagccagtttatcagcacatcccagagcttaaaatcaaatggcacatgtaggcatttgacaatgttgattaggagttagatcgacttgaatcctggaaagattatgcaatctctttaaacctcaattttttgtgaggattaaatggggtaatacacattaaaatcctggtgtattttggaaaatagaggttaaaacatatacaagtcaatgacttttaaagtatttaaaataataccaaatggcttttatataatttaaaatgagttctatactatatttaagcatctttatataatgcttaattgaattcaaccagtattaattcaatttctgctataagaaagtgctttttactatgtattaggatattgatttgaccactttcaaagtgaccaaatagaggaagctaaaagaaaaacagaaagtttctttcttttacatgtagtaggagtctggatgtcagagagtccagggcatggggtctgctctgttatcctcatcatgtggcttacatcaagggttccaatgctccaggttttagcttctcttagaaagtaggaaggggaaagagaaagtggaaggcaagcagcttcctttttagaatgtgacctgaaatttgattcgtaatttctactcacatcctattggtcagaacttagtcatgtggtcactccaaacttcagtggagggagagaaatgtctctggctggagagtctgtgccaagctaaaacttggcatgctttattactaaaaagaaaaagaagagagggggtgttgggagaattagaactctctaccatagctgagggccttagaaaacagaaatatttaagacatgattcctgctgtccagaagcctacaacctattaaatagtaaggaagataaccaaagtacaaaaataaatacagtaaaaggaagaatgtaagcatagtttactctagactagtatttagaaacacagttaaatataacccaagaaagagtctattttaagtactcatgaaaaccagctaactattaaggttaagaatgacgtgattaaaatcattcttatggggcttcctcccctccccaccaacttactatagtttggaattacaccttctttctgttaccaaaagtattgaatcaaaagttttaaagagttgttttgtgttttctcccagtgtcattgacatttttgcatttttttttttgaacagcatctgagagtctgctgttacttgtggcaagtcagaacaaaattattgccgacagtgtcacctcccaggtccacaatatctattcattggtcgagaatggttcttacattgtagctgttgattttgattcaattagtggtcgtatcttttggtctgatgcaactcagggtaaaacctggagtgcgtttcaaaatggaacggacagaagagtggtaagtacatttctgttgacctttggcctggctagttcctctgtcttgggtctgtttgctgttattcaccagtgagagaaggccctacctcatctgggtagctctcatggtaccttctgggccacatcatacccaagagacttgcgtgttcataactacgaatttatggctgttttagataggagggtggtctctgaatgcagatgtatgattctgaattccaggtcaggtgatgcagagacctcacaatgtctttacggttccttttgcagtcttttcttgtggatgagagcagaggaaagtgcaggaaagttaaggggttgcttttcttagctttaatttagtgatatttctcaatccatctcccagaatttcagtttcttggctcctgatagttacatttcctctgcatcttacaactttattttgtaattcttggtgcttaattaatagagatattattcgttgcatgcaaacactataacgttttgtaatgttgccaactaagcaaatggatgagctttttcttaattgcaaaaacttttgaaaccaaaacgaaactatgcactaaccgaacaatgaagttatcttagaatgttcagtgtgacaaaatcttgtatacttttctcagaaaaccctactgttgatttggtggttagctatatgaggagacaaaattttctaatccccacaagtaattataggacaagttagatggtttaatctagatttttatataatatccatgtttgcattcatttatttgctctagaattcactctttattcacttttgtctataggtatttgacagtagcatcatcttgactgaaactattgcaatagattgggtaggtcgtaatctttactggacagactatgctctggaaacaattgaagtctccaaaattgatgggagccacaggactgtgctgattagtaaaaacctaacaaatccaagaggactagcattagatcccagaatgaagtaagactttttttaaaaattatgttgccttgacatggttatgatgagggaaaaacaacagtaacatgatgtagctgatatgcatgttgctgatatgcaaaatttaaaatgatccattgtttaaacatggtaggtgtccaactgggtgttgctatctctccttcatctgaatcatcctcttcataaagtacataagagcaattgattgtttactttattttaagagcacattgatttattagcttggcaatacaatttttgaaatgtcatataattaaaaattaagtttctaattactgcatgcagtaatagtccatagaggggccagtttgatgtaactttgataactcatgattatacaacaaaaaagctggatttttctgcttcagttttatgttgtttattagagctcccttttaagtcatataaggaaggcagtttttgcctgctgatcctgaagggaagatagagaaattctcccctgtgtttggaaatctttgaggatttctttccctgaatttacttatattttataacttagattcttttctgcaggatggtaaattaggcaagttatgttcaatgtgatgttgaattcctagatattgtaaagtattacacaccacggaaatttatgatgaatccctgatgaagaataaattgatttccttatctaaaaacatgacagggtagacaaacaaggacagatggatttttctagatcaactatttgtggattataaacaaacatgaattggcattgagacatttcaatgtcataatgtactacattatgacattatgtattacatgttttatgaacattataaaaatacccagatgcattgtgatttgttatgacagttttactttgtgacacttagaggaaacaataaactctgtgaatatattctgaaccagagatgatttattttaagcagggcataaacaggatgttgtattatttaaaatgacagttatttttaatatttaaatacgtcccttccaattggtaactcatttcctttcccagtgagcatctactgttctggtctgactggggccaccaccctcgcatcgagcgagccagcatggacggcagcatgcgcactgtcattgtccaggacaagatcttctggccctgcggcttaactattgactaccccaacagactgctctacttcatggactcctatcttgattacatggacttttgtgattataatggacaccatcggagacaggtgatagccagtgatttggtaagttggtggtgaggaaaaccaaattaaaactacagtcgtggataggtagaaatcagacgagtatcagaaaagctaagaaattaatttttgtgtcatagacattgtcagatcaatccaggaaataccagcaacagtgagaggcagtctatcccatatgactaactggaaaatgaatattttcattccagttcatggtcagcttgtgccatatccaggaaggatttttatagctcgtgtgatttagttgagctgcagatgtgaatctgttgcttctatacctttaaaaattgtgtcaagtggccgggtgcggtggctcacgcctgtaatcccagcactttgggaggccgaggtgggtggatcatctgaggtcaggagtttgagaccagcttggccaacatggtgaaacctcatctctactaaaaatacaaaaattagccagtgtggtagcacacacctatagtctcagctattcgggaagctgagacaggaaaattgcttgaacccgggaagcagaggttgcagtgagctgagattgcatcactgcactccagcctaggtgacagagcgagactccatctcaaaaaaaaaatttttttttcaagcaaaaatttataacttaacttggccaggcacattgtctcacatctgtaatcctagcactttgggaggctgaggttggtggatcgcttgagcccaggagttcaagaccaacctgggtaacatggcaaaaccccatttctacaaaaaaatacaaaaattagctgggtatggtggtgtgtgcctatagtcccaactacttgggaggctgaggtgggaggattgcctgaacccagggaggtcaaggctgtagtgagctgtgattgtgccactgcactccagcctgggtgacagagtgagaccctgttttcaaaaaaaaaaaaaaaaaattaactagatttatatttctcagtcctgttcttcacgtaacattttttattctataaattctgttgaatttattttcacaagttaaatgggaaaataaagaaaatagatattttatcaaagagctgttattgacccccattaaaaataggaatgcttttacactgttggtgggagtgtaaattagttcaaccattgtggaagatagtgtggcaattcctcagggatctagaaccagaaataccatttgactcagcaatcccattactgggtatatgcccaaaggaatataaatcattctactataaagacacatgcactcatatgttattgcagcactatttacaatagcaaagacttggaactaacacaaatgcctgttaatgatagacatatacatcatggaatactatgcagccataaaaaagaatgagttcatgtcctttgcagggatatggatgaagctggaaaccatcattttcagcaaactaacacaagaacagaaaaccaaacactgcatgttgtcactcataagtgagagttgaacaatgagaacacatggacacagggaggggaacatcacacaccagggcctgtcagtgggtgggggcaaggggagggagagcattaggacaaatatctaatgcatgtgagggttaaaacctagatgatgggttgatgggtgcagcaaaccaccatggcacatgtatacctatgtaacaaacctgcacattctgcacatgtatcccagaacttaaagtaaaataaaaaataaaaaataaaaaacaatttaaaaaagagaaaaaattgccattgtgtagttgctgtgacttgaaggaaagatgcatctaaactataacagattgatgtgaatcagtgagtggcagcacaagaccgtggaaatagcaggcacaagggtgctgatggtggagtgaaggctggggcgtgggagtgggagatgaggagtctctaagctctctagttccatctaacttttaactagtaggtgatcctgatacatcaccttgctttttgtgcttcagttttgtcttcatttgtaaaatagatgcccagtgtaattaccaagacaaacataaagagtaaatggcacgtgtatgtgaaaggctcttgaatggtttagtgggatataggacgaattgtgtattttttgccgctcttttgcacaatgacttccttgtgtttttattaaataatgacatgttaaaggaaaccgtcttcttgagcagatatcctctttgactcagtgcaccttggctttgatttttggatgaggtctcactgttctcttctgcctcacagattatacggcacccctatgccctaactctctttgaagactctgtgtactggactgaccgtgctactcgtcgggttatgcgagccaacaagtggcatggagggaaccagtcagttgtaatgtataatattcaatggccccttgggattgttgcggttcatccttcgaaacaaccaaattgtgagtgatacagagaaacatcctgcctgggagtagcttgaaaaacactgaccctgggaatgctaaatgcacactgttacagacccatttgtttgggcaatacattttccttttctctttacaaaccaccccactatatactttccctagtcctgacattgccattacttttatttaccatggaaatttcaaacctaggatataataacagcacatctgaattatatcatttcagcatttggctgctacctctgtgaccctcacatgagtctccgtttcctcagctgacaaatggagtacagaccagatagtgccttcgatcctcttaccgctaccactctgattgaaagcagcttacttttaggactagtttattatggcaccactgccttctaggtgctctgctgtagccagcacgagttgtcctaaagtgcatggtatgggtgtctaggtgaaagacttggcatccgtactgttctttctggtgggagagggagataagtcacttaatcttcacttaatcctctctcctcaaaactctccaattgtttctcatacccttcagcatgtggccgctgctatttccctgctctcttctcccactcgctgttgccacattggatttcattatggtccaaaagcacagcaggcaactcctgcctctcagcttctgcgctagctcttccctctgcctggaacatctctcttccagatctctgcatgagttgcttcgcgtgccatttaggattctacccaaatgtcactttctcagagaggccctcattgaccactttacctaaaatagccaccccctcataattcttttgctctttaccctcatgttctgaaatctctctctctctctgagtttagctgttactttttgctcgaatatacactccacttttatagcgtctccagtgcttagaatggtgtttggtttacagtgaatacctaccatttttctggtgaatgaatggattaataatctattaataacatggtatgtgtaataaaaatgtataggatctaggaaacatcctgtgtggggggaccacacagaatcctgattttcaaggtgcagagacacacagagatatcatcagtagaaaaataaaagattattatctaaccaaaatctggaaaactctaggtaaactacaaggtcacacatcaaacacacaactttttttttaatgcaaaaagatctcttttaggtcaggtaaggagaaagattatttggcatcatatttctattacaagttccagattactcagtggctgtttgttcataatccagttatagacttgattgatctataaccttgagtcattctcctctctcgtgtctcttatgaattctaagttgaaagcctgatgctagggaagttgaaagtgtgagtagttcagtgaaaacaaaacaaaagaaaacaacaggggtaacaatgtacttaagctcccctgtactggggcctctggaaggacactaagagcatgactctgttttgattttaatgtggaggttttccacttactggtgctttcttctctttctcatgcagccgtgaatccatgtgccttttcccgctgcagccatctctgcctgctttcctcacaggggcctcatttttactcctgtgtttgtccttcaggctggagtctgtctcctgatctcctgaattgcttgagaggtatagtatgctccttatgtgagctctgaagatggagctggtcatagtttgtgccaagcagtggaaactctaaacccaattgcgactgaacatgtgctgtgtcctttgattcctcaggtgtctgcagaatgatgtgtgttgtatggggtgatgtcactgtgtgccttggttgtaatatagtttctgtatatggaactaatgttatctgtgcatgtaattgaacaatctgtaacctcatattttctctcacctgggtacagttagacttctctgacaagccatgataatgggaagttccaaattcttcacctaagaagtaaacattctcaacgtttgtgtacagcttcattttttatgtccattgtctctttctccctctttttttttcttttttctttcttttttttttttttctgagacagggtcttgctctgatgcccagactgtagtgcaatggcgtaatcatagctcactgtagcctccactttccgggcccctgtgattctcccacctcagcctcctgagtagatgagactataggtgcacgccaccacacccggctaatttttgtattttttgtagagaccgggttttgccatgttgcccaggctggtctccaagttctgccctcaggccatccacttgtcttagcctcccaaagtgctgggattacagacgtgaaccactgcacctggctccattgtctcatttttattcttataaccaatagttaataagtgttctagcctgggtcttctgactccaatttcagtactgttactattaccatctgatactttaagaaagagaattgtgtcggtatgagatattacaagtgactgagcaatttaatatttatctcatcctagagatattttattgggtcgattgaagagtgtgtggaggattattccaagtacttaagggagtaagaaaagaaggaaaagttgcatccagttcacaaaagagatttcttctggagtgtgtacttgtatataatacacttaaaaatataattccttattgcttaaaaatctaagaagttactctaaacccaagttccctttcatttctcagtgaagagaactgaatgaatatattttgatactgatgaaaattgctgtagacaagttcaacttaaatgtttaatgatcacatattcctaaattaagagataatagagtcctaatctagaaggacatttagtcctaatctagaatggaaaatatatactgaattcaggaaacttttagtgtttagatattatgcagatgtaggcttactgaaaatcaaattccatcagcatgtaatattgtgcaatgatactttcatgatgaaagattttaattattggtaattctcacagagggactggcacttgccatttttcctcagagacttattatgtacctaatcctcgttgacattgtttaatttagtgtgtccctagagtctttcaggagaagattaaactgggctgtagacatttcggatacaaagcattctttcagcacacaaagattgttgaattgcacattgggggttggtgtaatcaatattactctctgatgatgattgataagtgttaattttaaatagtgccttttgttgtttcacaaataattccactagtggttttctcatgggttgactttactgaagtggaactttttaagtatttcccagtaggtttcagagcaccagctgagtaactgattgccaatatatgttaaatgaaaaaaggtttccacattttttttttcccaacaagaagtttagaaaacttgttaacatttataggtggaaacattttacttgatttgattgttgaatagcttttaaactagtgtttactaagaggctggaatatatgtagaagtgcttctgtgatgctgttaagtaaaagaagcagatattgcacaatattggccttgtaaaaacatgcattaaaaaacacacaagtttctggaagcaaaaacacacaagtgccaatagtggttacagttggataggggaattatgagatggttctacttatttctaattttatgttataatgagtgctttctctgtatgagactttttaaattctttagaaaatatattccccacaatgccaaaaccaaatgaacaaacaaacctcaagccaaacatcacctcagcacccctaaaattactccaaatacaaatagacttctgactcggtctcaggggcacaaggcacttgcttcagtgattttgtgcaagataagagaacactccttgtccttgctccagggaaggctgcagtgctgatcagcttgtgcagggtatgacttaaggaggacctaggtttgggggtcatatatattgttgttcaattacaacactgagttctcattcctgactatagtgtcttcatgactctgctgacactaacattaatgggattatgacatggaaaatagaaatgaagagatgatctttaacttcaaaagacagagacacactgacctacttaaccgtcaccacctcctgaattcctttccatccaaccctagatgattctgtgcctaccccttcatgccattgtcataattaattgtaagggctcatatacttggtcttgccctctagatgctgcgttccttgaggataaagcctctacctggtctgtagatatatgcttattgcctgtggcacttcgtggtacatggtggcactcagtaaatgttgagtgaatgacaagctctccaatatccatttttgttacttccccagtcctctgatttttacccgtttgctccgtagaaatgtgtgcagtgttgtgaagtcacttctttttgctttcccatatagcacttttcaggcatctccctgcgccacctgttgtcttactggccagttcctttctattactcccctggcatcatcccccaccatgacactcacagtttcagccagcgcagcattgcaggagatcctgttctctggtccattgcttgcaaatgttcattggtggtaaacgttctcagtacatcagcagttatcagataaagggcttgagacatgatccccaggaagcagtagaagcgggtggtgcttaagggaagagtaccatggaagagtcaagaaggcccatgcataatggatgagatatgcaaagtttttaggccctaaacaatgctttggttgagaattattccaattaagcaaagggagatgacccatccaaaagggcaggatcagatcttaagtaagtgagtaaaaatttaaagtcctctgtaaaactgggacagagatagtttctactgagccagtgaacattaataacagataatcaataaataattaatttatatatataatttatataatttcttggtacagctgaaactcataatctagcattttttttttttactgttgcaattaaaccaaatgaaatgagtggtaatttgatactcaagaaatagtacctggcctgcagtatttgcagtgtagtgatgaaaaatgtagattttggagtccaggagtcctggttgtgtgaccttgtttaaattgcttgatttctttgtgtcttatttgcagattgagggaggacctatctaacaaacaagattaggaaacttgagggagataaattaagggaaatacttacctgatgcatggagtatggcgcatattctcaatcaatgagaggcaatttttattgcaattgcagttgttcagaagagaggcaatgtggagcagctgagagaagaagggcttggaagtgaatgagccagggtccatctcctattactgtttcctgtagaagtcacagagctcctgcaaatctcatttgctccagctgaaaacaactttgcaggcttgttgtggaagactctacattgtagtacttgaaaaatgtaaagcattaatagttgcgaaatttacattagactaaatttaaatttgtcctaggttaataaagactgggttatttctcagtaatagaaatgataggaacaagaaaaagctaatgagatgtgaaaataagtaaagaaaaaatgaccaagtcatcctgctgaagatggaaagcttcctggattataaaaataatgaaaacatcatttttagcttatgaaagttgtgtaatgattgatcatttcatactttgtcttaatatgtgatatatcttatacatatatcttaacccaaaacttagatttaaaagttttccttttctcagagaggaattttaaaaccctactcttgatggggatcaggataaatattaaattatttttgaaaaaggaacttttattatctattaaggagataagtgaactgatagtttaagatattgtgggaatgtttaaattacaatgtgtagacagttttgagaactttggaagatactgtttacttattcacttatacattcatccattaatgcagtcatatggtcatccatttagttagcaaacatttattgggcaactattttatgccaggctctgagtaccaggccctgggacacaataatgagcaaatcagacacagtcattgacctttgggagttaaaatcttatagggaagagagacactagtcaagtaacaactgataggattatacattggatttatttattaaagtctcaataaatactaggcaacactttgtagtgttgttttatttttggaacattcttaaaactagtaagctgcctttcacaagaatagtctaaatgatttttttcacttttttttttttcaaaactcaactctcctttccctgagatcagtgtgagtgaggtttgtctgtgtgtagaagtggaggaacttcttgtctgtgaggtttagcaaacatgggtggtttattagtgtaagtaaggacttaatgaagagtaagataaataccaacctgccttgaaaaagtccagacagcgttgtatgtggggttggaggtcttgtggtccagcagcccactgaaaccctgggaaaggcccatgcttgtctgatgaagtacattatatttattgctgcaatgctgcaatgtcattttagcccatatgatggtaacaggctattgccttccattactctaaatgtctaggaatagtgggatatgattttgactgatattcttcttttttcacagatgatcaacctttcttaataactgtaaggcaacatataatttttggaatctcccttaatcctgaggtgaagagcaatgatgctatggtccccatagcagggatacagaatggtttagatgttgaatttgatgacgctgagcaatacatctattgggttgaaaatccagtaagttttgaataacattcaaagtatataatttattcttgaagagcctgcctgcactgatgttttcttataagcaaacttttgtcatgtgagtaaaagggaaacaatgtggaaataaatttatccctaagttttttgattcaatgaggggtataaatgtgagcttggcctggagcaaaaatcataacactctttagctttagaataagaaacaaatttaagctattgtgtattatttactcattcagcaagtattttccagaagtgcctatgatttgccctgcactgaattacctgcttctaaccacagaatacatgccaagaagcagcagtcacaatgcttgcccctagaggagtcttaagctagtagaaaatattcgacgaatataaaaatgatcaaaactcaagacaaaagtagtagttccctaagggaatttagtgaaagcatttgatatggtgctggggccttcctttagaatcctttagaatgtttgcctctagggtaagaatgaacacttctccagttctcttcctcagaggtcattttcttcagccttcagggaaaaaacctgtaagaatagggaaagggcaagaagactataaaggaggaagagaagaaaaatctttgtgtttcatgtttgtcacctatatacaaaatatactcctggccttctgatccacatctgtgacttgggtttttctcatgactcgtatgcttgtggtagttaagaactatctctgtagccagtactggagatagcctgaatgataagccttgtgtattcctgtgacacactgaaaaatcgtttgaagcctacccagtggtgctgaacctttgtttgcctttcctctgagtgtaaggagtgttcaagaaatacagcagctggcagtagccacagtgaagaaagggttcttttgcaggagccatggccttggaaccactcacctccccttgtctttctttccagggtgaaattcacagagtgaagacagatggcaccaacaggacagtatttgcttctatatctatggtggggccttctatgaacctggccttagattggatttcaagaaacctttattctaccaatcctagaactcagtcaatcgaggtaatgattccataatactacttacacaaacattggatttagattgatgtaaactctagtctcaggaatagatctcatgtggattttggaatcatttttaagcaaaaagaaaaagggaaaagatattagtgttaactatcaaagtctctgaagtgaaagaggaaaaccaccttaaaatttttttttcttatttatttatttatttatttatttatttatttatttatttattttagacaaagtctcactctgtcgcccaggctggagtgcagtggcaagaccttggctcactgcaacctctggctcctgggttcaagcaattctcctgtctcagccacccgagtagctgggattacaggcgtgcaccaccaagcctagttaattttttgtatttttagtagagacagggtttcaccatgttggccaggctggtcttgaacacctgacctcaagtgatccacccgccttgacctcccaaagtgttgggattataggcatgagccgccacgcctggctggcaaaaataaattatttgagctttctattgctctattttgtttcctcctaattatcaatactaccttgttgctataaaagtattttaggtaatttacaaaataatatataagaagataaataaaagttgcataaggaattcaacataaagggaagattatggtaagcagggaattttactatgtttcctcatctaatcttcaatgctatttcagttctcaaccaaatttatagtttgcctctgttcttagatggaaatctttctatggctccagtacagtttttctaacagcaaaacagaaagtagaaacttgattctaattcctttgatactctcttcttcaagataagtgttctttttactctaattcccagaagaaattctagatgaggcataggtatgaaatcacatgaagtaagtcagaggtaacttgactagtgttggtttgctccactctgagagaagggtaaaacatggaagggattattaattcacaataattttgaaagtgaaacttcccaaagcaaggagaagtttttggagggggatagttagcagagccctgacaatccactgctttaggtgggcaccagctggcaagacggtttttctctggagcattcagaaagatactgaagatgagcaaggcgcacagcagcctggtggctaatttagagcacctatctatactaaaaagcactctctgtagactaagaacacagcctatgtagagttcggtactatctgaggtttcatgcatccattggtgatcttggaatgtatcccccatggatgagtgcagacgactgtttttatttctgccaaatgaagaaatagggaaaaggtgtcccaggcagagaaaagagctctcactggaacagcgcttgagtttacaaagatctttcactagcatctaatttaatcctcgcaacattcctgagggcaggcaggtctggtagccatttgtgatgagagggaaatttgcagtgtgcacaagtatctcaagccaggtagaatcatcaggtattaacatgaaggaccccttggaggctcctctggttcaagctctttctttaattttttttttacatcagaaaccaaggcccacagaagctaagaagttgtcttaaatggtcagcttcgctgctctaattcctgagcagtattctctctttgcacttttataaactacaactccggcaatccagactggtttaaccctctttgacagtggcagaaaatacttttcatgatttcaactaagactatcatcctcccattaaacaggcaacatctactgcctaagacccttactaccaaactcacatctctctagagtccacccagtgcaaagctgtcttaattccaaatggcaattaatatgctcttattttatctcttggtctcttgattagtaaatggggttcttttcttttaaactgatagttttccaaaagcagggaacgtgtctttcccattagtgttaggtacaatgcagtagcggccagttggagaataactgagcatgcatgtgtgtatggaatggtaagaccactttaaccacatgaaccaaaagtttctaattatgccctgatgcagtgtggtacagaagaaagatattttgatttggagtccagagacctggctttgagtctgggttgcttgctcattttattcattcatttaatgagcactaggaaatgctttctatggatcagttgatcctggatatcctaagatgaataaacattttttttctgtctttaagtagctcacatatctgtgagatggatacataaacaaatacctgtgctccagtgtcgtaagtgtgataaggccagtgaatataaagtgctagtgattggaggcagaggtataagtgaggggagagagcatgcagacttcccattcatggttacttgtgagctgagtcttgaaagataactaatacatccttccttatcggagggtttcactttccgaggtttcagttacctgcagtggcctgagaatatgtgagtacagcacaataagatatttaaaagggaggagagagagagagaccacattcacgtaattgttattacagtatatttttataattgttctattttcagattatggttaatctcttaccatgtctaatttataaattaaactttatcataggtgtgtatgtgtaggaaaaaatatagtatatatagcgttcagtactatctgaggtttcaggcatccattggtgatcttggaatttgtcccccatggatgagggggatgactgtttttatttctgccaagtgaagacgtagggaaaaggtgtcccaggagagaaaaacagttgaataaagaccctgaaacatggaaatgcattttatgactggggacaacactgcattttctccactcatgagctattcgaccttggacaaattacttaacttctctgagcctgttttctcatctgtacagtggagtttatggctgagtaagtaaaagtacttcataacactgaggtatcctgtaaatacagagcgctgtttccctcaaatgatcaatatttttagaagatccatgaaagacctgtgagaataatgatccaagggcaaactgcccttttaatggttttactggtgtttccccttaggtcatttaaattgtaagtaagtcttccaggtgattgttggattaattaagaaaataggaatcgtattcactttctgtttacctgtataatattccttcctgcctaagagtagttcgtgtttaactccgacttgaaaataagagaaacattgaagaaactgttatccactaggggtagctgtgttcccatccactaaaagaaattttatagctgaattgtgaagcctacagaatggccgtgtgagagagagctctatatattccagaaaacaagaaaaggaactttgaaccaaagagatcctcagtcttaagaaaaggagagagattgtagcagaaagaggcaaactgagaaaagaaaagttaccttagtccaagcaagagtgaaagatgccagacaataggcagagaaaaaaatttagagaaaagaatgagggaaagaagaaggatatgtgtgtgtgtgtgtgtgtgtgtgtgtgtatgtgtgcgtgtgaatgcatgcacacacgtgcacacgcatgtatgagagacagagaaacacaaataatctatttgtattgaaaagcaattttatagaaaaaccttaatgcaaaaatcaacagacattttctaatttcttactaattgtctgttagactgtcttaggtacgtattaaaatagcttcattgctgtaagaaacttctttctagtccaataaactatatttctatgtgctgtatcagggccctgttaacactgtgattatagcagtaataatcacagacagccttgggaaagccactaaacctctgtaggcctctttttctccatctgtattgagaaaaataatgggatctacctcacagaattgtttgtgaggatcgaatacaataatgcttgctctaatacctcatacatagtaagtgaccaacagatggatcaattaaacaatagaagtttattgaacatagttgtgctgggtggtatgctgctttacctgtattatctcttagtcccgtaaggtctacgcagaccttccatatttgactgataaagttcaaagaggtgaatttatttgcctcaggttgtacagtcaggacctggcagggcagagatttcagctcatgtgtttcagtttaggttgttgacttggaacagaattcactgtacctctgagtaaatttggactattttgatcaactgtgttggcagtaactggccaccgagtgccttggtggggtgcaggaaagctgtggggttctcatttgtcttccagagatttctcttaactctcctgaaggatttttgcagtttctttaggcagtggctctgtatgttttcccaactgaatcttccttttatccataaaaatgttccctcctgaaattttaggtgagttggaagtaggaacttgggaggtgattttgctgctcttactctcattttctattgagctaatttcctcatttccctgaagtgcaatatagattatctgaatctcatgcaaaccctctctcatccatccctaatcgtgctttggaatttgttttgtatataagttctccttcatctcagtttcctttggttccccttatgaaagtcagttctaataagtgattttatgctataggttttgacactccatggagatatcagatacagaaaaacattgattgccaatgatgggacagctcttggagttggctttccaattggcataactgttgatcctgctcgtgggtgagtattcataaatggcacatgtcttccatgcagcattgttcttgttaatgtcagggtctgacaaaatggaagatttcaaatttaggacatcttctgatttcatatgtcaacatttgaaaaataatagatttcagtgagacagagaaatagctctgacctatatttaatgtgcaggatattgtttgtattttgtcctatggtcttcaaatgaacaacactggatttaaaattaattccaaacaagcaagaattttaggaattttaaaatagcattataagaattgacaatatattctgactttgaaaggacacggaaagctctaaggggttatgtaacatttgcaatagagcttgcaggatgagaagccttctagtaggtggagaatgggttgcaaccaggcagtgactcttgaggccaagggatccatgaaggcacagaggtatggcggcacttagcaggattgtggggagagccggaaccagaggcttagagtagggagctgttgaccacatgggagatacaacagataaggtcatttggggacaaatcaaggagggcctttaatatcatgctaagaagttgaactttattcttttgagtaataaggagcaagtagggattattttttaaaaatttcaacttttattttagatatagggggcacatgtgcaggtttgttacatgggtatattgtacccagatagtgagcatagtacccaatagttagtttttcaacccatgccctcctcccttcctcccctctctagtagtccacagtgtctgttgttcccatgtgtatgtccatgtgtgctcaatgtttagctcccacttataagtcagaacatgtggtatttggttttctcttcctagcaaggaattctgaggaagggagtgaaagaaccaaatttgtgtttttagaaaaattggtcaggattgatgtggagagaggccagggccagggagaccagttaggagaaaatggtcttaatggatgtaggctggagtcctccggtctgtttgattggctatttcattctgttgatctactataccatattataaaccagaataacaaattgtaaaatatgaacactgatttttttttaaagagattgtcgcatcattccaagtggattttggcttaatgtttgaaagttatcagattcttaggcctagaagggcactgaagaagtaatttgtattagcgctctgtttcaaataaggatgacatggaaaccaaatccaatttttaaagggcacaagaagcaaacattctattctgtgcctgctggcttgtactagttttcagttattctttctagaagaaggactgtcttaggttcgaaattctacttttgaaactcaggctcactcattatttgtttttcatttatcagacatttctgcattgtgtacctttgttgggtggtgtgttagttaagatagctaactgttgaagcaaataaactcctaaatatgtaatggctcaaagaaaatagaaatttttttgtcttttatatgggcagtggggtttgggcagaagatgggaggaagctctactctacatagtcattcagaacccaggctgatggatgctctgccatcttcagtaggaggcttcctaggtcattctgagtatcaagatctttcgagcagtaaaggaaagaacattcagaaatttgctgggaggtttttatgagccaggcctacaagtagtgcacgccacttctgctcacactccttaagctagaattgggtcacatggccacagctaactgcacggaaggacatgcagtccacctatttacccagagagaagaggaagacattaattttggcaagtggaggcagtctctttcatggggccacggtggggagttcagagggtggatacaaagattaaagacctaatttgcaaccttaaggatttatggcttagtaaggaggataaggcctgtgtataaataacaataacccaggttcatataagattaagagccacaagagaggctaaaaaaattgggatgatagtgctataaagaggtgacatttcagcttggtggaagagatatcatttggactggatcttaaagcatatctagaatttcactgggcagagctagcttttaagatatatcaggcgatatgaaggatggaaggtcaagagcaaagggacagaaaattgagggtttgttcaagtgactaagagcaacccagttgggttgggagacaattagaagagcttagaattttgtcagaggacataggaggagaaacaagacagagacttgaggatctaatgtcttggattctcagtgaagagaaagtcttgataaagttgtgataaatgttattgaaccagttgttgcagaaaaatatctttgtggatgatcactaataaagagctgaggcaattacagggtctcaagagaggatgttgaatagagatagtagaagttaaaagaatggaaagaggatgaggaaatgtgaatactcttttaagaatcttgtattggaaagttagagaaagataaacttgtaggtcaaaatgtaacaggaaaatgtctttcagaatagagaaacctgagtgtattctttagcagcagatgaaagatcaaggatgaagaaataattgattgagagtgaaagttatggggaaggaattagaaatttatgaagaacaggaatgacttgaaatagtcaatatgcagaacatgatataaagtctgctagggatgagaatcctcagcttagattagggaacttagatttttagtgaattcagaattcatgaaagttttgtgctatgtccaggaaactcttgataccctgaaatgggagaggagaaagaaaaaaaagggcagaaacccagggttggagattagcttagacacaatgggaacccaaaagaataaataagaatattgttgaaatggttacatatgatgtccaggtgtagaaggactggagggttgggagctcaggcagggcttaagggcaaagaacaagtttaataggaaaagttaaagcaaggaagaaatgagagtttttggtcgaagcagagcatctcagagtttgagaacttagaggcggagaagtttagagttgaagatgaaattcaaaggatgggtatattgatttggtggtggaagaggtaggtgaataaagactatttaaatgaaggggtttgaggacttttcagaaaagaatgtaggataattgtccgttgaagatatagaaggaggtgcaatcaaaaggaattaaaagttgggttcaagtctagaacttacgtcttcagtggaaatggaaaacagcccttaatatattttaatacattttcatatatcaaggatttggcaatgctgtgtggtgattatggttcatgcatacctgatcgctgtgaaatagaaagaaaaaagaagtcttccttaccccataacagcatgataatgagattccactctcacagaaaagtgttactcattatttctcctattttctgtgtcagttttcaaaactctttgcatttttcatcacagaaatcaggttaggtaattaagtagccggtcttgtggtagatggtgatttggagaataattgaatgaggcctggtgagtgatcagggagtgtactcggcagctttttatattagctttggccttcactatgtactgaagatggagggattattgatgtaggtttcttccttgtcataagcttcccacacacctgaccatgctaaaagttcagctgccagtgggaaaccctagcttcttattccagacaccattttaaatggcctctactccaattatagctaggaaatataccgacattggtagaacactggtgaagtacccctctacattgtatgcaacaagatattgattttcagcctttgcccattgtattgtgagcatcttgaggacaagtaatacacattgtcatttatgtcattgactcaaacccaccttctgttttgttacatgctggtgtttttcatggttgtaggaagctgtactggtcagaccaaggaactgacagtggggttcctgccaagattgccagtgctaacatggatggcacatctgtgaaaactctctttactgggaacctcgaacacctggagtgtgtcactcttgacatcgaagagcagaaactctactgggcagtcactggaagaggagtggtatgagcaccctttcagtcttttggtctttgtgctgagctggtgtagctgatgctgagtgttctgagctgtcaggcagtggttcttgaacaatcttacttggtaacttgtaccagtgtttcattgcctcttctcccaataacttctctcccttgcacatacctcgcccctagctgaagtccagttctttatagtatgtgcatagttccctatagggtaatgtttattaattttcccaccaacgtttgtttttcttcaggataaattaattccatttgtcatttcttacttgtcatttcagagccatttctttcatggtttagtgatttcagtgtttttctttgaaagtactctgggttctccaattatagagaatatacatatacctatatatatgaagagaatatatatatataaaatatagagtatgtatctatactatatggtatatagaatctatatagattctatatatgatctatgtagatatagaatatatattatagaatatagaatatatatttatagaatacagaatatatatctattatatatagaatatagaatttatctgtataggatataggtatattctatgtatctacctatgtgtgtgtgtatgtatgtatgtatctatttatttatttagcaaggttctgaattcagcatcccctcgtagctacacattcttctctaatattttaacatgattaatgcacatgtgaaactttctttagtggtgattttcaactccaaggttgggttcattatattctacaataagaagcagaaactataaagtctcgttcactcattgaaataggatttgaccttcactgagctggggctaagcacatagacaatgctcaataataattattgatgaagcattgctttgggtgctgaactgaatatatgctagtcccttccttgctatttagcagtagttacttcagatccttgacattgatgcttgtcataatattgtgcagtaggtttggctttcagttcattgtttgttcaacaagtactaacttcactccgaatatggacctataatggtggtaagctttggagattaaaaagaagtgatgatgtgtatgaaaacactttgcagagttgggtgcatgtgtgcaatgacgaggaagctcttgttacatggtatggtttctgtacacacatctgacagggcacagcttctaaatctgcgagcttgttagtggtgtgactctccaacctttctcctagtgtagttcccttatttctccttcactctcctggtttaatcatcaccaaatgctgcaatccatcctcagcctgtcactcatgcccagatcttttctgccacctccaccattctgagcaacgtctctctggccttgactaggcatggccttcagtggtgaagcctgctttcatgttggagacatgttttcttcataaagccacagtcagcaagttggatcatggctcagcttggagccttgccctgaggagtagctcccaacacttctgtgaggttgctcagctaatctggtcctggcctccactctctccactctctcctccaagctcatgtttcttatattctaaattctagaactttgatcagtttcatcagcataaccactcttgtaactgctgggctcccttttcagccatggcagtaaagccacactgtgtctctcaccaatacccagcccagatcctggcacagagcaggcacttgaggcaggtttttggagtgaaattaaaccagctacatctacatttcatttttcttccagaagaagctgactacttgtcattttcccttagggactttattcttgtggttcttttccagtgtaccaaagctattttgattaaagcttgttatctgttcaaatttaatggcaccatttttggccctgtcctgtcttgctgtcctctgtggttgtttgggggcatatttccaatctccattacagaaattgtcagtgaaggtgttaaactcagggtgagtcagctcctgtgcaatggcccacacttagatgtttgagtatgtccttgaccagaatatcacatgcagggactagtggtttagctcccttttcttcaccgtgccacctgaaaaggttgactgactcatgtgagctctgtcttcattatcaatgaaaggggcacagtgacattttcctgacctgctgcttggtgtggttgtgatgatcaaatcagaaaatagatgtaaaaaatctctgtaagggatagagggctgtataaatgtgagacattataattaggagaatattagtgtttaaatgttcaaaattttcagtatgaatccatgaaactaatgaaaattccaatcctttagattgaaagaggaaacgtggatggaacagatcgaatgatcctggtacaccagctttcccacccctggggaattgcagtccatgattctttcctttattatactgatgaacagtatgaggtcattgaaagagttgacaaggccactggggccaacaaaatagtcttgagagataatgttccaaatctgaggggtcttcaagtttatcacagacgcagtaagtatttgttactgaaatacattcgtgggtgtataatgcgtattcacacataactcacttttgtaagcacacacccacacacagtttcacgtatatacacgtgcatacaaattgaaattacctgaaatatttaaaaaatgataatgaagtcttaaacatggttaagtgccaagggctaatttggcatctgaaaggccagattgacttcagagtaagtttattccctttctcttcccattactttcaattccttactttgcttttgcttcatagaactccctgttttctattgtttgtgttacttattagaatataacctccatacgggcaggcattttgtctgtcttgtttactgctcaatactcggtgattagaatagtgcttggtacatagaagttgctcagggcatatgagttggatgcctgctgggaaagtgctaatgggatggaatttttagtcttaaaaggaatgcttttggatgttgcctatttcaacatttttttcaaagataatctaatttctgatttacccctttaaattagtggtatgatacaggtattattttttgatgtattttatagctttcgtcttcagccaaagatgatcaaacaatttgtttcctgtcctataacctaagtttgtcactaggtattttttttaactgcatgtgaaagaaacacatgcagtagaaattaattttttattactataaagaatattctttttttaaatttttccataggtttttggggtacaggtggtgtttggttacatgagtaagttctttagtggtgatttgtgagattttggtgcacccatcacctgagcagtatacactgcaccctatttgtagtcttttatccctcgcccccctcccacccttcccccaagtccacaaagtccattgtatcattcttaggcctttgtgtcctcatagcttagctcccacataccagtgagaacatgcgatgtttggttttccattcctgagttacttcactttgaataatagtctccagtttcttccaagtcactgggaatgccattaattccaggattattctttaaatcttatttcatataattaaaaaaatcacattattgatcatgtaactgaacatattattttaagtgccagttcataggcaaattatgagcagatttatatactgacctccctaatcctcgcatgatttgtagaagaaaacaattgaagccccattctctaactattatacaatagttgggttactggtttcatacctttaggtgttattgtataagctctagtctctccaatgttgtttttagattgctaactcagctactatatgttggttattaatttttagaataaattatttggtgacccaattaaagaaatttgagatggggtggcgagtagctaggatcaaaagttacaaatggattttgttttcatttagatgccgccgaatcctcaaatggctgtagcaacaacatgaatgcctgtcagcagatttgcctgcctgtaccaggaggattgttttcctgcgcctgtgccactggatttaaactcaatcctgataatcggtcctgctctccatataactctttcattgttgtttcgacgctgtctgcaatcagaggctttagcttggaattgtcagatcattcagaaaccatggtgccggtggcaggccaaggtatgccaactccaatataagtaagatttgacttcatctggcaccaggttgaaatccctggtgccatgaaaacatttcttcatgtgtggattcagtgcataatgaagctttcctttccctttaaatcaactggcacagcctaaagtgtttttcacactttagtgtgtctctgaatcacctggagggctcacgccaacacaacgccagacctcgtccccagatttttctgattttgtagtctagggtagggccagagaatctgcactcctaataagctcccagggcatgctgatggtgctggcccatggatcacgctaagaagcacaggcccagagcaatatagaatgtaggatgggtttgcaagaagtactacagagttggtgttccgaagaactgtgccctatttctgattattaatggagatttacggtagaaggtatactactatttaatatggtaatgaaatagtccacaaatatgatttattaatatatatttggtgaattgaagcaaaagagttcacagtgttagtccctctttagtaatcatatttttgcagcactttgtgcttacatactgtgaatgtatagaatgatcacttgcttcctagatgagccaaggtttttaggtataccttagcacaagagtaactaagagttttctaacatcgctaggagaatgtcacaggctaaagagagaaatagagggtagaaaggaaggaaaaaaggatgaagtgaatgaaggggttgtagagatggtcagaaaatacagaaatgcacctggagaagggaatcagagagcttccagtcccacacgtcctcctgcctgatggtcatgttcacgtggactcatgactcatctttgtttttccatatctaaaaagttatggatctaagttatcatcttgtacagatatgacaaattcaatagtttttttctcccagcttttcattaaaaaaatgttcaaacacagaaacgttgaaagatttaggaaatatccttatacccattaccaagatttaacagttgttaacatttcatcacatttgagctctcaatttgtatgtgtgtgtgtgtgtgtacatgcatatgcattcatattcattttttatgaaccttttaaaaataaattttaataccatgccactttacccctacatatgttagcatacagtttcaaagggcattattaaatattcataatcatatttctccagttggcctcacaatattttatatatagctgttttgttccatccaagatctaatcaagattcatgcattgcactgggaatatctcattagtttcttccgatttggagtagttgcctctagctttttgctatgacattgatgttttaaagaggcagacctgttgtctttgagaatcccacactgaggatttgtctgaatatttagtctgtctttcattttttaccctgcagttctcatgaaatgcaagttaggtctaattgcttgattagatcaaggttaaatacacttagcaataatactttataggttatgctgtgttagttgatacagaatcttattaggaagaacataatgtcagcttgtcctgctcttagtggcatttgagtttgatcacttggttaaggtggtcactgctacactgctgctttttaaagctgtatttttttccttcttaattttggtggaatctatgcagtcacacttaggccctgtgaatgtcttggctcccaagcaccttttacccattggttttggcagccattgatgatccttgtttgaaatgattatttaatcgaggattgcaaaatggtgattttcttattttagcattccctttacatttgttagataatattcttctataaaggaaagctcttcgtgtctccctggtttactttttaaataatttattattattatggggtcaaatttttattttttaaattcagtgtgttacagtcaattactgtaatccttcttttgatgttttagtggatccattttggccagggagaacctcttcaagtggcgacctgtatatttctgtgtatgccttgtttcttggtacaataagatgtttcacacccacttcgtaccttccctgcctaaacctataatcaacatttctcccgggagccagagctccttattgtgggaaagagtagaaaccaagatgtgggtctgctcagtgcaactgggaaaaaagggtttcattttgtaatggggagatgctcagagcagggggttgggaatgagggtttgagaggaagggcagacatttaaaagttctaatttcagtgacagcattgtttaatgatcttttcttaacttccaggacgaaatgcactgcatgtggatgtggatgtgtcctctggctttatttattggtgcgattttagcagctcagtggcatctgataatgcgatccgtagaattaaaccagatggatcttctttgatgaacattgtgacacatggaataggagaaaatggagtccggggtattgcagtggattgggtagcaggtatgtaagctatatggtgattttaatatgtttgcatctctgtcatcttattttatgctagaaagtttagcctaactccatgtgctacaggtttgtttttctagacaattattaagaccatttaagatacattgaatctagattaagctacgtgtctatttgacaaatgatatggtgtttcagtttacagatttataacaaattaatccttatcattttcttctgttattaacataatctggagacaaaagtggctaaaatattaaattatgtggatttgttttttttacacttagatttgcatttctgcacttagatttctgcattagaaattttctaaattttcaagagaaagagatataaaaatataaactatggaacagcattcatttgctttgaagctgagcaattttagttgccaaattcttaattgcttccttttattcatatataaaaatcccttagatcgtgagatattttattagtaatttttttaaatgcctggtctagtattatattaacttagttgtatttattcatgcacataagcttgaataacccctcatttttatcactcatctgagtaaaaataccactcataattagtggtattatatgttttggaatataatccaattctacataaaatcagtatcattgaatcaagcttggtgagtaggcatcacttagaaatattagcatgtaggcagggcgcggtggctcatgcctgtaatcccagcactttaggaggctgaggcaggcggatcacctgaggtcaagagttcgagaccagcctgaccaacatggtgaaaccccatctctactaaaaacacaaaaattaaccaggcatggtggcgtacgcctgtaatcccagctactcaggagcctgaggcaggagaatcgcttgaagccaggaggtggaggttgcagtgggccgagattaagccactgccatcaagcctgggtgacagactgagactctgtctcaaattaaaaaaaaatttaaaaaaaggaaatattagcatgtattatgaaaatctaagtactataataagagtttattgcaaaaagtaaatatggaagtatggttaaataaagctttaattgggttcctaactcccgttcctgaatagaaattactatttctgagggtatagataaagcagtagtcagcaaactatggcccatgcgtcaaatgcagcctgttgcctgtttttgtaaataaagttttattgtaacacagctatgcccatttatttgtgtattgtctatgactgctttcatgttgcagtggcagtgttgagtacttgtgaaaccatatgctctgcaaagcctaaaatatttattatgtggccctttacagaaaaagtttgccaaccctggattaaaggattggaaatgagcaaatgcatacatagcaagtagagttaggtaatgaaaaaatgtatcagtaacatatttcacattggcctgatttctctagaggtggtttgaatcagatataggaacaaaatatgtgtgtcttggtagtagcattgatagttcaacaacagactttcaactacatgaaatcaataatttgtggtcattctctacttattatactatcttcataaagttatctttttattctagcatgtacataaggcccaaagggaaatggacttttgttttggtcacttttagaaggtccatgggatgaaaacacctacattagttagaaagactaaggaaaaacttcatgttaaccttaagcacaaagaccatttgataacatcaataacaacctgagatgctgctggtgctccctctttgctacttttatcacattgggatggaagttgtgctatgaaaatgtatatttagagtgtttcaagtaggtattaagcatttagagcttcagatagaaaaggagggacattctggaaaatatacctttcagtggaaagtgggttatgatgttgctatgaattctaatctactttagaagctgaagataggcactttctctctaaatttgaagacacaatctctataattcctaggagtaagaacttatttttctaagcctagactgggacattatcatcttggaaaagacaacatatagtgacccagacttcaaccttatatattttgttctgaatttgtaaagttctccctttttttcttcttggttctccattgatcagcatgcactttcatttttcccataggaaatctttatttaaccaatgcctttgtttctgaaacactgatagaagttctgcggatcaatactacttaccgccgtgttcttcttaaagtcacagtggacatgcctaggcatattgttgtagatcccaagaacagatacctcttctgggctgactatgggcagagaccaaagattgagcgttctttccttgactgtaccaatcgaacagtgcttgtgtcagagggcattgtcacaccacggggcttggcagtggaccgaagtgatggctacgtttattgggttgatgattctttagatataattgcaaggattcgtatcaatggagagaactctgaagtgattcgttatggcagccgttacccaactccttatggcatcactgtttttgaaaattctatcatatgggtagataggaatttgaaaaagatcttccaagccagcaaggaaccagagaacacagagccacccacagtgataagagacaatatcaactggctaagagatgtgaccatctttgacaagcaagtccagccccggtcaccagcagaggtcaacaacaacccttgcttggaaaacaatggtgcgtgctctcatctctgctttgctctgcctggattgcacaccccaaaatgtgactgtgcctttgggaccctgcaaagtgatggcaagaattgtgccatttcaacagaaaatttcctcatctttgccttgtctaattccttgagaagcttacacttggaccctgaaaaccatagcccacctttccaaacaataaatgtggaaagaactgtcatgtctctagactatgacagtataagtgatagaatctacttcacacaaaatttagcctctggagttggacagatttcctatgccaccctgtcttcagggatccatactccaactgtcattgcttcaggtaagtgcactccaggtgctgcttgtcctgcaagtagacacaatggggtcaacacacatggatgactgagtgtttctaatgcatatgagactctaatgtctttgtgtgtgcttgtgtgtgtgtctgcctgtatgtgtccaggtatagggactgctgatggcattgcctttgactggcttactagaagaatttattacagtgactacctcaaccagacgattaattccatggctgaagatgggtctaaccgcactgtgatagcccgcgttccaaaaccaagagcaattgtgttagatccctgccaagggtatgccatcatcttccttgttatatttctgtctgcttatttctggaaaaaatggggcctgaaattatgttcatagatagccaatgtgttatgggcttataacactatggctacagattcaaaagtgaaagcatattgagtgattttacctgggaaggagggtgcagcgcatagctccctttgatggcagaaaggttggcaacatactaggaagtcaacaccctgacttactagatcccttttggacaagctgtgtaagtagaaatggagtttcttttgccatgttactggcaatttgcaattaaagaatattgtccttttttttttttttttaaggactatgaggttccctgtgaattaattattgactccttttgtatgactaggtacctgtactgggctgactgggatacacatgccaaaatcgagagagccacattgggaggaaacttccgggtatccattgtgaacagcagtctggtcatgcccagtgggctgactctggactatgaggaggaccttctctactgggtggatgctagtctgtaggtgtctctggttactcacgtgggtgttaagaagaggttttccttccatttccaaagaagagggatttgcatcatgtgatgaaaatacagcatgccagatagacattgccagaatatagaatcacagttttaggaactatgtttatattggaacttggtgaacatactgtgaaaatttatctatatcatgcattgaataattatgaactaaaagacatctaaagatgcattgctaaatatatctataatttcagctataattataaatgtattttctcaatttagaattacaaatgaaattactcaacttacattctgcaggccctaggtaactgctataaaatctgaatgacttttaaatgccaattgatattatgtttttttctgggctttagcattcaatgtcttttagaaaattgttttcttaaaaaaaaaaagaaaattcttttcttcagtctttgactttttgtcatcttttcaaatagaccctttcttctctggcaagcttctcctcagcacatttcttaatattttccttttgtcaactctaattttgtatgtaacttctccaagtaccccccatatttctcacattccagtcatcctaatggaatagttgaagggatgaaatgattttgtttattatggctggtgtctacatatcgggaatcttaatttttcttgcatatttctttggaattttagtcttgtgatgccaagacctaacctcctgatcttttctttattcccctatttgaaacaaagcagtgatgctttgagtctaagcttggattattctaggtaaacacctcaaggtactcaataaacatcaaattgaaaaagtcactaaggaagtgggttggaaaagttattgttttattgagagtctgctatgtgctcaacactgagttccatgcattacatggattatttcacgttttcctgtttctaatatcaacctggttccttttgtaggattactattcatatttggaagtcaatgattttgtataggctattgtttgataagcaaacaagacctcccaccaccagaagaaacatttccagctgccatatgccccatttgaaaagaaagtttgcagcttgtgtaaacaatgatgaggcgcatgcattgggttgccagttgaaaacttaactcacttgagacttcaacttctaaatttttttttgcttcattttaggcagaggattgaacgcagcactctgacgggcatggatcgtgaagtcattgtcaatgcagccgttcatgcttttggcttgactctctatggccagtatatttactggactgacttgtacacacaaagaatttaccgagctaacaaatatgacgggtcaggtcagattgcaatgaccacaaatttgctctcccagcccaggggaatcaacactgttgtgaagaaccagaaacaacagtgtaacaatccttgtgaacagtttaatgggggctgcagccatatctgtgcaccaggtaaggcactgaccatgaaaattagaacatggagaataatgatcacaataccaattggtaaggaaagctgaagttctcacaggagaaaaaattcaaattctccttgatgtcagggtaatttataaaacagacctggggctatattttgagaggaagacttggcaggcttcttttctaatctatatggagcccttttatgaaagcattttcttttattttatttttgagacggagtctcactctgtcacccaggctggagtgcagtggcgggatctcagctcactgcaacctccacctcctgggttcatgccattctcctgcttcagcctccctagtagctgggactacaggcacacgccatgtccagctaatttttgtatttttagtagagacggggcttcaccatgttggccaggctagtttcaaactcttggcctcaagagattgcccacctcggcctcccaaagtgctgggattacaggtgtgagccacagcactcagcctatgaaggcattttacatacaagcttgatggagttagaaagaaagatgaaggccttggctgccctacttcatgtcttgactaggaattctgtcaatgagctggccttccttataaaaggatttacattttctgcttaagaggtattatttatagtttgaaatatttctggtgatatttgcgggtgggatcatatgtgcttcattgtgcattttataaagaacaacaaattcacgggaaggtgtgccttttgatgttgttgctttgcaaattttgctaagaagagtcgttgatatttcctgttgtttagaaggaatcggcacatttattagaaattggtgattgctcttcttgatggaaaagtgactcagaatatagttaaaaggttaatgggcagaatttccatggcttgtcttagggagcatttaatgtagaagctgttgcaagtgctattgtggaggggtcaatgtgaatggtggctgcatccatcttttgcttcttctgggattatctttcttcaggtccaaatggtgccgagtgccagtgtccacatgagggcaactggtatttagccaacaacaggaagcactgcattgtggacaatggtgaacgatgtggtgcatcttccttcacctgctccaatgggcgctgcatctcggaagagtggaagtgtgataatgacaacgactgtggggatggcagtgatgagatggaaagtgtctgtggtgagttggactcttggcgcttttggtaggagctaatggcatcttgatgtcaagtgtttggtatggaatcctgctgtgtgtgaatgtgtttgaaatgtgtgcctaggcatcctggtagagctgaaaaatgtttcctctgataatccagactgtttctgttaaatcacgtctgtagtggttaagagcacaggcacaatcatcatcctggtgatcgcatttgtaatctgtatagacctgggaaagttacttaatatctcaagcctcagacatctcatctgtaaaatggagctactactagggttcttgcgaggagtaagagaaacaatatgtaaaaatcccttagcatgaggcatggtgcatgctaagtctagcttagcttgggactaaggaaacgtatcattttaccaattttcatagcacaaaggtcattatttcaaaaattttatgaaaataacttccaatcctcagctttcatctgaatagagtgaataaaacacaggggactttctcagggagttctgaggttggttaccttttcctagcagactgtgataggagctaggagtttttattttcctgaaataaactataattgcatgcttttttgtgactgagataaattgagattatagagaaacagaatgactttgatttgtgcttaaattacttgatttgcgcctaaaacaatttaaaaaatgtatacaacatattttgcttaatctaactaattaaaagtgttatctcactttgcatgcagtccattttgcagcgttttttgccttggaaggtaaattcaaagtgtctcttttatttaattgtatctttttaaaaatcaggataatgttttaatcaagagggtttgttctcatgtttttcctgttcttagcacttcacacctgctcaccgacagccttcacctgtgccaatgggcgatgtgtccaatactcttaccgctgtgattactacaatgactgtggtgatggcagtgatgaggcagggtgcctgttcagggactgcaatgccaccacggagtttatgtgcaataacagaaggtgcatacctcgtgagtttatctgcaatggtgtagacaactgccatgataataacacttcagatgagaaaaattgccgtaagtttatcttaagtgcttattgtgattttgggtctgaagtcttggatcacaggagatgaaattattatgtaaaaacaaaggatttccaaaaaaaaaaaccctaagtatttatctaaaacgtaaatttttggctaggcgcggtagcaagtatcaacaaataccaatcttgtttcatttttctctccttttttctagtattttaaagtgactcctagacatgcacttcactgataacattttggaaaataactaccatgccattataatgcctggcaaaatcaaaagtgcttactaaatatccctgagtacctagtccatgttcaaattttgtcacttatccccaaaatgtatttttactgttctctgttcaagttagggttcagatgagatctacaactgattttgattgttataattcttcaatctcttttatgccacaacacttcccactttttaatgtcattgattcattagaaagattaggtgatttgtcctgtagaatatctcacattctggacttgactaattgcataattgatccatttaatttatcttatccctcttatttcctatgaactggtatttagacctagagttttgatcataacaggtgcaattctttgggtaagagtatttcagaggtggagctgtgcgtttcctgttgcatcacctcatgaggcacatgatgttttgttgccccactttaagtggattctggtgtcagcctgaatcatctcttatgaagctcccatcatcctttcacccaatggttttagcatccatcggtggttgttccgtaaacccattatttctttaagagttatgaatgggctctttagaattctggtgttcctgccgcatttattagctgaagtttgataaagaagacatttcccttaccagcttttgttggtaattagaatctacaggataaataccttttgcttgtcaattttcagagtaatgagttggtgacaaaggagaattaacttttagtttagtttagtttagtattatattgaactctttgatcttcatgtatttgatgagttttaatacagtgctgtcaactgtttttttttggtgcccagttgtccaaacttaggccaatgggagtccttaacttggattttccgttctttgacatgaccccaatccatcttcttatagctcaagcttgtcttatatttcctgtcccagtcctggaattagccacttatccaaggagacctcattccctttgtggtacttagaaattatcacagggttgaggtgctcattcctacttagctttcattgcttctagtccttttcaatggtcagagctaggaaatacagtttttaaggaaaagaatttttttttgttttttgagatggagtcttgctgtatcgcccaggctggaatgcagtgacgcgatctcagctcactgcaagctctgcctcccgggttcacgccattctcctgcctcagcctcctgagtagctgggactacaggcacctgccaccatgcctggctaattttttgtcttttttagtagagacgaggtttcaccatgttagccaggatggtctcgatctcctgacctcatgatctgcccaccttggcctcccaaagtgctgggattacaggcgtgagccactgcgcccggccagaaaaaatttttattgatatttcccatttaaatttaagattacaggttgtttacattttagattttataattacatctcttcttatgcttaaaatcatagtttctcttgacatttagttatttgttttattatatagtaatttcaaaatgcctataataatttcaacattattataaccactcaaataatactattaacaataaatctactaagtgtgagattcttcttgctttttaggttatgtcccactagagatatgcagtcaaaatactgattttaaagatatttggaatttttttttctgcagggttatgctatcaacctgatatatagttagctttatctattgctgtttccaaattttattttattttattgattttatttgtacaaaataacatacatagttccaaagttaaaactacatgatgaggtgcatttatagaagtccttcatttcttcctctcctttctgcttcctctgtgctcttctcaatctatccagagagatgacaatttttgttagtttatcttttctttgttgttattgtttttaatataagcatctctctcttgctacacacacacacatacacttatatcatcctttttcttacacaaaagttagcctactgttttgaatcttgctttcttactattaacaatatatcctgaagattatactgtcattacttgtcagtatatagaaatcttctttattcctttaatagctacatattactccattgtgccataggttattttaccaagagttggaactcttgttgatactattaattaatgaaaacagatgatttaagttgcaaaccagagtctcctctcccttctccccagtatcagctggaaatatgtctttttactacagaatctataggtaacataagtatcatggatcctgcctttctgatggctttgaaaatgccgccctttaagtggtttgagttccacaatagacgtgttagcatggatactgttcataatacatatttggtggatatattcctaatatttatctggttgtctttttcaagctgatcgcacttgccagtctggatacacaaaatgtcataattcaaatatttgtattcctcgtgtttatttgtgtgacggagacaatgactgtggagataacagtgatgaaaaccctacttattgcagtgagtaagataaaactgctttctttctatcattccagagatgcatgttgtgagctaatacaaagatatgaagcgtgggtattcgggctgatttcaattgtcatttcacattgaccttctaagtagaggtggtaggcagttgctttcatatgtgattgcaggggtatgagaaactctttctctctgttccctggctagaattcccagaccctgaatatttcttccagagatctgctactattggagagccatttctcccagtgttgaaagccttttgccttcatgtacttaggcagaatttgcccgttaagcccttataatttactcttaatattattatagtggccattagtaactgaaaattttttttttttcagacagtctccctctgtcacctgggctgtagtgtagtggcatgatcacagctcaccgcagcctctgcctcctgtgctcaagccatcctcccatctcagcctcctgagtagctgggattacgtgcatgtgacaccacgcccagctaatttttgtattttttgtagatatggggtttctctgtgttacccaggctggtctggaactcttgggctcaagcgatccacccatctcagcctcccaaagtgctgggattgcaagtatgagccaccgtgcctgaccagtaactgaaagtatctttatatcccctagatacatttgaatttcagaaatctgtatttcgtatttagcaatttggttcattcaaacaatttcctgtatttatagctcaaattaaaaagcctttcttaagtttgataactttgagactattagtgtaaatagatacataatttaaggatttagtgattggacttccctgttctgtgtatatgtagttaaactcttgtcactggcccctcccaaggaaatcaaagggcaccataattatttgtcaccaaattagggtacagcacaggaagaggaatctgtttaataacagcagcacaaggaagcagaattcaggttgcagccaccagatagggctagacagataggaattattgctgacttttcagggacctctgcttccattgtcagttctcccctggcaaatcatcagatatcaggggccaaagcaaaacggccttatagaccagaagaattacaagacttgaattagatgtgcacccacataacaatttggaaaatgcatataaccagagctacctaaaattactcgagaaaagagtcaatgttcaaacataggcagtttcccacttactcaactaaaagtctggtattccaaggatgaatacgaagataactttgccaactttctagagttattatctaacgtagctaaaaggttgtgtgtggagcgagcttagatatgatcacgttattgttttgcttttaatcatcattgcaatggaatttatttaattttacattatcatagaaaaaataaaaccaagacttataatttgtgatttcatttatcacaaagatagttctttggtatttctaacaaatacaatcttttttttttgatttctggaatctagaaaaacaaattggggaattggggcaggattgacttccttctgtctcccatgcttcttcctccccacagaaagcttacacaagcatccattttccaggctcagtcttccttttttggtaactattatctagctcagagatagaggcagattgttaagactgatggcaacatgcttgtgttttgctcatgggttttatcttctttccctcctgcagccactcacacgtgcagcagcagtgagttccaatgcacatctgggcgctgtattcctcaacattggtattgtgatcaagaaacagattgttttgatgcctctgatgaacctgcctcttgtggtaagagagtaagcaagcatgaaaaacatcatgatgcagctagacaacttcagtctcttccaaccgcttcaaatacagagcagggtcatggctgctgaatgcttggacttcctgtcccagctttcatctggaatgctgacaccgctcagcggatattcattaagacctgttagtggagagcactgtgtggggagctgatcaggatatggaagctgctgattgatgctgataaaatgaaattatattggtgatgcacctaatacagtgcttagctggtagaacttaattttagttggctctcaattgaagtttctgaatttggttgagtgctggcccagaaagctgtcagaggacccaaaagtgattggagtcatatacatggggaaggagtatattaggagcatgcatcctcttcctgttctctctctgtgccagtttatgagcacaagaggcccaagaagttgcaggggcctttggttgtattcctggggacagttatgccctgtttacatttggaggctgctatttgccttcacaaattctaatctatatccatgcacattttttacataattgtaaaaatataaaaatacaatcttctacattgctttaaaaaacctgtcaataaatcatattgctatataggagtcagaaaactatggctgtggccagttgcctgtctttatagatagcattttactcaaatgcagccacatatggctgctgtccctctactatggccacatcctgtaggtgcaacagagaccatagggcctgtaagcctaaaatatttactatctagttaaaaagtttgctcatccttgtcttcatactgccttttaatgactataatattccattgagtggttatagtatcatcaaattaactgcctctattattaagcattaggttgcttttattttattcctctatagtatatatcattgcagtaaatattaacatcgtatttaaaacattttattttcaggatattttcttaggatcattagtatagttttatagctgaagtcaaactattttcaattccaattttctctcaggtttaaattctgcgttggagagtggtatttggagtgcttcactaagttctttttccccaacactgaaagttttatagaaagcaaagggcacatagagttttgaggacctgtaaaggaaataactagtaactactggatgagtagaatagtcttagagattggttcaaatgtatgaattattggttcaaatatatgaataattaatatgagtttttaaacttctctatggtaacaaaagccatagtaatagcagtgagtaccaatgacctgatatatttaaataaaaataagcacataatctatatatgaatatatcctcattgtagtaaagtaataatattcagaaatatattttaaagaaataatacgatgtacaaaaaagtaaaatttacattttttcatccttctccaatcccctcactcctcaaaggtaatcactattaaaaggttaaaggttgagtgtgaatttgccttacttttatcttttatatatcttactttacttttatatatcttgatatatagattttaaaaaaacagatggagtcttactatacatattttcttcaattagcttttattttttaagcttaacatcatgtcagcaaatacagaccagcctcattcctgtacactgccaaagaatactttaaaatgcgaatggcccatgtatttttatccttttcctagtggttggacatttaggttgtttccattttttcactatgaaaaacagtgtcaggatgaacatcctttgtgcacatgtggaaagatccttatggtctagatgtccagaaatggtgctgctgtatcaaaggagatatgtctcttcaaaaaatctggatcaggccaggcgcggtggctcacgcctgtaatcctagcgctttgggaggccaaggcaggcggatcacaaggtcaagagatcgagaccatcctggccaacatggtgaagcctgtctctactaaaaacacaagaattagccgggcgtggtggcacacgcctgtaatcccagctactcaggcaggagaatcacttgaacccgggaggcggaggttgcagtgagccgagatagcaccactgcactccagcctggccacagagtgagactctgtctcaaaaaaaaaaaaaaaaaaaagtctggatcaatgtacacacttttcatagcagcttctgaaagagcctgtttcttgttactgttatgatataggctgtgtctttatcagttgcaattatactttctcttgccttaggctaattccagggtgccctgggtttgggagcctatgacacgttcattagttaaataggaatatgtggggttagggttaaagcatctgaatcagtgatggccaatttgaagtagaagagtgacttattttaattcagtatttattgaacagctgtgttctaggaacttttggcctgtgtcagtgaataagacaacaatccctacccacatggagctaatattctaaagaggggagacaggcaaccaatcagtaaattgtctagtatgttgaaaggtggtgctaagtgttatggaaagaaggaaagggagcaaggaagccggcatggggagtgcaggcggggggagactttgcacaaaacaaaatggttttggatgaaaagtagattttaaaatagaaacatgtgaaatagtaggtaattcatatctttcctgggaaaagaagtgttctttctctaccatacacataagggaatattgtgtctcattttagtcaccaaagataattagggctttgcactgtcagttgactacttttagctcaaactgttggtcgctggtactaatcttattggaggactaccctagatgtatataatgaaataatgctctgtttcaggttttctagacaacccatgctacagccagcttgtctccagattcctggactgtaaaccactttttttcactgagaatgctattgatcttttcaggtcactctgagcgaacatgcctagctgatgagttcaagtgtgatggtgggaggtgcatcccaagcgaatggatctgtgacggtgataatgactgtggggatatgagtgacgaggatgaaaggcaccagtgtcgtaagtgaagccgattaattcctctgcagagtcacattccagggaaacacagtagagttgtttttctgtgtttggagaatatgattgcagatttctctgtaattgaatggacactgatagaatgttacctttgtttctccatgctgggagtgtttgatatcatccacttaaatgcttcagagtgatgaaaaatgacttatgtttactttctttctcttacatttggctaatggacataatgtcctacatttctaagggaaaaaaaaaacccacaaatacttggttgtctccttttcttttttcttttctttctttctttcttttttttttttttgacaaggtcttactctgttgcccaggctggagtgcagtggcggtatcatggctcagtgcagcctccactttccaggctcaagcgatcctcccacttcagcctcccgagtagttgggaccatacgcccaccaccatgcctggctgattttttatactttttttttgtagagacgaagtctcactatattggctaggctaatctcaaactactgggctcaagcagtcctcttgccttggcctcccaaagtgctgggattacaagcatgagccactgcgcccagtggttggccgctcttaatagcaaccttcacagtataacaatgaactgtctctagtttcctttgtcaccttaaagcggcatggagggaggggtgttatgcctcttgagtagataatgggacatcattttcattaccaacagggtatggaaatcttagctagttcaagaattaatctaatcggtgttagaataatgtctttctatggtagggcaatagactcaatggctccctgctgcttgcatctgatggcaccctcctgtgttgtgactttggtggtgggtcacaactccacatttaccctatccaccctatccactgacatgggtggttttcagctacacatacatggattgtggtgtatgcatttctctcacctgtctttaccaacatcttcttctttcttttgtttcctattcacctgcaatgagtctggataaaacccctgttcttttattttgtggacactaatgatttgatgtcagcatctcacctctttcctcatagcatcatggtttctgacaactctgttagcatatgcctttcctctccaccccaatattgcttggggtggtagctataatgtagttggaaaagcactaaatttggaagagaaagacctaggtttgaagccccagctcttcacctagttctatgactttgagacatccagttaaccatcttgagcttcagttttctcatctatacaaatggtgtaaaaatacctatctcacattgtgcttgtgtgattacactttgtaaactaaaaaaagttaccaaaatataaggcattcggtatccaattaacaaaatggtagtggttttctgaagccctaagggaaaaagtatgaccattctaatgtattttatggaaaaataaatgagacattttattgtattgatttctttgaaaaagccagggtccaaagcaattaaaatggaatctttggaggtatttttattatgatctattattataatagcagtgtaatttgtctacgtgttttcctcccatttcctttcatacttagaatggtaagtaacattaaagcaaagagaattaactgctgcactgagctctcatgctttctgattcttgcgtgctttggtttcagagaatcaaaactgctcagattccgagtttctctgtgtaaatgacagacctccggacaggaggtgcattccccagtcttgggtctgtgatggcgatgtggattgtactgatggctacgatgagaatcagaattgcaccaggagaacttgctctgaaaatgaattcacctgtggttacggactgtgtatcccaaagatattcaggtgaattgaggattcaaaagttacccagcatgcctcaaatgtccatgggggctgggctcacttacctattaggcacccagtggccgcagtgcccagggcccatgatgcttttagtggcctatgaaaatgtttggattcctttcaaaatcaaagggaaaaaaaacttttacatcaaagaaagtattttaatatataatattaatatatctggctttataccaatatgattgcattaaaatgaaaagaagttacttaaattattaatatataataccatattagcaattttaaattaaatatataatttttaatatttttatggaggaaggagcccaagaaggcaaaaatgcctagggcctgtgaaagacagaatctggccttgcacagagggccagggagatgaatggagagggcttgagataagaattctttcttgaagctggtgacccgcttagttttccacttggagtagagacattggtattacaagaactgtttcactctcctctctctactataagaaaaataacagcacaagcatgatgataaatagagcttggctcttaggctcagagtcaagtagaggcaggtggagtgaactgagacaatgtctccaactaaggatgcagacactgatcaatatcatgcaggagggctggaaggccagactttctgatgctctctttttgacagaagttggaaatctggattttcatttgaaatactctgattttaaatgctggaaacaaattttaaaattcttaaaacactgtgtggatcaaacagattcggctcacagcctgctggtttgggggacctctcctgcaatgttccatggttggacttcttacctctttctccaaatgggcctcttcaaacagtttatatacattcttaacatcccaacttctcatcatcccacttaacaaatacttggattatggaaggaaatggagaagaacaatttgtaagtttcaatcctgattgactaggaaaatagtacgagcattagcaaaagtaggggagtccagaaaggtgcttgctcaaggtggaaggtgagtttgacatagtaggacttcctgaggtgaaagtatgtcttaggtatttgggcacaactggagccatgaagagatattgcttgtgccaaggactgttaagggacacacacaggcacattgagagcaacaggaatggccagcttacagcatgcgaaggaagacagtgggaaagatatactaagtaggcacaagatcagagaagcagagtcacaggggccattgactggaggggcaggcagctcatcaacaggtgctaatgtaccattggagtccagtgtggtgtatgattgtgtgtttattgtggtggtcctgaggaagaaggaggaggtgaaggagcagggactcagcagtaatttaaaaagtagataaatgctatcaggaaaatacactctgtgggtgattcatcctctgatgagtggacattgccgagaggtggtagtttgtgaactgacaatgcaaagacattcaagaggtggaactgtcttcttttgtagtgaagctgcagtagaatatgctttgtttgtatttaagtaatatgaatgtaaagtgtagatttttattttttgcacctaaagtggataaatctttgtctatattttctccctactgctcaagagttctattgtgttgcacttctatagtttttctgaatttggtaaatagctaatagcattagtcttagatgtaaatatattctgaatacctaggcttagactctaggcacaagaatggtagcaggtgttgattttgatcagactccaagttatctcctttattcctcacattctgagctttctgggttcttcctttatcattactatgatctcacagcacagtaacctttcctctctccctttctttcttcgtccattgttcctcccttcactttccctccctttctctctctctctctttctttttttccttgagctttctgaatttccttgaaaagggctatagtagaagagaaaaaaaagttctgtttgtttgaaaacctaagctatcagcttctaagtaagtccaaaatctgtgtctggagtagcctctactaggtgtgctgttagtgtgcatctccttgcttgcttggcagaaagtgtgctccccatttggtacagtgggacaggagatcatttttcctattgacctttttttttcttggctcactactgatgctgctgaaaaacatggatgataagactgaggggtgacaatttggtgatgagctggaatactgacttgcaatagtgtctgaaagcttggtgatttgcttgatgacttgtttttcctcctgcgttggatctaaattagacaaaggaaaacattggtgttttcaaaccatttggaaatgagttaaatagctcccgggagaccaaatggagctgagccagtctgccttgaccacagctttcttcacaattacatgcacacattttgctgtaaatcatgttgacaaggccctgggtttatggatggcagtgctggttagcaggcctggttataggtcagttgtaaaactgaccacattcactgttgttgccttcacattttgtaatgctctatgtgccgctcctatgctttctatgataaattgttcaaaaccattagctttgttcactcttatcaaagattccttgatgcatatgtgagaccccctttagacatcataacttctatgggatcttggagtaatatggagaagaaaggccagtttggctcacagaacttcaggaaattatattgttataatgatgcctgtgtatgttaggtcccgagatagcttctagtactacagcatgccttcttcctttgccagtatgccatgctaacctactagcttgcctttattcacatcaccatgaagactcacatctcatgatagatggcaggagtgtaatgaaagatggaaggaacaggactgacaatgtaaacgttattccagtgggaagatatgtgttcttagaggacacacccaataatcttatttataatatatagcactcaccctatgagtttccatttgggtatgggcacttttatcatgtgattacccagtacattgccagtgcctactggctatctcattatctgttgaacatagatagtgccactgttcataagctgtctcatagatctgatgtataccaaaattacaaaagttgtatttaattagtttatcaactaaggaaaaaatgaatgcaattatttttaatagctatagacctactaattgtctatagctattaaatggtagcatttaatggtagcatttctaatggtagcagccagcccctgaggaagttgtgtggaatgccaaatattggattcttctagaattggtgattagtggggtagacgaagatgttgggggaaaggggatcaaggacactggtgatcttgtcgaaatggttgacctggcatttaggtagataaagaaggaagcaaaaccccaagtgggtaatagttgaggtttattgccaacctctctgaaagtggtactggatctcatgatacaggtgtgaccggcacaatgactgtggtgactatagcgatgagaggggctgcttataccagacttgccaacagaatcagtttacctgtcagaacgggcgctgcattagtaaaaccttcgtctgtgatgaggataatgactgtggagatggatctgatgagctgatgcacctgtgccacaccccagcacccacgtgtccacctcacgagttcaagtgtgacaatgggcgctgcatcgagatgatgaaactctgcaaccacctagatgactgtttggacaacagcgatgagaaaggctgtggtgagtacaacagaggatttgggaaaaggaaacagggaagactgaatatggattctcaacccttcacgacttagactttccaacctgtcctctaactacaaagttaccataaaatcacgattcctgatatagcaaaaggttaccaaagtttcttggtatataagatggggacacacatttttttggaccaattctttgcttagatagtcattagagagaacagaagatgggcaaatattcaggccatcatttaacattattgccaaataaggtactcaagaatgaagggaaccaggttgattctctttgaattcttgtaatgactttttgcctgaagcatccctctgctggaactcattggcctgttcttcatttttgtcctcaggtaattgaatgggagagtttaatatctctctcaccccaaccaccacaagtaaagcagttgagaatccacaacatgggcattgtttgcttagcaccatcttgaactccataacattggcagttcatcctgtttgtggtgtttaatccttgtaaccattgtttcatgtatgttgatattgtctctgtaataacaatttagagaccatatcatttcatttattttgttttctttattccacttgttcattgtcagtactcattgaaagcatttgcctaattgacccagaagtatgtaatgtagtttttatccttatatgaaagataagatgtatatgaaataacattaaaattaaatgctagacagaaactgctgtggaaatgtggagaagagattatctatgcataatattaaaaaatctctgcagcaaaccaccatggcacgtgtttacctattataaaaaacttgcacatcccgcacatgtacccctgaacttaaaagttgaagaaaaaaaaagaaaaaaatttaaaaatcatctaaaaactggcttttgctctattgtaagaaaaacttctataaatttctaccaaagtttcaaaaaccatttaataaattaagaaaaacatgtgctatattatacatttatacaaaaatcatatggaactttcttatggttactcctaattcgtatagattcccattgcattttaattaattttgccttacctcaactataagaattaaatcctcaatagtacataattcaaattaaaatttttagcttgaagacgaagtgatctcagtaggtctcatccaaacctatgaaacattcactcttacaactggaaggagtactagtgatcttctgtaccctgttctctttgcagataataagactgtagcccatagatgggaaacgaattgtttgggggtgcacagtgaactagtagaagagcttggcctgatatttggataatggatttcgcaatgcatgaagttttaatctattgctccttgatgagtagagaactaataagaacttgctgtcctccctctgtagatcatttttgggtgaggttgcccatgtgttacaggaccagccagagggacgtgtagtgttgtgttgcacctagtgttgagctcatgccatctcgtgagaggcaaatgtgtgtatctctttgtggttccatgttcagtgatgtcacactggaagcctgagcttgaccatggtgtgaacagtcacactggaacatgctacaaatcagagcatttagaaaatttttcctgagccctgtttgaccagcacactggccaggctcttttcttctcctcttctttctcatttctcctgtattagttgttgaaaccactgatgaaggagtaagttggtgaggaagttgaaaaatagtgacttttcaataatccacagtctttggaagtctttgttgtctgtcttagcatgattcattaagaattggcactgtttagtagaaatgttgactttgaaccattatagtgagttggtcgttgatattttaggatctctaagaactgctttttacctacaggcattaatgaatgccatgacccttcaatcagtggctgcgatcacaactgcacagacaccttaaccagtttctattgttcctgtcgtcctggttacaagctcatgtctgacaagcggacttgtgttgatattgatgaatgcacagagatgccttttgtctgtagccagaagtgtgagaatgtaataggctcctacatctgtaagtgtgccccaggctacctccgagaaccagatggaaagacctgccggcaaaacagtaacatcgaaccctatctcatttttagcaaccgttactatttgagaaatttaactatagatggctatttttactccctcatcttggaaggactgggcaatgttgtggcattagattttgaccgagtagagaagagattgtattggattgatacacagaggcaagtcattgagagaatgtttctgaataagacaaacaaggagacaatcataaaccacagactaccagctgcagaaagtctggctgtagactgggtttccaggtaagaaaacactgatgagctttttaaaagttaaaaattaaaaaattctaaccatgttttcatcttgataggaaattaatttttcaacttgggttaatatgcagatacatttaatgtttctgcaggtttattttctgctttgtatctgatattcaaatgatagattcagaacagaatatctaattattttaaaaatttatagtatcatttttatggaaagaggaattgcaagggaagagagttcactgttgctggccattcacttaactggagatgatatgaagggacgattcatgcattcattggtgcattcagtcattacttcctgagtccctcctacatgcccagtgtgatgacaagcagcaggggttttgaggggaacaaggcagacatggcccttgctctcctgaagtacataggcttgcttacaatacttgtcattggccgggggcagtggctcacgcctgtaatctcagaactttgggaggctgaggtgagaggatcgcttgagcccagaagttcaagaccagcctgggcaacatggcgaaatctgtctctatggaaaatgaaaaaaattagccaggaaaggtggtgttcatctgtagtcccagctactcatgaggctgaggtaggaggatcccttaagcccaggagatgcaggttgcagggaccgagaacatgcatggcactccagcctgagtaacagagtgagaccctttctcaaaaaaaacaaaacaaacaaaacaaaaaaaacaaccaatactagtcattcccagcatgggctgggcgtgaaaactggagaatggctaacatgagactcttgttttgagattgcccttatggaaactgacagtctttaaggcaggccagtgatattttaactaaactaccagatcaaccacacttcttaacatctctattgaatatcaaatctatcggattcttggcagcataaacttattggctttgtggtcaacagacatcaatctgcaggcactgtaaagatgtatgctgtaaagattcttgttgcagtcagtccagacctccagagggctcttccccacatcctcatatttgactcccttaagggtaaagatcctaaaatgggtggggacagttggcttcccagttctccctgaccagtagctggcctgacataggtgctgagtgcttgctgaataatgaatgaaacattgactaagcattcctattgtatgtatcaattcctgttttacgtatcctacatgtcaaaaagtatagtgattaatgatttccaggaacagaactgagcatggtactgttcttgtcaccatcctttgttccactgcagaaaaaataatatttgaactgtaagacattgtcattcagccctctctctcagaaactgctagaatgacatttctcttggatttcagctatttcctctctatctaggtgtgttctttatcagaagagaattaaatacatgtgaggaagatgggcaagaaagtctgggtgagggtagggtaaacttttcttgaaagtccaggagggtgcacaaccaggctcagcgttcctgaaaacacaaaggcagaatggagcccagttacatttacattggtagggggcagttctaagatactagctacactgaaattagaaacaacttttttctccaatattaataaatatttctgctgtcagcactagggtgtttggtttccaaagcccttgcatttgatttaactttttaaaccaccattatgcacattggaagatactgttggctctcagtgatcttaatttttccagtagtggagatggaatatcttctccatgttttcttgagaagaatctgttcacaggatgtcttttgactgtggaataaagagaaattaatgggaaagcagtaagctcaacagagtagagtgccctatggggtagccagtctgccaggacttgaatggtaatagcaacaggaatactaatacgacaagaataataatagcaactccttctaagcctgttgtgatctgaaataatataatgttttaaaaagtccctggtctgaggcctggcatttaacaagtgttcaataattagctactattattctcactgttcttagtgtctacaatgatggaatccaagattgtagccatctcattcatcaggatttactcatttacccaagtgaattaactggcaagacttgtacatatatggatactcattccttcttgctgaagcctgaagcgatgctactatcctaactattcagatatccagcatgaatggttaagggcgtacttattgcaaagaggcattcaggtcttttggaagggaaatcattctccttcattctccttccggttggaattgattatcaaatcctaaatgaccttctcactataggtgcatttaaccctttggaaggttatggatactataagactctggtgaaagccctgggcccctttagaaagtacacagatcaccaaagctggcttccctgattctgggtaaagaccttgggttaagaacacttaccttataagaaaaataaattttattgaataaaaatacatttataacagaaatgtccttgaggtagcagtttctaacagatcctaatatgtttctaaagcttcttaggtttgattaagtgaaatgtgtctcaggttaagaaactcattttgacagcctgtctgacagaggcagggatgtctctttatcctaaggatgtcataatctttatcttaagaatgtcataattcagagtttctctgtgcagtttcagtgacacacttagacaagtgtgtttccttgactccaccatttaaactgtaattcatgatactcacctctgcttccctgttctgctaagcctttgcactgcctggagagggtgctttatgctgcatgaggaaagtaaaaccagatccgtcgaatgaagtgtgtcccccgtgttttctacatgacaccaccttaaagtgggaattattgcacacagtcttgcaccctctgttgcctcactgcaggaagacaaacttcctgttttcccctgccctcatttgcctgaagaaaggtgacttctaacaactgtctgtgattctcaggtagcttggataggaaactgggtggctaaatatgtaccatttcacaaagtgactgtattgattaactcctggctctccattttagaaagctctactggttggatgcccgcctggatggcctctttgtctctgacctcaatggtggacaccgccgcatgctggcccagcactgtgtggatgccaacaacaccttctgctttgataatcccagaggacttgcccttcaccctcaatatgggtatggtctccctgcaatcctgggcttttctttcacctccttcttccgcctctgttaccaaaaaggctgttcatgtaactatctcaaggccaatgtcttgctggggtttgtcttctgcttttcctacttggtaaattgtttagtgtaatgagtagaagcatggcttcttcatatcatcatcatcagctgttctgttttctttgccctgacacacttttgcacttttcaagtcctgtattttggctgcatgcaaagaaaactgtggtttcagaaaaccgatttctttactggactctcaaagtcaaagccactgaaatccagttaacttgtttatttgtgagcattttctgtacattgtccccttcctttttcttttttagattatttgctgttagctctctttcttttctgaggggctctacagaatgcagactccatttctctaaatggagaaaaggtgtgtattttggctactgacttcttttggcatcagggactgaccctttgtgtttgccctgacaggtacatctactgggcagactggggtcaccgcgcatacattgggagagtaggcatggatggaaccaacaagtctgtgattatctccaccaagttagagtggcctaatggcatcaccattgattacaccaatgatctactctactgggcagatgcccacctgggttacatagagtacgtacatagaaaagcataaaacaattgtgtaactgtttatttcaaacatcagagcttgtgattccagtctattagtcccctctattgtctaactggcctgtctgttggaagtcattcagaggaagtcacacttctaactaaaactgctgagctctatggtatggtgcagtagaaagagggtgaacttttaaatcatatggatcagggtttatgacctggtgttttcacttcttattgttttttttcatctagaaaatggggctaataatctctccccatggtagtcagctcagtgtgcaactcatcttaatttttttttatctctttaattggctctcccctatgaaatatatgattaataaattttggtatttgagaaaaggaaaagaataaaaggatctggaaaactttccctaaaatactttggcacatttatggttaagtgcagtgcagtgttttaggtggcagtagagtctgttaacattaatccaatatgataaggcatttatatctttctggtaataggataattttttaagtgtgttaaatatactgttcaataaacaatactcattgtaaaaagatgatacacattattaatcaaaaattaatcaacaatacccatattgaattttgctagttatggcctagttggaccatagtaatgtcttctgcataagcatttatggataacgatccaggaacagcctgttgcactcaaaagcatggaaatgccattcattcagtagaactatttcaaatttttttattttatttttagaaattcctttcttctgttatatttattttgctgccaaagtcagtgtagtaaagtttgaagttctctaacaccatactccctggggacatgccactgaaaaagaaggaatactggcacacacgctagtgctctttcttcctgtgctcatggcaggcataattaatcaatccaagtactttctcttgttgaactggttcatttgctacactaaggtagcctttagcattctcattgcagaatttaccgtagcagatactaactcactcttagggtagagactaactttaattagaagcagtacaatattatttctagtttacttataccattttgatgtgatatgctgatggtaatacccttagcccttcccacagtgtgtgtatcctctcttaaaaggcacatcaaagagctgagttagctttccatacaatcctatattgaattagtagaagcatcaagatgttcaaagaagcttcaacaactttctaactgacatttgttgttctttgggtcctatagattattcttggtcttgaaagcttagtaggtgtcactcagcatacatttagacagtgtttccaggagcattagagatgaaaaaaggaattttctagttacataatattctgttcactttttgataaatctaatatagattatttacttagatggattataaaatttaggcagtagattttagtctaaaagtcaaatcataatatgaggcactgtgatctgggaataaaggaaactttaatattcatgagccatgttaaattggttacctcttggagaggtagcaatgcctgtgttcagaaatatatttcatagacgcataaagcaatagatttttatagagcatccaattgattccttgtacatcttgggatgcaccaacacatcactggagctgtgcctgtagttctactcttacttttttttttttgagatggagattcgctcttgttgcccaggctgaagtgcaatggtgtgatctcggctcaccacaacctctgcctcctgggttcaagcaattctcctgcctcagcctcctgaggagctggtattacaggcgtgcaccaccacgcctggctaattttgtatttttagtagagacggggtttctccatgttggtcaggctggtctcgaactcccgacctcaggtgatctccctgcctctgcctccctaagtgctgggattacaggcgtgagccactgcgcccagctgtgtagttctactcttgacaaaaagtactcatacagatatctgagatctctctgcaaagattacagatgaactggaagggaaggtctcaggactactttctggtctatgatttttttagaaaaacagatggtggctaggtgcagtggctcacacttataatcccagctctttgggaggctgagcagggcagattgcatgaactcaggagttcaagaccagcttgggcaacatgacgaaaccctgtctctacaaaaattacaaaaattagctggatgtggtggcacctgcctgtcccagctactcaggagactgaggtgggaggatcacttgaacccaggaggaagaggttgcagtgagccaacattgtacaactgtactccagcttgggcaacagagtcagactatctctagataaataaataaataaataaataaataaataaataaatcagacggtgactaatttctggtcatttacctgcatccttatcaacaaaggccaaacacatcttcaagttttcctatgacttttataagttaccataaattatattttgggaaatatttttaacattgcatggctaacattatcaggtttcttagttgctagcttgttctatctcctgtttgagttttaggatctgttccaaatttttaaaatattaaattttcactattttagaaatgatttctgatatagacccacagtaatgaaagcccttggaactgagaggacttgggaatttggctgtggatcctttgtaacatcttgaaatcggagaaccttctctggaggtttattcatctgtaaaagtattcgctaatggtgccatggcaagattaataataaatgtcctgctggtgtttgcgaagttaaccctgcaggcctgtaagttgtgttcccctcaggttatactgagaacgcaactatctcctagaatagcgtcccctccggaatgttaatgagaaggtagaattccagtataatattgctatcttctgatttcttccaatggtgttggaagaaacaagaatggtgttcaccccaggatatcaaaagggtgcttaatgaggaacatcactataagaggccataaacctacaacagctataacagcttcatccgcaggaaagcagctgtggttaggaattagtgattatttaaactcctgacactattcctattttgttaagtattgctttttcacttctacatcttttgttcaattcgaattcatcctttaagtttagtttttattttaattaaagactaggagttttgaggatctgaacttatattatcgctaggaggtagaattttattgattggtgaattcttttatcctgcaagacattagaggagaggaattaccttcatcacgtaactgtttctgcttactgctgcaggtactctgatttggagggccaccatcgacacacggtgtatgatggggcactgcctcaccctttcgctattaccatttttgaagacactatttattggacagattggaatacaaggacagtggaaaagggaaacaaatatgatggatcaaatagacagacactggtgaacacaacacacagaccatttgacatccatgtgtaccatccatataggcagcccattggtgagtaggtgattgaggggtttggcaaggttgccttgggttatgtgcatgtcatgattgtctttaagcatgaacttcatgatttacaaaaagtttgttgtacttgctagtgttttcttcaaagcatatgctgaaagttgacagtaggcaaattatctttagagtttatcccccttcccctgggaaagactacctagaactcttctttttcttaaaactcgctcagttcttcaagatcatctttttttttcctttgtttttgataagatttaacagttatcatgttgccatatttacttcatcaatttctatgggaggactgaagtattttaaaggaattaaaaatatggcatttcagccctaaatactaaatactaaataaatgcatatgatattgtattgtgtataaattagatattattcttatcttctagaagataatgtcaagagcagtgcattttagtgttttttaagtaagagaacttgtttttatttgattgtgaactcatattccttttatgcaattaaagcaactttatgatttagagtctgaaataaagataaaggtctgaaatatattttggggatagactggtttttgtgggtctgctttgttgtgatgtcttgctaaaacatatgataaacttggaattaaggaaaaatgagaattagcaaaataaagaaatttagtatttctttctggaagttaatattcttcatatcatttttattagaagttcaagtaaatattcatctcaaagtggtgaccaggaaaattagtaaagatgctgctcagtttattcatccacattatttttggccaaacttgttacctgtatacttagaatgagggaatgaatatagcatctgttggaaattaaaactttaacctaggtctaggcaaatgaacataagctaagtttactgcctgctttcccaggacttggagaaacacatcttttctagtcagaaacaccagtgggtatagctcacttctggtagcatataaatgagctttcttaaagcacagggttgttgcttgtataactctatcatctattttatttaggaacttttgggaaaatcataaatctaggatagttttttttactctctaagaggtgatgagtttaatgtcaagatgtgtaatcagctaatctgtgcttgatactctctttaagcaaatgaacatatattttcttccttttccactagtgagcaatccctgtggtaccaacaatggtggctgttctcatctctgcctcatcaagccaggaggaaaagggttcacttgcgagtgtccagatgacttccgcacccttcagctgagtggcagcacctactgcctgcccatgtgctccagcacccagttcctgtgcgctaacaatgaaaagtaaggctctctttcccctctcctcagtgcctctccagcccgtggacagacattgaccttcaaggctccaagggatgggagttttctaatgagacaagattttggttaattaacttggttcgtgtggaacacagcaagacgctcagcctccaacttcagataatattttccatgaatagaaggagcttgctaaccaaactgttatgcatatatatgcaaactttcatagaaaggaagcaaaccatatatttctcatttctaattgtcctaagtattggagccagagtgtatataagtacatactgaaaaattgtccctagaagtaatagaatttcactgtcttttccatgtctatgccggcctagctccttagctgcctatgctaggggatccagggttacacattcaaatccatttgtgatcattcgtgtttgctatgaaacatggccacagattattttcttaacaatgtccacaggcccattgataactaggggacctgagttagagagtggcatggagagaggcattaatgcagatcatagcatctaagatgcagaggtagacgattgtagtgattaaataagatatctgagattaagaatctagcatacatttatcgtgagaaagaccctcaacagtttttattgccctccaacttcccaaacaatacttttatatcaccctggcagacaatctcaaccaatcactgctcctagaacacagctcaaaacacccactctttatttatttattgttttttttgtgtggaagaaatttattcatcatattaagagcacattttcagtttgtatttggatcttaagaaacctgttctatcttgccaagttatgttttctctgaaaatacaccattgtaactgagatctaattgatcctcttctagggccacgagagagctcatgcatgtcatttcttggaattcagtgttgactccttctctccagataactgttgcccctggtgctttgctaaagaagtgctgtatgttctctgtgcaggtgcattcctatctggtggaaatgtgatggacagaaagactgctcagatggctctgatgaactggccctttgcccgcagcgcttctgccgactgggacagttccagtgcaatgatggcaactgcaccagcccgcagactttatgcaatgctcaccaaaattgccctgatgggtctgatgaagaccgtcttctttgtggtgtgttgaattggtttatgcctctttttccgacttctatgttgattgcatatgatcatgattctgtgggtatttcctgaatatcatgaactaaaaaccagttcaaagtcctagaaggaaactcaggctccatcctttttctatttttatgaagtttttttttttttagaaatcttaaggtttttacaaggcaaatggttgaagtagacaataagttgtctctactggtggctcttcaccatgtgctgggcattgaatcccctttgagagctaacattgaggaggaaacgagaggtttccacccccatttttaacagggactctcagttgtcatatttctttatgtttccatttaaaaggcaaaaaaaaaaaaaaaaaaaaaaagaagactgagcacagtggctcatgcctgtaatcccaacagtttgggaggctgaggcaggtcgatcgcttgagcccaggattccaacaccagcctaggcaacatggcaaaagactgtctctacaaaaaatacaaaaaattagcctggcatggtggcatgtgcctgtaatcccagctacgtgggaggctgcagtagaagaatagcttgatcctgggaggttgaggctgcagtgagccgagattgtgccactgcactcacttggtctcaagaaaataaataaataatcaaataggcacaaaataaaattcccccaaactaaaaacaacacatcagtaacagtaacaaacacaaagtttgaagactattttccagtaggagaatagggacagaggaaggtatgcttaacaggtcagggtgttcagttcttatctcttaagtctgtatgcaataaagggatatttaagaatttgggagacagtaatagtcaaaagaagaagtgctccatgtagtagtactgattgataagtacattaggaaataagacctctaaaaagaaatcatgatcctgctatccaggattcactgatgtcaattaggagctttcattcttgatgccttccaagctgataaccaaatgtccctgctctcagagaatcaccactgtgactccaatgaatggcagtgtgccaacaaacgttgcatcccagaatcctggcagtgtgacacgtttaacgactgtgaggataactcagatgaagacagttcccactgtgccagcaggacctgccggccgggccagtttcggtgtgctaatggccgctgcatcccgcaggcctggaagtgtgacgtggataatgattgtggagaccactcggatgagcccattgaagaatgcagtaagttcctgtgggaggaccaaggcatgaccagagcagggagacacgaggaaacttccatgaggactgagagaggacatggagctttctttttcagctgatgggatgctcccccttggcactccctgcaaactctggcactgcaaggcagagtatagctgtgtggcttgcaggtggaaccagactctgtttctgaagtggctaatacctccttttgatacatagaatgtctaaccaaccagaatatgataccaagaacttatatttcatatatctactgctttctcacttgagccacagagaaatgttatgaggtagggaaggtgggtgtgaaccaattccattttacagatgaggaaactgaggttcacattaagtggatggttacattactgtttagtgtcagacctaacacttcaacccaggttttttacttcaaaccctgtccttccccaaccccacccacaaagttttactgtaaaacaaatgagtggtgctgagatattgagaaaacttaggactatttttctgctcatggtaaaccgatcacatctaaaacagacacatattgccagaggtggtttgcttggtaacatggtcattgttactcctcagtaccacaacctcaatgtgacaatggaaaggtgctttcttgtaccttcagttctgactttgatgcctcctcccttttcagtgagctctgcccatctctgtgacaacttcacagaattcagctgcaaaacaaattaccgctgcatcccaaagtgggccgtgtgcaatggtgtagacgactgcagggacaacagtgatgagcaaggctgtggtaggaggggccacaggggagtggagggagggacaagaaagtgcacatgtcaagcgccatttattagatgagagatgagagtgtatttcccatgtcatcttttctttgtttacctctgtaaaaaaatggttgattcttctaataacatgttacatttttgtagcattttgcagggttaccaggggtatttaatctgtagcattttaagtcatgctgtcattgaggaagacgttattaagatgttagaaacttgtgtaatttcttccaaatgtagaatccttattcatacttgaccagtttaaattgtttctctaattttataaattggttgaaattggtggaaaggggttagagaaaagacttcgtatctatctctaaaaaggatatttccaaattaggatatttcttatttggggattttcatattctgaatgtctctctgattttccctgttatctattggacatctgtagtctctctggtaacatgggaaagccagataaattaatggaatttgtcaagattagtcatagtctaacttgaaaccaaagcatctggagtatgtgtgttgggtttagttggaagagaagtaaggaaggtactaaattcttttaagaacactgagtccaattgactgaagataatatgatcaaaatatttatttattatggcataattttagcatcccataccaggcctttgttgcaaattacaaaccagataccatttcattctttgcacggtttctaccaaagggaatggatcgagtttcaagtggtagaataggctcagggtagctaaaagagggaatgttgaccatgaatgttgctggcattcctctctttgggagcttcaagagtgtgctaatacaattctcagactgtctcacaaggaagccaatactactttgtgcatttctctgccaatggtttatgaagtctttgcaatgactgctttgcagaggagaggacatgccatcctgtgggggatttccgctgtaaaaatcaccactgcatccctcttcgttggcagtgtgatgggcaaaatgactgtggagataactcagatgaggaaaactgtggtgagtgttcacagtcctatggtccttatgtgccaccagagctgtgatgtttgctttttgtccataattcaactgtctatgtcattgatcctcaatgggtaggatgatatcaagctgtctgatctctttctttccactggtcagtacatttctactttctcttccactaaagacataagcatctccttctgagatgtttcacatcaagcttttggaggaaggtatttactgaagtatatcttttgtgtgttgaatttatttacatccaacttttttttccaaaagaagttgaggtgacttatgataaaggaaaaatgtaataagataaatagaatagaaatagaaaaccaggaccagagaagtagagggaggaagggtgctaacccagagacactgcttcttaagctctttccccaaaatggccttcataggagaggagagagaacttgtgtttgcattattacccttcctagaatagttgactattttaggagggctaatagttaaataacaggacaggttttagtttctctctcccagttgaaggtattgactacaaggcattggatagggaggttgaggaaaggaagccaagaggctgagatcatatcaaattagatggtcagaacacactcaatgtgtgttctgaaaacaagcttaatgaagccctgcccagagtgtatatcactgacccatgatatgcgtcaatttctaattgactaatgagacacattctaactttgtttaccttttggaagaaagaagtgatcatcacttgcaataggcaatgagagatttaggaagctgactacacctgcaaatatcagttagctaaaaacttatacaaaagggtaatccaattggcattttgtcttttattaataaaagtcaatgttgaatcctataagaggttatctagagttttacgaaatagaaaaaattaagataaaatcaagctgggcatggtggaacacacctgcagtcccagctacgcaggagcctgagcagggaggattactttagaccaggagttcaaagtcagcctgggcaatgttgaaagatcctgtttcaaaaaaaaaaaaaaaaaaacagagagagagagagagagcaagagagaaagagagatcagatcacctttggacaaacttcttaataaaggccattctttacagactcaaaattaaggtgaaaggtctagttttggagggtgaatgatttcccaagcacacctctggggcttgggacacaggagggtgctgggcacccagggcactatggtcagctcacaagatgtctcctgtatgtgattcctggtgcacactcatggccaggtgcctttcctttccagctccccgggagtgcacagagagcgagtttcgatgtgtcaatcagcagtgcattccctcgcgttggatctgtgaccattacaacgactgtggggacaactcagatgaacgggactgtggtaactgtcatttgagaagcttaccatagaattttgtactgtgacagtgtaggggcttcaaattagtgtttataaggcttttagaggaaaattatttttgtatatgtgtaatatgtaaaccttagcataacacagtatcttctgctctgtattttctatgcattattcttaacttacagcagtctagattagtcataattgaggaaaatagcaaggaattttaaacatttaattttaatatcaacacttcttaggagcagattttaatctgcgttagccttgtaaacaaagacgttgatcttgctactattccaccgaaagtcaccctaaggaatatacatgtgctactatgactctcttgtgtagagatcagatcattgacagagtaatcctaaacccaaagtaatttttatagttctttactgatttggtgttgggtctcaggaaaattagaaaacattgaaaattggggaattccgatttctgaggaaaagcttaagagctggagattatttaatattagggagctaggtacttccatctctgtatgttgagtggggaaagtgtgagttttgagaatgtattaatttgctaaccacaagttgtgggtttgctgtgagccagtcacagggtgtagataggaatgtgatggagtaaccactatactccaggtacctaatatctgtctgaaaatgacaaggccttctcggaatgacaatcttttctcttcagagatgaggacctgccatcctgaatattttcagtgtacaagtggacattgtgtacacagtgaactgaaatgtgatggatccgctgactgtttggatgcgtctgatgaagctgattgtcgtaagtccctagacacatatgtagtactgcttacctgagagcatggatatgatagtttagacatcagtccgctgccgcttcttagattaaaaggccataagtattgtctgttcagcatgcactgataatgatcagttcacctgagttctaagtcatcataatcatatatttcacaatggccgttcaagtgtacttccttgctattttaaatggagaatatattaagtaatctgtgctaacaaagtatttatatattatcagctactatacaaatcattaattagataaaaaacatttcaggtaaaaaaatattcaagcaacgaatacattagtataaagaacttgggttgggtattcgaacatattgaatttatagcattaaagtttttctcagtcacacaatggggtataaaaatgattaaaacttgaagggggccagcccctccacacctgtaggtatttctcctcaggtgggatgagagactgagaagactgagagagatcaaaatggagtttcttgtatcttccttttctgcatagacacagtaactgtctgatctttcttttccctacaaaaactggaaagccaacatgattactcagatttgagtctttatggatcacttgaataaatgcaaaatgtttatacatcattattgctgatccatcaacagtaaccatcatccatgatagccatccatgatggttattgttgatgatgtggttgccaaagagactttataaatgtatgtgggtaaaaccagtcttgacatttgcctgtagagattaagtccagtgctgtccatgccatggatgattcatgccattggaaactgggctctgacagctgcccttaagacatagtccattcaactttcagacaggtcaaggccactatacatcttgatgaataaagaagagcaggctgtaatggcaagagccaaaggagaaatagcaggaagcttccccaaagtagtcaatttgtataataatttgaatatgttttttcccccatggcagccacacgctttcctgatggtgcatactgccaggctactatgttcgaatgcaaaaaccatgtttgtatcccgccatattggaaatgtgatggcgatgatgactgtggcgatggttcagatgaagaacttcacctgtgctgtaagagggagagaaacggagtgaatgggagtggtgttgtctgtcaaatctcaatgtttcttacgtgtagcatgtgagcctggagagcagttgtacaattgtttaggaatggacacaggatcagcgttggtgttatttcactgggtcttccagcttcagttctctctgtaacctgagaaagttgggaaaacctccatgtttttaaacatattatggccttagaaaacaatgtctctaagggaaatgttgcttgaaaacctagtatgcataaataaaggcaggtctgttgtggttgaagtctgaggaagggtagggaggaggctgtacctctcctgctgtatcctactttgggtgcccctggaagtaccctctccaaacccctagagcttcctggagcacctttagaaaatgctaagactttcttaatctctacagtcacttccttttaacatggtaattcaaggccatctaattccctcttgctgaatgatgcatatatatatatatattttaaaccctgcttgtttgtgagtctcaattcaggtacatgtcagtagcagaggaggaggggtatttcaaaatcacatgccctggcctcaccctaggcttagacctgatggagcagaatctccaagaatgaagcctgcacatacatatttttaaaaagcttcttagccttttagtttagtcccctggttgagaactactgattttaatgaagtgaacgtaaatagagtttgttgcagtcattttgctacatgctttgagtcattggaggaactctagggtaatagttctcaaaagtgtcttccctggactaggaatgtcagtgccacttgggaatatgttagaaatgcaaattcatgggatgcaccctatccaaatagaaattaaaaatcaagaccaaaagaagtagaggaaggaaaggcattaactcaaagaccctgctttttgaactctttccccaaagtggccttaattttgtgggaaaattaagggcccagcaatctatacatttacaggcccctcaaatgattctgatgcaaactaaagtgtcaggattttgtgtaagtaaaagcccttaacctaggagacaagacctggagaagcactcctgttggaagttcacgttgcatcttccatcccctttcccagcttcatcactactcatttttagcccagagatttgacttgtgaagatgatatatcttagtattttgtttcttctcagaaaactttaattagtgttcattatatttcacagttgcatcccaacatttttctttacttgttaggaactagccttgttttgctttgaacttcatgaatcttgagacatatcttagacatgtttaactttcaaagaagtccttaggaaatctcttctctccataaggtaaaatgcccatagctagtaaaaataaactttggagagtcagagacacagctacattaaaaggtttccaacactgttttataatattgaacttgcctttcacagcaaataattattgcaatagttctattaacaatacttccaagaatcagcccttagatctgaccctttcccctcaaccaatcttattataagtctctcctcttgatccctgtgtgtgataccaaggcagaaggaaaatcagacagcccaaatcctccatgtgaaagacaggccacatgtgaagaccacatgtatgttgagttcactgaatttgtggtacatgcatactgaaccatgttccctgtaccaaacaagtaggggacctggggactacccttgagttcctcacatctgtacaggcagcagctagaggtctcactctggacagcaagtgtgtcagggtttgattgtgagatatcgattttaaatgtaagaggtgagggaattcaggaaggaaaatccaacacaatttaaagcttcaataaaagactcaggcgctagagactctatgacaactgccaccaggaggatcaaacaaatggcttcctggctgttaggataagagcccgtgtactgccagtctgtccagcctcacagccaccattgtgctccacgctccatgctccagccaccgaggcctttattcaggtccagagacctgccatcctcctccctgactcagaatctatgggaagtttcttccaagtcttcctctccctaacttatgtcagatcaccccagtagatgtttcatagttgtaattgaatggttaatttcaaaagtctgtttctctactagaatgaaagttccatgaggacaaggactgggtctttcttgtttcccatcatatctactgcctagcacagtgccttggtgtgtactatacatgtaaggtgtatctgctgattgattaatcaaatgagtaaatgagtgcatgaatgaagcaagcctggtgctgacactggagtattttagatattgacacttagattctactgttaacttgtaatttcatttttctatctttcctttcagtggatgttccctgtaattcaccaaaccgtttccggtgtgacaacaatcgctgcatttatagtcatgaggtgtgcaatggtgtggatgactgtggagatggaactgatgagacagaggagcactgtaagcaaaagtcaaaagggagaaggaaaaaggaaggaccccaagtggtctgcagtttggaaaatgtgcctctgggatttcagtttgttctatagagttgtgcccatgactgcagatctctgctgacataattgtttacaagaccatgcaaacacatgcattgcttacatgtaaccctgcctgtttcttcctgtctcatttgagcatgatgctggcaaatccattaatttttcagtctttgtttaaacatttaataagccttcccctcctcttttctcataagaaactgagaacaaacactaaatactgattgagccacacctcgcaaattaatagtttattttttcaaatataagatttgatcattcttcagccttcaggagtcgctaattgctaatctaggcaggtgcccagctgcagagatcatgtgaagcaaggcagtactggtgttaacagagcttacctaatatccttgttgaaaatgaaagttcatttcccagaagagaaaagtgatagattagtttaagatagaagttccaaactggctgcatttaacaattgaggcattgaaatatctgtactttttctgcactttcaaaatgttttaaaatctatccattgaaggggaaatttgaccaattttctgggcaatttaatttgcctagaaaaaagtcagtgaggaaaatcatttccccaactccaattattttttccccaaaaagacattatctgggaaaattaagataaatgcctgatttctccactttctatttcttgtattgatgtggtcttagaatgctttgccacagaatgcttacttccaacccccatcccagaggagactgtcagtcagggaggactttgacactaccacaaccttcaagttcgtattcctgttattattattactggcagagataacattaatacattatagcattaatatgtttatttgaggcatagcgcaaaagcatgaaagcccagaaataaaatattttttaaaaatttgagcagatttcccccttccccaaaatctctttccatttcccctactaaaagtgccatttttaaaaaaatggagcaagacatttgtagcacatggtcaaatcccagagtggaaaaaagaatccataaacttctattcttttcaaggaacagggttttagtctgggaaaccactaccggtcaccacaggaagcaacctgcaacatttcaatggcttaaaatggcaaaggttcatttcttgctcatgtaaagtttaatgacagtcaagcaaccctcctccatcccataattataccatcagggacacattcaaggttgccaaggcaggagaagatcaacatggtggaggcacacagcctcttaacttcctgagcctggaaatgacagatatcctcttgctcatagtccattggtcagaaccggtcacatggccctgctctaactgtaagggagactggaaaatgcaagaatatgcattctcatacaatttacccttgtgtcactaaatactcctttattattttcttctcacacacagaacactcttaaccccttcccaagggacatagctcatagtccattcagaaactgaaatccaggacctctgggtaatgggcagtagccactcaatcagttccagatgtggttcctcttggttgggagacccataaactaataaacaatcggtgccgtctgtgcctgataggtagtggcggaacaggggcaacacaatagaaataaacactcccattggaaaggaagaattagagactcatggccatcaccaatgtatagcaattctgaagtcccactgggctgggatgacacatgttggcacaggacagtcctgattcatgtcggctgccccagtggaattatgaatagcaccaccttcactttcaaaagcacactggcttggaaaggagagtaaattacacagccactctgggcagacattgtaaaggtcccttctttggggagtggagggtatttattgattcgctcatgcctctgctctgggaggagctcctgtgttaaaatgtctctcattgtttctgactctaccctttgagagttttttcttgtctattttcctcttcaaatgaagagggaaagggaaatatgctaccattagggccagcacagcagctttctcaccccacttcttgcttatagaaggtcaggagcccaggagttgttttttttttttttttttttttccaagtctcaaacagtcatagtattttggtttatttggttatatctttctcccagaaacataccaggcatttgatctgtttgcttctagcctgttctaaaagttagtaacctgacctagtgctctttttgagacatagttctcaaatctgcttttttctttgctttctttccttcatagagttctgtctgaacttattgtcacttacatccaatccatgtagaaaaatagatgggcagtcattttatccaatgaggaggttttattgggccttcgtgtctcaaagccttttaaacttcagacttttactgtttgggatgtagatacaggtggcttttctcacacagcaaatttctgggctttattttatttctgcttgtaagttaaccagttcttcccttagcttctctctttcttatactatcttgccaaactcaggaatggcaatcaatgcacattgctaacattctatcttctaacctcgctccatgattgacaggttcagtaagcgtgtgatctgccttccagtttttccgaggtgatagctttatcaaatgctttgactttgcataacatgatctcaacctttcctgcctccactatcagtgtccttgttgcttgcctcctgactgttaatccaatgccaaatattttatgtttttattatggcagtactctacttccctcatcactctatgttattcggagtaattaatactagctgttgcaaccagcaaatcctgaagtctcaggggtgtaacataatgaagccttgttgagcactcatataaaggccaacgctggtttcacagccctcctgcatcttgcagctgtgctgcctggaacacatggcttccaaggttgctgcagcagcacaggcgacacagaggaggcacgtgtgcttttcattgcttcagcccagtagtgacacatggcacctccaactgacagtacgttggctagaactggtcacatggtcctaatgcagctgcaagggagactgggaaatgtagggaagcacttgtttatttggtaagcacaaactgtctctgtcatagaaggaagtatcttgcttcataaaagaaaaagttttaattttaacttgttcttacattacaggtagaaaaccaaccccgaaaccttgtacagaatatgaatataagtgtggcaatgggcattgcattccacatgacaatgtgtgtgatgatgccgatgactgtggtgactggtccgatgaactgggttgcagtaagtaaacacttgtttttatagttcattgtagtaactcaggtttacctaattaaaacatgcaataacataatgtagacactgaccacattttctctttaatgtactttttgcttgaattccagtcaagcccatagctagctgtgattgagtgcttatcctagaccagacattgtgtcaaacattctacgtgcctggtagcaatcttatgagttaggtgttattatctctttcttatgtacaaatgagcaacgaacttagaggttaaatgaattggccaggtcttactgtcattaagaggttgactcaggatttgaactctggtctgtttcactgcagagcacatcctcgtcccagtccactgggtgcctcttagcactttaaggctacatattttgtttattagtctgcacattacggtgggaggatgggggagggatagcattaggagaaatacctaatgtaaatgacgagttaacgggtgcagcaagccaacatggcacatgcatacatatgtaacaaacctgcacattgtgcacatgtaccctagaacttaaagtatatacatgaaaaaaatcttaagccgaatgcagtatccttggtacttgaaaatccttctgagggtgtttgatcaagaagggaacgccacaggggacctgggaagggacattgatttttatttttaaagttgagggagtggctggatgcagtggctcatgcctgtaatcccaacactttgggaggccgaggcagacaaatcacttgagcccaggagttcaggaacagcctgggcagcatggcgaaactccgtcttaacaaaatacacaaaaatttgctgggtgtagtggtgtgcacctctagttccagatactcgagaggatgaggtggaaagatggcttgagtgcaggtaggggctgcagtgagctgtgattgtgccactgtactccagcctgggcaataaagcaagaccttgtctcaaaacaaacaaacaaacaaacaaacaaacaaaaaagaaagtagagggagcactttgtgtaggaaaaggatgatgaacataaccaaggaacaattctagctcaatattttgatggaaatgttaaaatgacatgttactaagtcacacctttgtagtccatttatgactcataaagtgctttcacatacattatttaatgtgttactcaagttagccccattgagttgcttttattgtctatgtaataaagctcagagagcttaagtaacttcctcgtggtcacacagaatgtcagaggcagaattggagcagtcacgtaagtccaggttaggagggctggcctctggatccctgccactagctgtgccactttgggcacatactgacctctccagtctttggtttcctcacaggaaaaaggaggcccttctccaaactctaggagcctgtgacttaatcatcctagtgagctccatgtgctttcaacttcttgggctctaattgatttttttctgaggcatccaaaggattttctatcaatttttctcctgcgtgagttacaaagaggtgtgaataaccagccatattgagttggcttgccatttatttcacatacgttttctgtgggacttggagttattgacagaatgaagtgacttgataaaatattttaaaaacctgaacatgatagaatttgcaaaactgaatggcaggtgtgggttcttactcccagagactgataggtggcttaaaatagactacagtactttcttttcaaatggcatttaattagtagcaggtttttttttttttttaaggaaataagtagcacaagcaattcaggtatggaagcagcttctcttttcaaatattaagtgaatatgtgatatggaattcagtcttatttctctgggctaataatttgaggcatagaaatcttttttaatatactagttcttgggtgctgttaatttatttgcctttgtcttttttctccttcctcctgttctccttcttcttcttccttctcctcctactccttcgtcttcttcttctccaaaagcatcattgaagtgtttgagacacattgttcgattttttaaaattgaaggtgtacaacatgacgttttgatatacttatatatagtgatgtgttataatcaagcaaattaacatatccattatctcacatagttatctttaaaaaaattatttttgtggtaagagcacctaaagtctactgtcttggcaaatttttgggaatgaaaatacatcagcattttttctagcaccattcaggtataaaggaaagaagttaacctcaggttgcaaatattatttatgtgatcataaagatagattgacttgctgtttctctggtagttcttattccttcttcataaaatggaaagtagggtatttcttttataaatagagtgccatatgtttgggtttggggaaatcagttatgtgggttaaaatggtgatcattttcaaatgaaaacaatgataagaaagccctcacattttaggaagaatcctacagtgtcgtgtggtttctgctcttgttaaggactcttgcttcacaaaagcgtgactcatttagtggatcacttggtccagaaattcttgactcctgggacccctaatccctttatagatttcagagctggggggaaattacaaagtctagtgatgcatgtgagacccacggaggttatgtgattggctcaatgatatccaagttaataaacctaggtcagattcatttagcaatgtagaggggatatcactgctaacctcacagaaattcaaaagacagtaaggaaatactatgacaaattttatggcaataaattaaacaacttatgtgaagtgaacaaattcttagaaagacacaaaactctgaaaatggatcatgaaaaaaatagaaaatctaaatagatgttttaacaatgtacagttgttaagagctcctataataaaggctgggatctttattataagactttcatgcatacagctttgaagtctgcactccaagggcagcattccattgaatttcattgtactttattttggttatttttctttttgaaacccagtgtttttaatgtactcagacgacatatactgatatgatcatttaccctaaaggactctgaaagtgattaagttcacctcattgcatactatggaaaacagatagatataaatctattttgatttgaaagaattaaaccaggagataccacagtctctttggctaaaatactcagaagcctatgaccaggagactttatttgagagggagatgaagcttaaatccttaatggagataaccactgcctctctttcccccattatcactcagtatctatgttcatctttgccagtttttctgtaagacctaggtttggggatagatggaggataaaagaagcaaactgataagaatgacaaggacgaaagccagatggcttggatagatactggtagagacaagatcttggggcaatgatgaacaatgaagtgttagggtaaagtgtgagctgttaaaagtctgtcttggaacatctggatcagaataacagggatcatttatatgggctctacaaaaataaactgagttttgttttgtttttttactgtgaaagttcaataacaatcaaaagtaaaaatcatttgaatcccatcactaaaagagaactaacctttaaagtttggtgtattttgctgtctttttttttttgcatatgtatatgtaagaaatatttcttagtattttgaaaaattaagaaatattctatactaaatggagtttttcagtctttttttcaatttattataggtatttcccatgtcaaagtatcatttgaaactataaattttaataatcacatagcaattcatcatgtagataatcataacttattgcttctaagatgtatttttttatattttaacatctttgaaaccaagatatgtatcttacaattaataacatgtcagtgtaagttccagacatattcaattttagtgttacataaagtaatggtgcatcagtaatgtcttagtttttttatactataacataatttattccctatcaccgaacatacattcaagttgttttcaaatgttcttattataaatattgttataatccttaaacgtaaattatactgcatattccttctcaagggaaaattcattaacatggaataactgggaaaaagagtatgaatatttttaaagtccttggtgcatacatacatagtacaaaatttctttccttgtgtattaatttatggctctaagagcagttgtatgatttagaactctatgtattttactgcaccctggtcaacacttgatatacatatatatatttgtgtgtgtgtttgtgtgtgtatatatataaccaattggtcaatgttagggaaattatagtcttcttaaaattttataatttcctcctatttgtaactttgttctaacctatctgtatccatgtcttttatttatttatttatttatttatttatttatttatttatttatatctatctgttatctatcgatctatcatctatctctctatctatctattgatctatctatttgcaataggattaaagatagtagagcaggtggtaatagctgtagagtgtcaggcttcatagttgtgcagtccagaattggatgctctgaggataagcctaggagtgctgcatataatgtgaaaattgcctcaaagttttagcattatatgcatttatctaaacggtattcagaccacgatcagaaataggaatcctgactcccccagtgccctctgtcctctcaaagggttatggaaaggggtcatctcaagatgtcctatagttggttacgagtaggtgctccttttgatacaccacttgactgttatttgtggctgatctggtttgtaatgctgggattttgtttttcagataaaggaaaagaaagaacatgtgctgaaaatatatgcgagcaaaattgtacccaattaaatgaaggaggatttatctgctcctgtacagctgggttcgaaaccaatgtttttgacagaacctcctgtctaggtagagtatattttttccaattcctgtttaggtgaactttacatttaaggttctccacccactcccctttattaaataaatcactatttaattcccttaatggtaccatactcatggtttcatggttctaggtcattaaactactcaagaattgctttcccccacctgcatgcatgctatctgaccagtgcctacctaagtgcttgtcagatactgtgtgctcatagagtctgtggaattgatttgaatgatgaaggccttggtgatgatggctgcttattgcaccagtgtgtgaaatcaaagttaatttaaaaaacaaactaggcttactttcttcattgtaagtcaaacaaccaacacgtatttattatacacctacttacgccagacatagatgagttgtaaggtatggagtcagaaggtagcttatcaagatggtgagtgatgggcatgattttaggtgccttttagtatttgaatttactgtttctaattcatgatatgtcatagtcagaagatagtaagagttccttttggacttgaagcttaagaactcaattgaaaaactaaatcaatgactcctgttcctgaagctggttagcagaagtgaagagacaccgaacaatacaacacaacatatgccttctgaaagggaaaatgtgctctgctattgcagagtcatagagtttaaatcctgtctccattgcttatcagctttgggactgtgggcttaatcgtccatacctcttaaagtcttttggcaagattaaacgaggaaaatatttgaaaagcatgtgaaacagtatctgaaacttagtgtttcacaaatgtttgtatcattgcttattttcttctgtacccttctcggtcctcattgctggtgaatatgggtttaaacagaagcaagatctctaaggaatggatgggaacagatgttgcgtatttggttttattttgcctacagatatcaatgaatgtgaacaatttgggacttgtccccagcactgcagaaataccaaaggaagttatgagtgtgtctgcgctgatggcttcacgtctatgagtgaccgccctggaaaacgatgtgcagctgagggtatgatgggttcatgttgggattaattgacttttggggaaataaatactgctaagtacactctacgaggacagaagcttcagcttctcatagtttttcttttctttcttttttttaaaactcgccagctgcttctcttccaacagctctttagtcgctccttctctctcctcccctgccagcttaaaacaatagctacatcccccaagaaatatgtagcaattaaaacaagagccaggtgttacttattataatggatttagcctcttgtctaccttgataaaaacttcaaaaagtggacaagatgtcatctttcttaaggctcaaacaacaacaaaaggttgcctatgggatggtcatcaataaaaggaaggtaacaaggccctctagctcccactccactgagaataagatttgaggcccagtagtccaagagggctcgtgaattggggcaaatcaaggacatatcccttttgtattgttcatggactactgatcacaggcagaaaggagtctggcacagtcataacttcaatcatgagttttacgttttaggttgatgccagtgtctgacaatcgggcctgataaaaacagagaaagaatgtaagtcagatgtattatactccaaattccagaggcctgatctaaatcatcatatcctagttaagaggcatgggtctttattttgaatttgaagtttgtactagagtttaaggaacttgataagaaaatagcactttattttgtaaattaagagtaaatggccaaaatggctgttcaatttcttcatacaaattgagcttttaaagcatacatttgactagcatacttacatattttaccctcaaaacactgttgacagtgaatgaaaactagagtgaaagcatttgaacagttggtctggtaattaagcagcaattttttaaatgtttaaatcctttaactaaggacatgactgaaacaaattggaatattcatataaaacataatgtcaagatagaggaaatatataaaatgaacttttaaaagttacttaaattggattcagttgacattatgcaagtaaattaaacttaacaaattctagacagtgcatcttgggatgagtcaccattaagtagctgctttaggttaaaaaaattaaatcaaggacaagctaggtttattttgtcattagctaggagctaaattgggtcatagagctgattacctgctaaaaagaatcataaaatctgtcaggaaacagtaaggaatgagacttttctggtaaacttttagtaagactataaaagtatttcttctgtgagatagaatgtctgcagtcttgtctgttttgatgtcagttaataaaaacaattcagtgaaaatgaggactctatgtagggttctcagtctagctttgttccatactaccactgagtacaaagaataaagaactgataatgtccctaagagacatattagctttccacttgaagtggagaatgtcaagtcacggattttgtaacccagttggatagtcagctttattgattaacagagatagtcagattcctataaaaactcatgttctttaaaaaggggacgggtacatactgtgcattttatatcctactttatataggaaagtataattcaaacagataaagtagccctttgtttgtttacaggtagctctcctttgttgctactgcctgacaatgtccgaattcgaaaatataatctctcatctgagaggttctcagagtatcttcaagatgaggaatatatccaagctgttgattatgattgggatcccgaggacataggcctcagtgagtataaactttggcatctttcattgatattaagtgactttatagaattttaaggtgttgacttttaaagaatttattgtttaatgagtgaattttgttgcattagtggaggaggaaactcttccaatccagcatgctcctgatgccttagtgtggccttgaatcccagccaagctttcctgatttctttctaaaactcctccgatcactggggtttatcctttctggaccatctcacatcttcttgtattttgaaatttccttgtccttgatactgcagatcttgttccttcctaccattgtacaccttgaaaatttctactcagacctcaaagacccagtttaatatcaccacctctgtgacaacttctatcactccttctggcagagttctatgattgctcaccatgaatctatgtcattttatggcacatgttactctaagttatatagctagttgaccacataatatctttctatcctctagacatctgctttttggggacaaagcctgaatctaatttatctctaaatgcctagcagctgacccaacatctagtacactctatgtggtagttgatcaaaaaatttagttgaatgaaggaaaaagatgaataatgcttattgttgaatctctcatggctctatctggtgttgggggagatgacagtagggtaggagtcagaaaacttgtcttctgtgcctgtaaacttatcttttatgccagtctcccttatctactagctttgtgatcctaaataattgtaacgattctctgaatctcaattttttttctacaaaatcaaagtagtaatcttgttctgtctgcttacctctgagagttgttttgaagattgaatgagatagtagatatgaaaggctttgaaaactatcaataactatgccaatgtaggatttattattggtgtattttcacacatattcatgccatacaatacacttttcaagaatggtgcatacctaggaaagcagcaggtgtccagtgcatccctctacagtcacagtcttcctatgcttttaacatgcctgctgtccaccatccttctgtctgtatataaaataggacttctcgttgacatggcttctttattgcctctgatcttaagtatgctttcaaattctcaacagcctgccctggtttatctctatacattctgttttggaaactagaacttgatcctaataagagtaaataagcactttgttgaaatacgtttaaatgaatcacttttaaatagagatgactaaatctcactaagttctcagttgaagcatttgtagctcatagctcaagtttgataggttttaaagtttgattatactgatgtcattgaattattcatattataacaacagtgaggagggaggtagagatgtcaataaacaaacagtacttcacctgattagacccctgttcttcctttacttgatgctcttgacatgaaactgacctgtgtgtcttcctctgtaggtgttgtgtattacactgtgcgaggggagggctctaggtttggtgctatcaaacgtgcctacatccccaactttgaatccggccgcaataatcttgtgcaggaagttgacctgaaactgaaatacgtaatgcagccagatggaatagcagtggactgggttggaaggtaaatttgccatacattccccccttacctgttctgttttcctggttagagttctctactgcactccatgggccatgagtgagtctgggcctggatatgagtacactcagccatgggtgcagctgggcagtggttgggcttgctgaagccccagcaactacctccacttaccccagcatgtcatggagacattatcatatcctgtattctttgtgggccatgaaaaaaattgggaaagcacccaggtcaatatctggatatagatattatatctaggatataatagtgaatattatatttactataagtgaatagcattcttgccaacagagttctggattccaaaattaactttcagtatggcagcactgctcattttgtgaagaaatgggacagcctcacaattctcccagcaaagcagttgagatgaaactttttttctatggtagttatcttggggacaaacaatccacatcttgtgtttttagcaggcttctagttaaaacagattggaaatttgactaaagaagtctttggaattgagttgatagaggtgtcagtctcttctgttcttctagaccttctagtggcccagggaccagagccacacattttggatggtttttaagtagaacttaagtagggttatcatcaggtaggtgtgtgaggtacaaatggatgtggagaagttagtaagctcattcttcaaggaagaggtttgcactgacttacattggtgggaaaatgattccttgaaaatgaactaataatgcaaacatgtttgagggggaaggttcaggagtcactactctcctggagaatggatagttattttcagtgtaaattctttttcaccttttaaaaaatgtggctggtgttcctggaagagcatctttgaagaagctaattgggtcccgctgtgcctgcaggctaacaggagactcattttagcattttcagtcaagaaacagggccttagagtactgttgctagagtcaggaactcaaaactccagacattaacactgtcttctgaaaaccaaccagggaatggcagatctgtcttcttgtttgaagttttacctctttctcagccttaatgaataagagaattaagaaagtggtggaactttttctgcttgtaagagactgagacctgcagcctcagaagtggaaataaggcaggacagtcttgccgagtttgttattttaaaaggttgtttccactcatctttgagctgacaccaggttcctattgattctaacggggctctttcctgaggaggaaacagactcatgggcagtcagagttaaggcaccagccccaccgtgccttatgacttctacctagaagcccatgtctcataataatgccagtcagaggccagtctgactgctgtgtctatggtagttatcttggggacgagcaatccacatcttgtgtatttagcaggcttgtagttaaaacagattggaaatttgactttcctgtttagtctttggaattgagttaattccattgtggatcctgcgtgattcaggtgctttggctgttgggcaggagtcccctcaattccttactcttccaagtgtaacctgccaaacatgtccccttggctgtagttcccccaagagagggggactatggtctgatgataggtatctgagcagctctctcaccagccaaacgaaatgctctcatcttcaaacctcttacccagtaatgattactctaggctttgcagttgtttaactttgtccctctgaattcaggcatatttactggtcagatgtcaagaataaacgcattgaggtggctaaacttgacggaaggtacagaaagtggctgatttccactgacctggaccaaccagctgccattgctgtgaatcccaaactagggtaagtacttggagaagtcttcaacatctagatatttctccctggattctcatcaaattccatgtttcttataatttttttttcctagtttaactgaaattgtccttcaggtttctgggagtagcgtctatgactgtttcaagaattataacatgcccttgagataatatagaaccaaccatttctgatggggaaattcctttagaacacatctgagaatctttctagttacatggattccttgccaaatcagagctctgaactctaaagttctttgtggatataactgttttaagtgaaggtttcaacagaattgtttttcctttcatttggatgttttaaagtaactcattcattgaaatccagctagggatttggtcatatttcatttaaaaattaaacgtttatatccaaaatatataaatatttaaaatgacacatgtataaatatatattatccatttgtagaaatattccaatttgcagtttatctataaatcatctcagtgtaaatgagaacaagttttgttatttttctctacatttcaagacatttatttgaataatcactaagctgaaatgacttggtatttacatattagcttagcctcagaatagtgacactttaaaaaagttttttgaatgaccccaaataattttcctacttgggcaggaccagtctagccctctgtagatatgccagtatttgtaggtagaaccctaagagctgttattactttaattctgttatatttcatatgttaaatcataccctcagaaactcagcaatgaaatatgaaaaatacttgactgatgagattaacctgtaatgaggacttgtcctcagcattagtcattgctgcttatatcttatctacacaatatattaggagcaaagagatgcagtgtgttctatggtgtgaatgatgtgactgtttccagtgtgccgtttaattttttcctctgtaactaatgtttaaattcatctgatattatgatcatactctgatatccctccactgtttttttcatagaaattcttttttttttttttaatttttttggagatggagtgttgctctgttgcccaggctggagtgcagtggcatgatctcggctcactgcaacctctgtctccaagattcaagtgattctcctgcctcagcctcctggcagctgggattataggcacccaccaccacactgggctaatttttgtattttcagtagagacagggtttcaccatgttgggcagcctggtcttgaactcctgacctcaggtgatccatctgcctcaccctcccagtgtgctgggattacaggtgtgagccaccacacccagccagaaattcttattttagtctttgtaattcctttctctctggaatggctcagtgtagtcctgtgagggataggaagtaagaaaggagtgagaaagggtttcactgcctaaggcctgcagacccgacctacaacctcctcatttcatgatccatttgaaaggctcatcatccataagttttataggcataagcatatatgatgtgttgaaccttcttacagcttctgcggtataagatctgccagtgggtccaaaggatgatgaagatgataactactgataataccagcaacagcaatgaaaagtgccaacatttattatattcttgctgtgtgccagctactctgctaagtgtcctacatatataaactcatttgaattgtacaaaggatctataaattagtcataggtttctatcccttatttacatagatgggtaaaataacaccatgctccttcagacagcaactgttgactataatataagacagaaagggagaattgtcatgaggacactgctgaaaaacactgtgatagttctcctagcttacaagcgttcagggaagctctatggagaaagtagcactgaactgaatgttgaaggttgggatccactggtagtataaccagtgacaaagtatgtgacatgtgaggtcagtgtgggtgagagtgagaagggccacttcccagagaaagtgggactgacatagaacctggatggatgtcttgggtactgataggcaaaggagccaggccggctgttcagaagctcagggaatagcataaacgaagtcatggaggaaacaaaaatcattctgtgtaccttttgtgtgttttttccattccattccctaccttttgtttttttagttttgagtatttcatactttttaatttaaattaaattgaattaattaatttacttatacagacagggtcttgctctgtcacccagactggagtgcagtggcatgatcatagctcactgcagccttgaactcctgggctcaagcagtccgctgcctcagccttctacttgcacaccaccatgcctggcttattatctttaagaaaacggcttatataattcacatatggtatgtatggtatgatacaacttacccatttaaagtgtacaattcactggcttttggtatatgcagagttgtgtatccatcatcataatcagttttaaagcattttcatcaccctacaaagaaaccctgttcctctgagccaccattttcctgccctcagtacctgctaatctgctctctgtctctatagatttgcctattctggacatttcctacaaatggaatcctacagtatgtggttctttgtgactagcttctttcacatgtgtgtcctttttaatgaaaaccaaacaaggtggtatttaccagttgttgagactttaaaggcccctggctgcattttttccagagcccagtttgtctaaaatccacacattcgtcagtagaatttaaaacttggcctatgcctgatgactggtttagactacaggctgcaaagcagtggctggtgggccaaatatggcccataggacatatttggctgggacaacacagagctttaagattttttttttttaacatagcgctgacatttaaaatttaagaaaagaaagaaaacctgtatttcttgctctggaaatcagaggaacggattacactgggtaggtctgccttcctgggcactgacaggagctcttacacagggtcttgctctccccattacttgatatttacaaccaggatctctcctcattcatcttacatacctgttcctctccaggtatttgaaatcatgcaatccctggtctaggtaattcaatgtcagatcatctttgcttacatagacccttgctctacaattaattattaattggatgcaaaagacatatttaaaaagagttgctgggtgtggtggctcactcctgtaatcccaacactttgggaggctgaagtgggggattgcttgagtccaggagttcaagaccagcctgggcagcgctggtcaaaccacgtctctactaaaaacacaaaaaactagccaggcatggtggcacatgcctgtagtcctagctactcaggaggctgagatgagagggtcgcttgagcccaggagtgtagtgagctatgattatgtcgctgcattccagcctgggcaacagagtagctccatgaagatagaaatctttgtatgttttgttctctgatagatcccaaacaccgaacagtgcctctcacacagtaggccttcaattatatttcttgaagagtgaacagctttcataatgcattttaaagggtctgcatatccatccgttggccaatttctattaaggaggtgcagttttctagaaggataaatcacacatgctcttgtgcccctatttttgctccccatcttctgtaaaatataaaactggtgtcactgagcacccaggtccctgagataaacagttggtttccctgtaggtaatgccctgtgctctgctgtagtggagaagtcctaccaggtgagatgctacagtgaagaaatcttctgttataggcttatgttctggactgactggggaaaggaacctaaaatcgagtctgcctggatgaatggagaggaccgcaacatcctggttttcgaggaccttggttggccaactggcctttctatcgattatttgaacaatgaccgaatctactggagtgacttcaaggaggacgttattgaaaccataaaatatgatgggactgataggagagtcattgcaaaggaaggttagaaattagttagaaagtaatatattaaattaataattaacatatttctaatgtctttgcctgttttctcaagaaggagccctgctcttaggaaatggcttatatagttttttagataccacccctccacccccaccaactcccacctgctgaattaaatgcagatgggttcattagcaataattaaatccttttcatcctttttacacaacttaaaaaaaaatgcttctcagcagaagatattgaaataactgagtttcctgttaggttgccccagtagaggtggtttcatgtgtaccaatgttaattcatgtctaaccgcttctggacacattcattttcactttactagattgcccagtatgcacaactgtaaatatctagaaggagatgaacattttttgttgctgttgttcagactctgcagaattgcaatgacccagcacatatcacatttttcctatttggtcagatagacgtcttatgttcaaaagaaaacataaaatcttgccatttaaattgttttccaaaaatgcagtaaaatcagtaacttgaaagtgagctagggccctgtgattggtgtcgggtggtatacatcaatgtggtttaatttctatcttcttgacctcctaatgcagcacactttcacagtcccatgtagctaaagtcagcctgaatattcccagagcttcaaggcattgtatgagggaataattcaagcagaatgacatcagatctagaagtggcggtagggtatagtgggtattttcttttcaataaccttctgttttgtttttcccctgtgggtaagcagcaatgaacccttacagcctggacatctttgaagaccagttatactggatatctaaggaaaagggagaagtatggaaacaaaataaatttgggcaaggaaagaaagagaaaacgctggtagtgaacccttggctcactcaagttcgaatctttcatcaactcagatacaataagtcaggtaatcaccaactttggtataagatgctcctcattacttggaaatcttatttcaaaataatggctatattgctggaagatggcagtagataacaacaagctaatctcttggtgcatgaaaggggtatatgtgtatgtacgtgtgctgggggagaggaacgttttaaccatttcaacaaaagaaagataaaattggaggtcaaatgaaattatgcaaaccatcagcaggtaagtaaaaatatattagccctcatcattgtttggagtgatggatatgtacttctaggccacagaatccagcagacatcagtcccctgctaagtgtgagttgggttaacaagtcacaaaatgggtttcataggcatcagaaatcttatccttcccattgcaaggctaggctagtcaggtcaaccagagatacgtaggtcttagtttaaaatggccagtcatgtgcattcctacccgctcccctctgtctcactttcctacttctgggccctgcttcctcaggttacctgtgcgctaattcatccttcagcagtgtttggagcaagatgaaaggcaaagggaagtgaggaaaggaaatagccttttactaagttcttatgtcaaattctctcttcagtgttaattcagccatctattacttcaattaccttataaagacctcccaaaccttataaggacattttattctcatctcaaataaagaaactgaggccgagacagatttagtaacttgtgtgcctaagtcacataacaaatgggtgagttttaatctcagaaatgaaataatttttaggttcaattctatccaacccaaaactcagcatcttgctgtattggcccagtgttcagtatgccaaagtcccaggttgaatgctatggatatgtggcctttgacaagttactcccttcctgtccccatatgtgagtcatgggtggagtctggggttgtcttgagtctgctgatattttgagaccttgatcagccttgaaaaattgcaactcaaagctgagactcccatgagatgacaggggtggcaaatgccttttctagggcatggcttccttgttttggaagtagtatcaccaaaacactccagaatactccagaccctaccaatagaatagcttttgtgtcctaagtgcccttgcggctctcacacttggcaattttaaaggtaggagaggaaggcacagtacacctggaaaggccatctcccctccctactgcctctggaccctgaggagaaggcagaggaaagtctggaggctgcccctgaaggaaaagcatctcgggcagctgatgctcagggaaggcggctcctttggaaagcgctggtggagtggggatgggggtgggggtggggatggggagtacagccccagcccaacctgtttgaaccaagagttctgaaatttgagcatgcctcagaattatctggagagcttgttaaatatagattcgtgggccccatctgttgcacttctgatgcaatatgcctgaggtggcctaagaatttgcatttctagttctcctgtgacgttgatgctgctggttcagtgaccacattttgagaaccgctgctccagtcccttgctactcagagtgtgggccatgggccaggagtcttgggatccgatgggagctggctagaaatgcagtctctcaggcccaccccagaccttctgaatcagaatctgcattttagcaagattccccaggtgattggtagcacattcaagtttgaaaagctccactctggagggccgaagaaatggtaatgagacagatattgatggaggcttttggaagatgtgttactaatttatagctatgctttgtctgtggttacatcttgaatgacggacaatcaggatcacagaatgttagtctgagaaggaatgtaaagattatccactccagtacaacccttggataaatcataatatatgctaaggtagaattaataagattctagacttacctagggagcttttaatggtaatacttgaactctaccccagaccaattcaaatctgaatctctgtgaatgggcatcaataggtttttttgtttgtttgttttttgtttttgagacggaatcttgctctgtcgccctggctggagtgcagtggtgcaatctcggctcactgcaagctccgcctcccgggttcacaccattctcctgcctcagcctcccgagtacctgggactacaggtgcccaccaccacgcccagctaattttttttttgtatttttagtagagacgaggtttcactgtgttagccaggatggtctcgatctcctgacctcgtgatccgcccaaagcggcctcccaaagtgctgggattacaggtgtgagccactgcgcctggcctggcatcaatagttttgaatagctcccaggtgattatgaggaatcgttgctctaaattcccttttcttgcaattaaggtaactgaaacccagaagaaatgtctccttggagggttagggtggaaatcacatccagtatactttggatagaccatatgttatgatctgtccagttttgggtagtgacaaatcttggtataatatgtggatctcactggtcttttgaaccatctcaagttgtttagcactgagtagattttgaggttaggcagtgaaccagatacccaccttccaaacctctcggggcagcagagaagataagtgatgccaatagaaaatgtgagtggtacagaaattggccggagggcccagagagggactgtcccactgcagtgtggtggcagagatgatagtgtaaatgagggtgagtggccagctgacacgtggactagaggtattgagaggatgcctaggctctgctgtcacctggcagagccacttctagttgctgggtattcaggttattcattctgtcaggacctaactgctattctcacctgctttccagtgcccaacctttgcaaacagatctgcagccacctctgccttctgagacctggaggatacagctgtgcctgtccccaaggctccagctttatagaggggagcaccactgagtgtgatgcaggtaggagcactgcccaagcagctatgggggcctgggagcactcctctgctgccttcaggagtcagaagaatccctgtatgctgggtcctttgcagcagagtggggatggctggaaggagggttaagggatgtgggaggtatgaacagagttgagtgggacttagggggcaaacagaactgtgttccagtgactgctgagaattatttgctaagatctgcagaaatatagatccagtgtccctaaatctattgctgtgttgttgtgtaaagacattttgaagaatgagtttttataagacctctaacctcaagctggattcccattgccccagaatccactcaaccttaactgtagctcctcagggtagagaaccatgttcagttttgacaactgaaaaagggctaccttttgaaaagtgctttatattgtcaggagatgaagaccagcatgaggaagctgtggtttaattctagtcccaaacgctgtgggtgatctattcttggcaagactttttttcaatgactcttttaaggagttaataagccagatgggggcgaataactagtgtccctaactagcatccggtgctggaaaagcctgtgaaaaagtcgtcctgcaattcactagcggcccattttatggctcacatccttggggccttcccccagttttagctgatggggaaaggaaaacgcttaaccaccttctaccaccagggggagcaggcagttagaccaggaaccaccctttgactcattccaaacaggctgaggagttggcaggtttagggaatgaatccagggagaaaaaactgcttcttgtcacccctcttcccctactcttgcactcatcccaacgctactggggaaatattggtaggaatccaatatttcaagccatatttggaacaaaatgacaatttcaggctttgagatttgttccatgctgtggatagattgttttgccacttactgcaatttcacatcgtgggagcagtgtggtcctggttgtcacctcatctactacttttctcatttaaactttttgccaagtggattttattaagattcttgttttaaagaactttaaccgaagtaagcacacgaatgatggcagtcattccatatagggcctcggtttggtataataattaagcaattagtccagtgagatttcttgagtgccagctatgtgccaggcactgttctaagtgctggaggtaacagaggtgaacgaaacagacaaaaccccctgtgtgtattgagtttacattctaagaggacaataaatagagaagtcaataaatatatagtagttcaggtggtactatggagaaaatgaaggcagaggaagagggatgaggatggggtgggtggggattgtcctttagatagtgttcatggaagacatgtctgttacagtgaacattgagtggagactcagattgaaggactgagccaggagggtatctagactctttaaataatatgcacatataacctatacttattaagcatcttcaacataaaagacactgaagcactaattccccatcaggcacatcctgggagtatgtacaggcctagctgggagcagggacttggagtaagggcagtttgggaggacttgaaaactcaggagctctctagctaactgcctatcaaatatctctatatctgtagctatgtgactgcctgtggactgatcaattactgatgctttggtgtctttagttgaagtttcaaggtgggcctacattaaactcttgattttaactgggttcacggaggagaattctgaaaacttcaaatgagaatgtgaacattttaagagattattttaccactaggttcttgtaactattaatatatgtgctccagagtctagtacctctccattgttttttgggaaaaattctataaactgccccctttctttccactaaatgtatgttactctccaagaccttaaggaaactcactggacttagggggaaggtaagctttgacagggagactaattggctggcctgcccctcctcccacccctaacccgggccggtttgcatggtgtgggcactctgctgagtacagctgactaacacctgcatggctttcccttcctgcagccatcgaactgcctatcaacctgccccccccatgcaggtgcatgcacggaggaaattgctattttgatgagactgacctccccaaatgcaagtaagtctgaatgttgaggtcccagctataggccttgcctcttctggggaaatttgagaccttaaagtagccaggaaaacaaatacaggaacctccccagttcactaattcttacactttaaccagcttgccttcccttgagggagtctacagagaactgaggcagtgcttctttaactagaatgtgcataagaatcccgtggagatctggttcaagtgcccattctcacgcacagagattctgcatttctaaccagctctgggtgaggccacagggtcttggaccacactttggggagcaaggagttagagaattggcagcagcattttcctactcgcctggtattgttgattacaacagggctgtgggagaagagctatctgcagggctgctttagtacaaggcactcgtgatgagcagaaagactgggatggattcggaaagaagatgactgtgttgagaaaactctaacatggagcaagataaatagatgtctttaaaaagcatttaatgaaagcatataaaagaaagaaacataaccatggtttccatttgtactctctaaggaagcattgcatagattagacaccaataggttttcgtggccagactcaccccatcagtgccacagctactccattaaaagtgcatttctaaaatcagagcactgttctttctgcttgtcttctcttggcagaataaacaaaagtcatgcaggatacattgtctgttcaacatgtaatttatgcagtcaaagctctctctacttcaggatgtgctcagaaaaatgcagtagaagcctaagaacataacagctagtgaatgatttgctttttcctttcaggtgtcctagcggctacaccggaaaatattgtgaaatggcgttttcaaaaggcatctctccaggaacaagtaagttttaagaatgtgagcaacttggaaattactcatggcccctacattgaatgctgtcacagcttttctacttaacccagtctttgaaggagtggttctagcccccagtttctgccaggattgcgggctcctgtgtgttgatgtgctctctgctgtcttcttctatagccgcagtagctgtgctgttgacaatcctcttgatcgtcgtaattggagctctggcaattgcaggattcttccactatagaagaaccggctcccttttgcctgctctgcccaagctgccaaggtcagtttcattatggggaacgttgatgtttgaagcctaagtgaaggacttagttttctttctaagttaaaaaagcacaatacgcagttcaccgattccacagaaacaaaaagtagtgaggatgtaaagcagtcacttcaaatcccaacttcctagtcaagtgcttctctaaagcctgagtgacaagctgtgttttgtagtccaaatggttgtgcctactggtaggtgttcaggtcagagaggagtgaaaaggcagctgtgtgatggcccaggctttatccttctatgtgctggactctttttcttttagatctcatggttcaggaatgtgctttaacgtttccaggtagctaagggaacttactaccatatttgacagtgtaaatttagaatgggaattgagcattacatttgaggaagacttggcaatgtggaggagaggatactatcgtgaaaggttgtatttgttgtttttgttgttgttgttgttttaaataacaagacactgttttggttacttctttccagcttaagcagtctcgtcaagccctctgaaaatgggaatggggtgaccttcagatcaggggcagatcttaacatggatattggagtgtctggttttggacctgagactgctattgacaggtcaatggcaatggtgagtatggtttcaaaatgattatttgaaggttgtcatttatagaataaatactttttataaagaacaaaattcacctagagaagactgaaatacggtattaggcctctcagaataaagtctgcactacacaagttaggaaacattaggtttgttgctgaaaggtgtctaaaaacattggtaataaaattggaatttacccctgctctaagccacgctgttgaattggaatcatgaacagtctgaagtttaacttgaatattgaagagctttctggtttttttgagggtggtgtgtgaggaggacatgatattttgtttttatttgatgacttttatatgtataaaaggagtagggaactatatttttcctagtgtcgtatatttttctgccaatgtatagtgatgaaataaacagtgattttagagttggcgttggtccagaccacggctctgccacctactaagtatgtgacaatagacatggagcttgatatctctgaccctcattgtccctatttgtaaaataggtaaaataatacctcctgggaggaccaaatgaaatactttatgagggggctgccacagtcttggcactgagggggctttctgtaatcagtgttgggaaaccactttcagaattttgtctctccctcaaatctttcattgttttccttccctgacaatattatattatccattctttttccttcccctctctccttattcttcttttcttcttccaccattatccttttctctgttgcccagacccaattcccaagtgagttatttaagagaatttggatataagaagaatgttaccgtttccttgagttggtaaattagtgcatgttatgttactttgcataataatttgccatatggaggtcttgtgttttgctggcttttttttttttttttgcaagttctcttttgggtagcttttgacgtagcacctagcgtacctccaggtgtgaggaagccacctttctttgtgtgtgaaccagattagtatggagtaatctctctctccgtttctctctctctctctctctctctttctgtctctgccatcagagtgaagactttgtcatggaaatggggaagcagcccataatatttgaaaacccaatgtactcagccagagacagtgctgtcaaagtggttcagccaatccaggtgagaaaccatacagtcttttctttcagttactgctgtcgctggatcttaatctattgagtcatgtcttaggattttcctaacctttcctccaaagggaaggaagcatagtgagtggtccatgctgcagctgccctatctgcaggaacaggaccaacccaaggacataagacctgaaaacaatcagaatcctgttctgttgcacagtggtggaggtttggcagccatgccggggctgctgaccaagaaccttccattttgagtggtgtcagagcaagagaggtctgagtcccttcaggggcctgggaaacacagtgcctgaagcatcacagcttctctacaaatacttgtgaaatgaatgagtggagaattgtcaggtcattatacaggaatttggggactgggcccactctctggttcttgctgctatcccaagcatgtggtttgaggtggattaaagggagagggacctcttatgcttgctgttgccatacttttctgaaaagtacaaaggtctctagagttgatgggcagatatctaaatttccttgttgcagccttgttgctcggtcatctttttttgtgtgtgtgagcaacaaggctatttatttcacctgggtgcaggcgggctgagtccgaaaagagagtcagcgaagggagatggggtggggccgttttataagatttgggtaggtaaaggaaaattacagtcaaaggggggttgttctctggtgggcaagagtgggggtcacaaggtgctcagtgggggggagtttttgagccagatgagccaggaaaaggaatttcacaaggtaatgtcatcagttaaggcaaggaccggccatttttacttcttttatggtggaatgtcatcagttaaggcaggaacaggccattttcacttcttttgtgattcttcagttacttcaggccatctgggtgtatacatgcaggtcacaggggatgcgatggcttggcttgggctcagaggcctgacattcctgccttcttatattaataagaaaaataacataaaatagtattgaagtgttgggacaaagaaaaaaaattttgtgggggtggcatggagagataatgctcaatgtttctcagggctgctcaagcgggattaggggcggcgtgggaacctagagtgggagagattaagctgaaggaagattttgtggtaaggggtgatattgtggggttgttagaagaaacatttgtcgtgtagaattattggtgatggcctggatacggttttgtatgagttgaaaaactaaatggaataagagaaggagaaaaacaggtattaaaggactaagaattgggaggacccaggacatctaattagagagtgcccaaggaggttcggcatagccctgccagcaaagattatttatttactttaagagggagttaagagtggcggtttggggatagcaccaggagatatcagctgtgatggcttggagaaacagggtaaaccggtggtataaacaagagcagggcatttatgagtagttgagaatggtgaataggagtatgactagacagaagacagtagggatgacaagttttttggggtgcagtccaagttggtctggtgtctggaatgagactggggcttaataaaaaggagcatctatacaggagcttaaatgggctgtaccctgtagcattctgaggacaggcctgaattctgagaagggcaagtggtaaaagtattgtccagtcctttttaagttggaggctgagcttggtgaggtgtgtttttaaaagaccattagtccattctacctttcttgaagattgaggaccgtaaggggtatgaaggttccactgaataccaagagcctgagaaactgcttgggtgatttgacaagtaaaggccggtccactgtcggactgtatagaggtgggaaggccaaaccgaggaattatgtctgacagaagggaagaaatgaccgcagtggacttctcagaccctgtgggaaaggcctcttcctatcctgtgaaagtgtctacccagaccaagaggtattttagtttcctgacttgaggcatgtgagtaaagtcaatttgccagtcctgggcgggggaaaaaccccgagcttgaggtgtagggaagggagggggcctgagaaattcctgaggagtagtagaatagcagatggaacactgagaagtgatttccttgaggatagatttccacgatggaaaggaaatgagaggttctaagagacgggctagcggcttgtaacctacatggaagaggttatgaaatgatgacagaatagaatgggcctgtgaggctggaaggagatattttccttggtctaagaaccatttgtcttgtgtgggaagagattgataggtggaagtttcagcgggggactaggtgggagtgactaatgtgaaggagaaaaactgactgtgagggacagaagttggaacgctggctgcttttttagctaatttatcagcataagcattgtcctgagcgatgggatctgatgcctttttgatggcccttgcagtgaatgactccagcttcctctggaagtaaagcggctttgagaagcgtttttattaaagatgcattaatgatagaggacccttgtgtagtgaggaaacctcttgcatggtggtgcaggatatggaaggcatatatagagtcagtataaatactgacgcgtagtccctttgcaagagtgagggtttgacttaaggcaatgagttcggcttgctgagaggttagtggagcggggcagagcggtagcctcaatgatagatgtggaagatactatagcatagcctgcctttgctggtgagtggtgattaggcctggtggaactgctatcagtaaaccaagtgtgttcagggtgaggaacaggaaaaaaggaaatggggaaatggggtgaatgtcaggtggatcagagagatacagtcatgggggtcaggtgtggtatccggaataatgtgggaggccggattgaagtctgggccagaaacaatggtaattgtgggagactcaacaaagagtgagtacagctgaaggagctggggaacagaaagtatatgcgtcaggtgggagaaagaaaatagattttggaagttatgagaactgtagagagtgagttgagcatagtttgtgatttttagggcctctaaaagtattaaagcagtggcagcgctgcatgcagacatgagggctaggctaaaacagtaaggtcaagttgtttggacagaaaggctacagggcacggtcccggctcttgtgtaagaattctgactgcactaaccatgcctaggaaggaaaggagttgttgttttgtagaagggattgaggtttgggagattagtcagacgtgatcggcagggagaacacgtgtgtttttatgagaattatgccaaaataggtaacagatgaggatgaaatttgggcttgactgaagtaatcggggctgtctgtgaagctttgcagcagtacggcccaggtaatttgctgaacctgatgggtgtcaggttcagtctaagtgaaagtgaagagaggctgggataaagggtgcagagggatagtaaacaaagcatgtttgagattcagtcagtcatctttaagaagagctgggagatgaaataggaatataggtgaagggaataactttacataaggtctgcatcaatagccccagcaccacttttactgcttgtcaactgcgaacatgtatctcctttgtcacaacaactatggccttagtgacaatgaataactgtcattgttaacacctatgctccttttgaactcgagatatggcacattttaataccgaaactagaaatgtttattttacaaatattttgtgattttaagatcggaaatgtttaaatcttgaaagcattttccctgatcctctgataaacagatatgaaaaccttaatcacatgataaaagagatacgacatttcatttgacatcttcacttaaaataaaatgaggccatgtatacaaatgcatatccaagtttcagaataaacaagtaatgaatgtgaaaatataggaaaaggagtgaattgtctaccttgtagtttattatgcattcatggtaatttggtcttaaaagggaaccttggaattgtatgaatgttatagaaaaattcatagaagattattaattctatcattctcatcttttcaaaaattcaacctctttttagtagtactatgaaatcttaatttccaaagataggatttattaatattcaaagaaattattaagatccaaagataggattctcagttcatcagtgaggttggggaattattcttgctgttctaggatttggcttccagtatataactagagtatgattatgcaaaaatttggtcaacagtggggataagaaggtatagagaatacagtagaaattgctagtaatcagtgagagtgtgaccagtgagggatgtatttgcctcccaggattaaggtatgaggtgacttagtggttgctgctcttgattttgggacggtgggagtgatgtttagtcctggcccactgggtcatgcaataaaaatggtgcctgatgatgtctgtgggagaacaagatggcaaaaagagccagagttggtacaaactttacagtaaatttatttactactaaattctttcaaaattgggtaaaggcctttaacatgtccacaggtgactgtatctgaaaatgtggataataagaattatggaagtcccataaacccttctgagatagttccagagacaaacccaacttcaccagctgctgatggaactcaggtaacagttgctgactcctgaaataatgtgggatttggaaaaactttgggatgactgggttgttattaaccttaagcaaacaagggagattctggaaggctcaaagatctcaagatgtgttgacagttaataaatataatttttaaagagtcatagattgaaaaactttccaccaaataaagctacattctaacattgagttgggaataatgttccttgtaacataggaggacatgtcacaaagaagaacaaatagacttctggatccagtatcttcagaccagggacatttaagttgacaaattgactcagtatgaataaagatttcacggtgtcaaagatacagatgaaagatccttctgtgtgtgccgtgatttctctacagcatgcatctttattctttcaagctgttcttcgctctcctgctattacagatctttaccactagatggcactaatttacatactctttttccatttatcatccatctattcattattggccaaccaatcatctaactaacgttattcccctcgatgtgtcagggatggtgtttaatactggagattgaaagaaaaaatgccactagatggagcttcttaaacatgcctgcaggtcctttgcaattggtacactatttggtctgcaggaagaaattcaataaatatatttgatattaaactctgtattaatgtatatcattagttttaatgaatgcatatgcagctataccagatatagctgtttgaatctggacaaactgttttacttctggggctagagtcctcaataatatttctcactgggggcgctattggcatattgagtgggacagttctttgtgctacaaaactgtcctatgcactccgggaatttcagtatttctggtccctgtccactgaattccagtagtgtctcccctaattcagtgtgaccccagaaatcacctcccctccccaacacatgtgcactcactcctagctgagaaccactagcatctggaatgtctctgttctaagattctatgaccaattttgtgaagtaatgtaaagaaatgaaagtctaagagtagttggaaattttaccattttatacaatctttatttctcaaatttcatagtctataaacgttgatatctggataacttggcagtctcattatcaccttaaacgttggtttctgttctgcttatttaaatcaaaataaaatttgaactaaattgatgctgagaagagtctatatcaaggcttttgtacaccttctcaaattcccttatttcttcttctcatgtcacacacacacacacacacacacacactcatacactcacagacatacataaatattgtctagaaaggaattttcagtttcagatttttcaagggactaaacattttttctttaagctgtattaaaaatggattttgaagattaattttccacagacacacggatgcttgaatgtcatatatttggtcctccaagcctgagtcaaccccaagctagtgccagatttattttatattttcaacattttttctcagtccatctctagtctagtgatcttcttcactaaatagacattttccctagctggtgcaggaaggggactgtggtggggaggctgtaacctctgacctgcatgtcttttatcagaaacaaaatgtaaactgacaggctctttcaaaggagagcagatcttcaccaattgtagtcctttctttctcttcccctttgtaataccttggttcctcctcttacttttttacattagtgaggctgagaccctctaaaatatgtcttccatattatgtccagggatctcactgtatttcttccctcctgggcactgaattaacagccagcatgctttaaaagcagtagaggcgcttgggtgagatcacctaggttgatttgaatacgccagagtctcacaaatgtatctctcatccataaatatgttgaaagactaacaattaaaaacatgggctgggcacggtggctcacacttgtaatcccagctctttgggaggccgaggtgggtggatcatgatgtcaggagttcaagaccagcctggccaacatagtgaaaccccatctctactaaaaatacaaaaattagttgggttgtggtggcacatgcctgtagtcccagctactcgggaggctgaggcaggagaatcgcttgaacccgggaggcagaagttgtagtgggccgagactgtgccacactgcactccagcctaggcgacagagtgagacttcatctcaaaaaaaaaaaaaaaaaaagattcagttctatcattttccaaaagttacattgatatgcataggactccccaaggagacaaaaatgaaagtcaccgtccctttcttcttgttagtaattgcttaactccaagttagccatttcattttgaagcagtgacatctaagagactttggcccgccccacttaactgtaagcgcccagaggcagggctctgacctgaatgtcttcatgttccccttgggggcactatgtacaaaggaggttctcacttgaatgtgggttaaagtgaagacctcttctacttctgtagccctgtgttccccactcctccacaggctggtcccctactttcacagagtaagagataccccataaaacctgtgggctccctcagctcctgttaagagtaggctatctgttcccttgtctcccaccaggtttttatctggcagtcagcacaacaggcaacttttcagtaaggcgtgggccacgcaccatggtccagggtgattctttttgggttctccagtttataggcctctgggtcccctgagtaattattacctgcccttctacgtgcaatttagttgtataatcttgctgtgactcagcaagtataggataataagtgtacctacctccggggtttgttaaaaaaaaaatcagaaacttgtaaaactcttaaaatagttcctgacacatagtaaacactcaataagtgttagatgtttttgttattattattattatgatacaggagggtatgatgaagggagaagggatactcttgagttgaccaaagaatgttactttagggaataagagttacagtttggcttcaccatctccacccaattttcaggcagccccagaaatctctttttctccagatgcatcttgtgcatgtctgttttatgtgttctctctgtactgaggtaaccaggtgatttgcttgtagatactatggcacaaattctataatatataaatttgaaatcaaagaagtgtttaaaaccattcgatgaaaagagcccagagtttcagttactgttcagggaccataggaggaattgaacaatttaccatatgtgctgaatcacgtggtcccaggtcccaaattgctttacccttcagtaaggagaaattttaaaattgagacaggaggaaaagaaacccacaaaataattccattactgagaggtttttgttttccccttttcatttaggtgacaaaatggaatctcttcaaacgaaaagctaaacaaacaaccaactttgaaaatccaatctatgcacaggtaatttttaacaatttttcttaacacagacattttttcttagaaattatttgcttggttaaattggacacacacttggattattctgagcagagtgtccacaaatagtcttctttatgaaaaaccgtgtatggtgaccttgggggaataaatggctgattcctgttacgttgtgttcttagatggagaacgagcaaaaggaaagtgttgctgcggcaccacctccatcaccttcgctccctgctaagcctaagcctccttcgagaagagacccaactccaacctattctgcaacagaagacacttttaaagacaccgcaaatcttgttaaagaagactctgaagtatagctataccagctatttagggaataattagaaacacacttttgcacatatattttttacaaacagatgaaaaaagttaacattcagtactttatgaaaaaaatatatttttccctgtttgcctatagttggaagtatcctgtgtgtctttttttacttatgccgtctcatatttttacaaataattatcacaatgtactatatgtatatctttgcactgaagttgtctgaaggtaatactataaatatattgtatatttgtaaattttggaaagattatcctgttactgaatttgctaataaagatgtctgctgatttggttggtgatcattatagtaaatgatccaacgagaaaaggaattgactgggacctttagctgtgtctaaagaagaggcaccactcatatttcctataaaattatctaggaaaggaatccaggccccgctcttgggtccatttttacacattagcacttaattaatgttcaatattacatgtcaatttgattaatggctatgttgataggggccactatgtgttatatagacatctggacttgactgtagactcctcagataatacagaaggtagaaaaagcaattcagtttggcccttctgtgtgttggcattgtctaaccagaactctctgtttcatgtatgttctctcactagctgccaaggcaacatttttatttgtgatgtctatgaggaaatcccatatcattaagtgccagtgtcctgcattgagtttgtggttaattaaatgagctcttctgcttgatggaccctggagcaatttctcccctcacctgacattcaaggtggtcacctgccctagtagttggagctcagtagctgaatttctgaaaccaaatctgtgtcttcataaaataaggtgcaaaaaaaaaaaaaaaaaaaaaccggttaagcaaagcctcaactgggtttttgtttctatgaaaatatcattataatcactatttatttcctaagttgaacctgaatagaaagggaaaccattcttattaagctttttattaggccctgtggctaaatgtgtacatttatattagaatgtactgtacagtccagatcttctttttaattcttattggtttttttttttttttagagatggagtcttgctatattgcccaggctgatcttgaagtcctgggctcaagtgatcctcccacctcagcctcctgagtggttggggttacgggcgtgagccactgtgcctggcttccagctcttctcttaaatagtgggtatagtctgcacaacaggaaccatggcaggaatatacactttcccatagcaaatagcatacctgactctctgtgctaatattgcacatttgttaaacaatgaatggatggatggatggatggatggatgaatgaatgaaacatatactactgattattttattccagagttctcaaaatatttgttgctgatattttgagtgctgactgtaattactttgattagataaacaactggaaataatgctgctgaaaaatttctaataaatgtgtattttatcaga

SEQ ID NO: 25 - DNA, 161737 bp, Mus musculus
gcgcgggtagaaaacgggatgcctcaggcgccgggaccggctttctgcctctaggagccagcgactgctgctgagcaagactcctgttccggagcggagtaacctgcctgtgcccgctgcgacgcgcgcccacctcccggggaaggaacggcgaggcccggggccgtctccgcgatggagcgcggggccgcggcggcggcatggatgctgctgctggcgatcgctgcctgcctggcgccagtcagtggccaaggtaagcggtcacctgcccgcgctacgccaccatagtcgctgcggagctgagccggacgagggtgggcggctgcggagctgctccggctgagcgctccggtgaccccaggagagatgactgcagcgccgcttcttgtactggttggggaacgcggacgcaccggtttcggtgacagctcgtcccacggctatcgtgcctttgttcccacgggaattagtcctgaccctcaaggctttccaggatggaacctggagtacgagggtctcccgcgtgggtctgcagctttcttctggctggggcggggcggtcctccacgccgctcccagcgccgctttccacctgcagcgtccagccggcgcgggagatccgatcccaccgtgcgccaggggccgccggccagagcctccttccatcagtggcgaaaccctgtcccgcggtgacccccatgagaccgcatctcatgataccgatcgtttacgagcccagataaggcggggaggtgggattggcagaggaagcggctgatacactagagtacttttcttgaaggctttccctttcctacccagagcgggtgcttttgtgttgatgaatggagctggttagctgcgcctgagtttggggactggaatgcagaaagtttctaaagtgactacaaactttttcaagttgtccgggaggttttttttttttccttccccgtgaaacagggagagagaggaaagggaggaaattatttagaatagaaaactataagagaagaaaatgagagacaagttgaaaggaatggagaaaacgggaaagcaaagtgaggaaggagggagggagggagggagggagggagggagagagagagagagagagagagagagagagagagagagagagagagagactgactcaaggagaacccacgagctctctccctggctttcgttgctaggtagcagcctggtgctgcgtgtgaccgaccaccagacagacagaacggacgctgcagcctctgcagggactaatctgtctgtggggatgggccagtccccacttcccctcccgctctttcccgtcggacaacttaattgccctacaataaaaatgaaacccctattgttgcaggattagtcaaagcaataaattgatttccctagatcacatattggggttgatgggtgaggactgtggaagcccccatttatagagaggagagaggggagggcttgtggatgggccgtggcatgtattcaaatggttaatctgctttctttcctcaattcttagcgtaagctccttagagggaatcaagtaagtaattatacagcagctccaggcagcacccatctcagacttcctgggaagtttgggagcgccaacaaatccaccaggctttgcaaaaatctttcgaaaaggaggggtgggcggcaagagaagatgtctaacagttcttcctttgaacacctttctacagtattggaaacgcagaaaggagacttactgttatattgtgtgtgcgcccgcggtagggagagtgcttagggttatatatcatgcgctaaatatagccctagggtttagtgtacttttctgttcctgtctggagggaaaggttgcttacattcttgagctgatgtccctttaccaccggaacatgcattcttctccctgttttttggtgtcaccaaatactgtgtacctagatttcctcaagttctcatccatgtgaattacggagaaaaagtgggaagcatttttcaagtttttagcggataatgcaataatcacctaacatatggctgagagcacatacaagcatacatacatgcacacatacacgtgtatgacatgtgtatatattcttcaggaatttgtttatttgtttgtttatttatttatttgagacagggtttctctgtagtcctgactgtcctggaacttgctctgttgattaggttggcctggaactcagatctgcctgcctctgcctcctgagtgctgggattgatggcatgcatcgcccgccctggcattctgggtaacaaactagagcccaagtgtcaccatttttagttttgctatttgattattgtaattaattttttttaaaatgaaccagtgtttccatgtttagcccaggctggcctgaagttatgactcaggctgtttgtgatcttctggtctcatttcttttccaaacacacacacaaaatgtaattttgcctttattcatgtgtgtgtaagcgtgcacgcgagtgcacatatcataaacatgtggaaagtagtgtggatcccagaatgcagttcaagtggtcaggcttggcgtcgagcattttcctgataaatcattttgataaatgcattttgaagtgatttttttctttccttttcattttttaagaatctgtcccccacttaaattctttaatccaataccaatttggttatgccttttgtgatgattgtatcttgagtgggacctgtaatacacaggctacatttgtttttgtttttttctaactctggtctctgcaaccttgtttgctgttgtatttatttcaaggtggtcttctgttcctatgcttggaattctttttggctgtaactgggttctgcctcaactcttcaatcatctcgatttgatgtggaaggttttagagctgcagggaacctgagtatctacacctgtgtatcattgttttatactgaggatggttaaccccagcgggggtggagggaggtcctgaaaagctggaaagaatgtcggtcagctcctggcccgagggcgtgtagtgtgatagagccccttggagtcagtttctccgagtttatctcctttttttagttgtccccaccctccgtggttgagacttttagattcctttcaggtgacccatacttatcagatgaagcaaagactaacaagtagatgaccttggcagactttaacaagattggatgtgccagtcaggccaaagagcaatggttctcaaccttgcggcggatgctgtgactctaggacactcatgctgtggtgacccccaaccataaaaccgttgtcattcatacttcataatctaacttggctactgtcgtgaattgtaatgtaaatatcccatatggagtataactgatatgggaccctttacgaaggaatcgtttgagccctataaaggggttgtgacccacaggttgagaaccactgccatacagccctggcaggccaaagaggtatttataggttaagacagcttcaggacttgagcttccagctttgtctagaacttatggcacatcagtgccaggtaccccttcagatccattttttaacattctttcttttgttgttggttttttgttttgttttgttttccagacagggtttctctgtgtagccctggctgttctggaacttactctgtagaccaggctggtcttgaactcagaaatccgcctgcctctgcctcccaagtgctgggattaaaagcttgcgctaccatgcccagctcattttttaaaagtcttgtactattagtgcacactcgtgacactctggaatttgcagcgtagactgctgcacaactgaagctttaggcttagacaagataatttctaggtcctggctaatcattgtctctagacaagcaccttaagaacattaaagtttaaaacattcttagtaaatttttaattgcatttaaaaatattgataccaagaacctagttattttccagtattttagaaacattgtcattgtctttgaccattaagttttcttagctaggatagggtaacaagacattatcgggtacttaggaagtgttcattgtcttcattcattatggttctaaggacccaactttgggcctggggtatgctaggcattgttccacttctgagttctttgtactcatagcacaccaataacagaatccaaagcaaagggaagccaggtgtggtagagtcatttggttttttttttttgttgttgttgttttttgtttttttgttttttttgagacaagttctcactttgtagccttggctggcctggaacacacacatgcctctgagctgggattaagggtttgtgttggagtttgtttttttctccccaaagacagggtttttctataatatccttggctgtccttgaactcactttgtagaccaggctggcctcgagctcacagatccacagatccacctgcttctgcctcccaagcgctgggattaaaggccacttttccctgtctggaatattcttttaatcccagaatttgggaggtggaggcagtgggatcaagagttcttgtcttgcatataacattcctatatattagctgtatagggaattctcagttagcctgggctacatgagaccatcttatacttttaacctcaaaagtagggagggcagagggattctgagtatgattgtagaacaactgcaaacccaccagataccaagctctgctctggaatggagaaaatgaggttgaaagagctctcgtaaccggaatggtttccatgttaactttgtgatcctgaagaaataaaagaaatggctgctactagtgtactggggatgtggtagccagcgaaggagtctgaatttcataattaaaacgtactccagctccactttatggctttgagagagtcattgcctggtttcccattacccctcccaggacccttctggtttaaggaagagttgacatgcttcagtgtcagttttgggtttctctttgaacacgattagtggtggtttgttttgaaatgccaagtttgcttttgtgcctcatgttctattgaggtccacaaaaagaagttggcaatgtttgcgattttgcattaagacttttagtttgaaccccacttttctttccttgttatccgggaaatccggtgtaactgcttgaggtgctgtgggccactcacttttcttgtctgtaaaatgggctcacacctacttcctagaaccattatatagatagagtaaattaggcaatgaataagaatagcttacagacagtgtccatcagtattaatcattttttaaatagaagcttactttacagttttgtttttctcttttgatcccaaggtgactccattttcagacctgttcacttggtgtaaaatgactcactggcatcggggcttcatcctatcatgtcatatccatagggaaaaagaaaacagccttaaccgagtctcagttgcattgcaatggctttgctcaatcataagcttattggacaaattaatcaccatactcaggggtagaagtattcccataggttgggctctgccacacacttggtcccagactcagcaaagtgtgggccatagagggagattgggggtggggggagggctgtgaagacaatggtggccacaggctgaaccgcaaatcagatataaaaccttatcagacaaaatcggctaatgatgcaattttcattttgtatgtgaagacagattggaaagacatggaaatctctcaagaactggcagtcctgagctagttcagtgagctgaaagaaggaatgtattagaaacattctatgttcctggaatcatgttgcaacttttaaagttgttattaatcattattacaaccatggccataccaaagattaaatctataggcccatgtatgccagacaaggactctaccacacagctgcaaccacaacccacttttcaagtttagaatgagggaaggaagaacttttagatactttaaaaatttttttaaatggttttttaaagattttatttatgtatgtgagtacactgtagctgattctagacacaccagaagagggcattatgagccaccatgtggttgctgggacttgaactcaggacctctgaaagagcagtcagtgctcttaaccactgagccatctctctagccctagatactttatttatttactttatctttctttctttctttcttcctttctttctttctttctttctttctttctttctttctttctttctttctttctttctttcttccttccttccttccttccttcctttctttctttctttctttctttctttcttccttccttctttccttccttctttccttcctttctttctttcttcctttttttctttctttctttctttctttctttctttctttctttctttctttctttctctctttccttccttgcttccttgcttccttcctttttttttcttttttaaaaaaaagatttatttattgtatataaaagtacactgtagctgccttcagatacaccagaagaggacaccagatctcatgatggatggttgtgagctaccatgtggttgctgggaattgaactcaggacctctggaagagcagtcagcgctcttagctgctgagccatctctctagcccctttctttcctttctttctttctttttttcaagacagggtttccctgtaatgtcctggctgtcccagaacttgctctatagaacaggctggcctggaactcacagatccacccgcctctacctcctaagtgctgggattaaagatgtgttctaccacccaggcccaagtaaagttttcttatttggagaactgtggagaggagtgggaagtctgggagtacgagtgtagagattagagcgtggattcggtccattgtagggcttcaacttactgtgatgtcttttctagtttactttattatgattctaggatctggacccttttctacgttcttgatcaggattatgggaaagagaagcatcaggaaacaggttaagatctctgtggagacatcttagtgcttagtgcataaggagtctctagcactatgtcaagcactcattccataaaaggtagacatttttttcttcccaaataaatgcactttatgttttcttttcttcttcttcttctttttttgtttttgtttttttttgttttttgtttttttcgagacagggtttttctgtgtagccctggctgtcctggaactcactttgtagaccaggctggcctcgaactcagaaatccgcctgcctctgcctcccaagtgctgggatcaaaggcgtgatggctactttgttagtctttgatttaaatcctatttctatagcagttgctaagaaaatggagacattcccattcctaaagtacaagtcgcctctgattaaaaggacagcaataaaacccgtctctcccagaaaacaacagcaagataacatgtagctttcactctgaaatctcagtgcgtttcgccatgagccccccagatcatactggagcccgaggatatggaaaacagtaagaagtgaaggaaagaaggaaaacgtaataaccattctgtgcattgaaaagttaagccgctgttaccatggatacgacggcttgtttgtttactggctatggacccctgggattccagtttgtaagcaataactggagctcttccaagcatgtgtactgccagccagtaacttgatgattcctcataactatgaaaggaagcttttatcgcttgctactgatgcacaaaaagtggaagtgcatgtacttctgagagtccaactggtgctgaaacctgaaagtgatggagagcaacaatctggttaggctagaatttcttgaatcctcatataaaaacaacgtcttataagtatcaagcatttgcatgtgttttgggaccaattttgtgatttttttaaaatagtattaacagtactgaaaacctttcatgtccttaaatacagttgactctgagcatccatgggcccaggttggttgactctggaggtcttcttgtagtgtctttgacccctctggatccctccatcctatcccctaatcttccacaagactccctaagctccacctattgtttggctgagggtctctgcatctgcttccatcagctgctggatgaaggctctcaggagacagttaggctaagcttctgtcttcaagcaaagcagagtatcattaacagtgtcaggggttggctctctcccatgggatgggtctcaagttgggccagtcaatggttggccattccctcaatctctgctcatctttatccttgtgcatcttgcagacaggacacactttggtcgaaggttttgtgagtagattggtgttgccctccttccactggaaatgtggcctggcttcaggaggtggtcacttcagtctccagctagggacaccactatagtgcccctccccctaggtctccagcttgtcctagagaagtcctctactgatttccattcaggcctctcccaccactctaaccccacacctgatccccatcctagttccctccctccctccctccttccctccctccctccctccctccctccctccctccctccctccctccctccctccctccctccatctctgtctattttagttccccttctgagtgagatcaagcatcctctcttgggcctttcttgttacttagtttctttgcttctgggtcttatggctattgtccataggggctggacctaggcgccccctacacaattgtagcagatgtacaacttggtgttcatgtctgtcccctaacaaactgaagtgggactgtgtctgactgttgcctgcctttggatccccttcccctagctggactgcctttgttagacctcagtgggagagaatgcactttgtcctctccaacttgatgtgcagggcagtgcccatgagggagtagtgtcggtttataagggtgggactgggaggagagaagagaggggtctgtgtttgggatataaagtgaataaattatagaaaaactgagacaggttttctctatgtagttctggctgtcttgaaactcaccacatagaccaggctgacttgcctctgcttcctgggtttcacccgcatgatcaatggctttttttaagggtctcatgttagtccaggatagccttgaactactgaccccttgactttacctgcaaagtgctgggattgtaggtgtacactaccatacccaactccttttttggtctttttggcacagggttttatctgtggcccaggttggcctgggacccattatgtagcccattcaggctggccttgaattcttggcacccctccctcagtaaatgggtacagggattacaggtgtgaattattaggcctgataatacagctgagtggatattttatctgaaatatgccactactggctacattttaaccttagtaaaggggtgaagaaaggaagctagcatggacttctacattgttttaattctgatatccagaaagctgcagcaatacttactgttttaagaaacaaatagaaaacccaacccacactgactaaaacaatggagtctttcctggctcctggagtggagttttggtgagggccatctaggctcccaatcttttgtgtttttctgagctcttttcttctctggcatccggctggctttcaggaagctttcctatggttttaatatggctgtcagagcaaacggggtttcatgtcctcttgatcttgtttgagaaaatccagcctggaaggtttcagtcccttctttcttttcttctccccctctctccttccttcactctctccccctccttccctccctctctcctccccctttctccctctctctctccctcctttcctctttctctccctcctttcctctttctctccctccctccctccctccctccttccttccctccctccttccctcccttcctccctcccccctctgacctttccctgttctcttttcttcattttctctctctttttttctcttagctcttgctatgtagtccaacctagtcttggaacctttgaccctgagttctggctttacaggtgtgagccaccaatgccttggttgttatgcttttattttttatttttttctcttgcttttggagacaatgtctcctgtagctctggatggccctgaacttctgatattcctgcctctacctcccaagtctggagtaatagacaggaggagaccttgctgggcttccctgatgttcttaaaagtataactacttcacttcaataacttggaatgctataatttctaaggactctaggtagatggcagccagctctggcatatcatgcatcatctggggagctttataaagcatatatatttacaggccagagcacatagtcactgaagcagaaacatgcattttgaagagtttccagttagctttggggatcagacaatttaagaatagctgttatggggaatccctctcatttttcagtttttgaactgagacttggggataaacttatgtgctgtgtaaatccctctccatgacaattcactctgctctgccaactccgctcttccatttgaaggagctacaagcaaaagcactttcccatctgtgaaatgctgccctcatccctgtgtgtctttgtgagttccctgatcactctggaagcccttgtcactttaaaaagtaaagaactgggagaggttttctgttcccgtctagtgaagtcagggttcgactcagcatctccaatacagcgcagtgaagtcaggatgcaccatagagcccactggcttctggaatagccttctgttctgtggttgcaatggcagcccgtttcctttttatccccagtttgctgagtcaccacctctcctggtgcctcagatctcagtcattcccttcctcagattatttcagagtcattgcttaagtgacttccttcatacactctgggcagcttggccttctttcgcttgctctgcaaagctccaacactggttaaagcaagttctgcacatctgcttctctatgtctaaaacacggtgggagaataatactacacagtgcaaagctaaagtcgggagatgaatctcaggtttaggactcatttcctaacttggaacctctgacaccatctgcctagatgtttttaacgtgtgtatgcccaactctgttttctctgtgaaaacagagaatgcctctcatttgtataacaatagttactgcatactttcagcctgcatagcctgtctgtgtgctggaagaaagtcctatatgctaagttccaagtaattcaagttctagatcaacctcagcagttgcctgttggctccttcactctcttctatctcctaattgttcctccccgctctcatacatacatatatatatatatatatatatatatatttgtagacagcctggctttgtctattatttttatctattattatctacatcttgtaacatagactgacttcagctcaaactgaacgtccatggagtctttcctgattggctcactttttccattacatcactcatcagctgaagcatcaagttacataactacttacttgcctagtgcacaccagtctttaggttccatccccagtgccatacaaactggatgtggttgtatacctgtgattcaagaacctgctagattagatgcaggaaacccagacattcaagggcatccttgaatgacgaatatatctatatctatatctatatctatatctatatctatatctatatctatatctattatcatctacatctatatcatctatatttatctgggctacatgagattctgtttcaaaacaaggaaataagtgaacatacaaatataagaattttcaaaaaggcctgtgctatcgctcagtggaagagcactagcctgcctaacttgcacaaagatgttggagtcaacctctagtactaaaaaggtggggcatgttacactaactagttttgccagcccttaatatcttagggtctctttaggtcctgagagaagaaaaagaaaattgttgtcttaatcaaagcaagtggcttagcaacagtgtttctctccagctgaaccccccaccccccactccactcactggtgacccccagtgcatctgagagtggctgcttcttcattcctttttaaacttgcccccagatccatggttatactgtgggaattctcctatacatacacaatgggtcattctgccattttttactacacatttgatacagtagcttttacaaaaagataagccaaagtttttccatgttctgttagtggactgtcattctgtatttaaacagagcacaaaagaaagctgtctgggaccatggtacactgaaaatcgcagctgagacaaaaggccctctgaagagaggagcggatttccaagtccgggaggcagctggctgaggtgggaagagtctctgagtgcccagtcaaactcccatgagtcttgtttctgatggatgaaggaaaaataggcctggtgaaagggtctcaggctggtgataaaggccaaggctacttgtcctgtggtcacagactttttacccaagtgttggggaactggttcagtggtaaaagtgtttgtcttgcaaacatgagtttaatctccagcagagagaccagccagcctaggctaactagtgggcagcaagccccagggtgagtggctccccaggctaaccttggccaagtcacatgtaaagaagctgagaaaatgagcttcgttagaatgactaatttttaagtgccttctgtgtacttggcacgttcctagtggctatgcaagaagaaagtggaagatggttcccctgtgccaactcaaataaatcccttcacttgtgtcatggtgagggaacctcacttcagagcctggtgtctgagcagctcaacctttggctttcttctacttttgatagtttctccaagcatattccatatgttgatggtgactttgtcatattcaggggtcgtagaaccaggagctgtataacatacagattcacttgacatatatctctgatgttgaaaaaactacatttctcctctcccagttgccctcccatgctgtgtatgcatttctgtctgctgagttgtcccccctcatccccccaacccctgctgtcattttgtcaccttggagagttgtttcctctattatgtgcttttcaattcaaactctctaacttgatcagagagttctgttccatttcaggttagggatggcgtgataatatggatggggaatctccaagtccggttatatgaagttctaggagagatggatgagtaaatgagggttgagtctctctgcattcaggaggaggctcctcttgtggggctggggagatgtatcagatggctgagtgtaaaggtctctgctcccaaagcatttcttttctttttttaaagattaatttattgttatatgtaagtacactgtaactgtcttcagacacaccagaagagggcatcagatcccattacagatggttgtgagccaccatatggttgctgggatttgaactcaggaccttcagaagagcagttgctgctcttaccctctgagccatctcaccagtccccaaagcatttttttttttttttttttggttttttgagacagggtttctctgtgtagccctggctgtcctggaactcactttgtagaccaggctggcctcaaactcagaaatccgcctgtctttgcctcctgagtgctgggattaaaggcgtacgccaccactgcctggctacccaaagcatttcttaactgtgtccaaagatgttctgtcatcactaaagccagttcttcagagtggcacgctgtttccctgtggacacagaagaaaactccgagttggcattgcttttcagagagataaaagaagggcagtagaaaataccagaaggtgagagggactcttaaaaggaaatcaactccctctccccttactgtgtgtgtgtgtgtgtgtgtgattacatgttcttcaggtgtctttaaagagtccctggttgaacagttaagccaattctaaaagaggacattttacctggaagtgtggctttcctcccatacttagctcaattgaagggttgttagaaaaagctctagctgatgtggtggttcattcctgttctgagtctaagggtagcctggtttcacagtgagtttcaggactgcctggacttcagtaagatcctttattaaaaacaaaacaaaagccccaaataactaaaacattacctgtcaaacaaacaaacaaacaaacaaataaacaattgttaggatccatcagttattgtaagtttgcgaagaggctcttgggttgggatgcattcttgcccccacacctatatccataccgtaatccacccacctagtaagcagacaaatacaataaaataaatcgttttcttttctttttttttaaagatttatttaatatttattatgtctaagtacactgtagctgtcttcagacacaccagagaggccatcagatctcattacagatagttgtgagtcaccatgtggttgctgggatttgaactcagaatctttggaagagcaatcagtgctcttaactgctgagctacctctccagcccaaaataaataattttcaaggaaacacctactactactactaagcttgcacgttagtacacactcttctcaagttggttgctgttttatttttgtttttggtagggtcttaccatgcaagctggcctgaattcctcctgtgtgtcaacctcctgaatgttttgtgtactactaagcctggtttcaagtcagttgctgaagggttaacttttttttaaggtttatttattattatgtgtaagtacactgtagctgactttagacacaccagaagaggacatcagaactcactacagatggttgtgagccaccatgtggttgctgggatttgaacttaggaccttcggaagagcagtcagtgctcttacccacggagccatctctccagccctgaagggttaacttttatgtaccagaattctgacttttccctagtacacttttgacataaaaatttacttcttccctaatatttggtgcagtgaagtgttgaaggaatttgctaagcaatcaatagaagctgaggttctggtgaaaaacaaaatgtgtggcttaaaaattgaaggtttgatgctcctcactgtaaataattaaacccagcagtcacagacaagaggacgcggcaccatgtggcactggaacgattaaggagaatgctctgtgtacgcttcgtccttgcaagaaccaaagaagggctgtaacagttgcggggtggcaggtgtgtgtgtgtgtgtgtgtgtgtgtgtgtgtgtgtgtgtgtgtgaaaatcctcttgtgatctacaattgtttttcaggcattttgatgtgattaagggggtaagaaagagtagtaaataaagatgggtctttatttgagccccagttctcggtagggggtctgagactcactgtagtgacctcctccagacaccgctgtttcacatgcacaggtcaaaggcagttggctctctttatttagaagagaactgatagaaccaccaattgagaactgaagccatagagaacatcctggcccatagtcatggaagctgaggttctggtgccatccctttatatccagtccctacaaataaagtattcttgtctttctccaccccccccccccaagaaattcactttcctcgatgaaagtctcagtcacttttcactcattcatgcttgttttcttagcccataacctctttgttgtttcttgagacagggtttctcaactatagccatggtgtctcagaactcactctgtagaccaggctagcctcagactcactgatctgcctgcctctgcctcccaagtactgagattaaagcccttcaccacttcttcttcttcttcttcttcttcttcttcttcttcttcttcttcttcttcttcttcttcttcttcttcttcttcttcttcctcctcctcctcctcctcctcctcctccccctcctaccccttctcctcctcctccttcttcttttttatggttttagagctttattgtagaaaggcagggagaaagagagaaggtagaaagagggagagaggtcagccatggccatgtggagagagggggcaagggagggagagaaagagggctagagatgaaagtaagaaaggtgagagcttaaagagcaagtcccccacttcttgtggtgggggtgagggattgctaatcttttgaggtcgttattaatctcactatgtggtcatgaccgttgaccaggctgtcctcagactcagtgatctgcctgcctctgtgctaggattaaagctgtgcaccaccacaccacactactagccttcatttttatatctgtaaaaatgaatacaattttacaggttttatagcaatagactttgactatgttaacatagactaaattgtttgtgtgtacagtactgtaatcttttggaaatatactagccgtgctagcatgtgctctaccattgagctacacccaaccctatttccataaatatatttttttgtttttgtttttttcaagacagggtttctctgtgtagccttggctgtcctggaactcactctgtagaccaggctggcctcgaactcagagatccgcctgcctctgcctcccaagtgctgggattaaaggcgtgctcccccacgcccggctatttccataaatattaacctatgtgtatattagtgtaacaaccaacacagtcaggattagaacagttcagcccctgcccccatttgtttgtttgtgctgtccctttatatccagtccctacgaatgaagtatttttaagtctctttttttttttactggaaattcactttcctagatgaaagtctcaattgcctttcacttgttcatttttattcaagaagtgttctctgctggtttttgaagtaattcaaaatgacatggtcggtaaagtcgcacggctggatttcctttattataatggagggtgggggaggggaagggaggctatggaaagatagaagccctttcaatatagccatataagaaaagatcgtgttcattcttagattggaatctgaaaagagaacactcaagagtctcccttcaagaaggggaggggggtgtttttattcaagaaattactccctgacacctacccgggaaatgattagttgtttccaaagaagatgaagttagtgtggttaattaactgtggtaatcaggtgacttaaatcaattaactccctgttaacaatttccatcaattttgtaaataagttaccaaatcaataaattgtacacataagatgaaagactcttctctcttttttggttttttttttttttttgatggcggattagagatggtctctgtcttgtttcattcgctttctgctacacttgctttaatgatatgaacactcaaattggctttcatctgagaaggacacaccagggtaacttttactatacagttactgtacagtcaggactctgccccttcatctttgcacatttctttttttttttttttttttttttttttaaagatttatttatttatttatttatttatttatttattacatgtaagtacactgtagctgtcttcagaccctccagaagagggagtcagatcttgttacagatggttgtgagccaccatgtggttgctgggatttgaacttcagaccttcggaagagcagtcgggtgctcttacccactgagccatctcaccagcccctttgcacatttcaaaacactgatttaggagaaacttaagtcagccatgtcatggtgacactaggagattcaggcaacatagaatgtgtccagttgtctgaagctgtttcctttgtcagaacttcatgagtgatgttaatggtgatgtaataaaatgggccttgattcttggctagactaaatttaaatcgtctttcttatatttcactctctgtctctgtctgtctctctttctctgtctctttctttccgtctctgtctctctgtctgtttctcggtctctctctctttctctgtgtatgtgtgtgtttgtgacatgagtttggagggcagaggacaatttgtgggagttgactaattctaaggattgaactcaggcccttgggtcagtggcaggtgccttcattcacggaaccatcttgtcaacccccaaagtaaactttagaggactcctttggtgatccacttaaaggaaatatctctatatttagacagagtctcatgtagcgcaagttagcctcaagttcactatataagaagagactgaccttgaattcctggttcttctgtttctatgtcgaaggtgttaggattatcagatgacaggcatgtactaccattcctagcagggacggtatataatgtaaaaaaataaaataaaaacagggccaagaacacgctaggcaagttgccgtaccattgaaaggaatctccttcccatcctgttagcctatatcgaccacagtcgttggtaaaagttcaattatgttttgaaaatatacaaataacactgctaaattctcattttagcctccccagtggtataactactgagccagatactaaacgacacgtcctagactaaaatgaaatgtgaaccagaatattacaaaaccgtgtaccgtgtcctagaacaccgttatatttcctgaaaggcttgtacataggcaattcacaacctaggacagatgttatggaatggcttagggctgtgtcaggaagaaatatttgagttgtatatatttatccatttgcaataattctatgctaaaattacttctgtttttaaaaatagaatccccacagtttcctcaaagctattgacggtagcttgacttaggttaggcacataactcagtcacttcgagatagacacaggagaatccctagggcttgctgcagctagtctagtctgtctgtgagctccaggttcagtgagatcctgtctcagcaactaaggtggagaatgattgaggaagatgcccgatgtgggtctctgaccattgtacacacacccgtcacatagactgcatccatacatatgaatatgtatgtacacatggcctgcttagaaggaatgggatggaaccaggggtctatgtttaaagctcttgctaccaagccagactttgggctttcctatgattttagaagctcgctggctgtgtgactcccagccgctcgaagaccccacaatctcagggtttatgatgaactcagtaaacctggggccagattttgtcttgtgtttgggacatgggctgtgacttggagatttagctcggagctgctgtccagacgcattcctgtggatcccatgaactctgaacccaagtttcccaactgtaccatgtcaatttgaatttctgcctcccgggagtagttaaaggtcattgtgaacatgcaaggtactagagcttggtgagcgttcagtgaacgaacatttggccccacagggaacctggtgccaaattattcacatttgaccagttcctggttgggtcagtgctgctgaccagcctccgtgctgtgggcttttgaaatgtagaaaccacctgtcaagttctctatccatagaaactgctgagggaaaaaaataacggagctttttaaaggaagtggagttgtcagacaaagcagtgttagaagacaaggcctccgcacctgcctgtctgctcccaagaagggtttgtttggtccttcagagttttcaagatgaaaacccaatgctaagttatggaaaggttcaattttctcagcagacttggtgtttttaatctcatgtgctggacatgcattctgtcagtttgtctttctgtagtttattgttatgtctctaatcctggttggattagaggtctaatcaaagggctatatgccctctggtcaggaagggtttgcagagggcagagtacatgaggatgaacacttgattctgtgagagcctttttaggcagggcatcccgaccatagcaaggcatcaacatttgttcccttatattggatccccttattcatccacacatgctagcccaagcctgtaatcctaggatttgggaggttgaggcagcaggattgactttgtaactggcatgggctatatacaaagcccaattctttcttatttaatgaaattacaagaggctcaccaagaagttgtacaggtgagtagaaggtaagttggatcactggcacacttatttatttatttatttatttatttatttaatatatttgagtacactgtagctatcttcagacacaccagaagaggtgaccagagggcatctgatcccattacagatggttttgagccaccatgtggttgctgggaaatgaactcaggacctctggaagaacagtcagtactcttaaccgctgagccatcttctccagccccactggtgtgattattacacaagtatttgcatgttgtgtcaggaaccagttagatagagatggtgagacatgcaaacggacactgtgctgtaccagaggtttgggagcacagcaaaggggatgatgtaatccagtttgtgcggcaagaaagacggaccccacttgtgaactgtttgaactgagtcttcaaggaggttgtgtcatgggagacagatctgggagagctgcaccatagaagatctcatttgactaagctgagaggttgggtggctttgaagacttctaagttgggaagtatagtgacctgatattctctctctctctctctctcttttgtatgtatgtgtgtttctatgcacacacatgcatatgtgtacgtggaggtgaaaaaaatgtcaaatgtctttctcaactgatgtctatcttttcttttggagcagcgtctcttgttgagcttggagcttactggctggtcagcaggctcccaagatcctctgcttcccatctcccctgggatttcgggccctcgcttttgcttggttggcttttttttttttttttttttttttttttaatgtgagtgtaggggatcaaaatcaaatccttgtgattgtgtagcaaatgctttaccaacttagtcatctctccatctttttataaaaatgacatgaaatattgtctggaaaaaaatgtgttccttctctggttttgaaataatgggagtgataacagtctggattttttattgtttggtttttttggttttgtttgtttctttgtttgtttgtttgagacaggggttctctgtatagctttggctgtcctggaactcactctgtagaccaggctagccttgaactcagaaatttgcctgcctctgcctcccaagtgctgggattaaggcgtgtgccaccatgcccggcctgttgggttttttgaatcagggtctcactctatagctctggctatcccagaccttacttcattgttaacctggcctctaactgttctgcctccagagtgctgggattaaatgtgagagcaaccacacttaacaagcaggactttttcaattagttctatgcttagccttttaaaagatgacatcaaggcagagctacctaacacttgaaatgttaacttttgcaatgtttgtaaaacatcaatgtcaacatattgcacttcatggagatatatttttgaaagcatttggaatcaatgcgtatctggaaactagttttctatgtggattcactttaattttatctagttcagtgttgtgaatataactctgaatttcatcagtaggaaatgtttagttaagagtatcattttaaatgaaaataacataatatttaagtttccgtggcagcatttgagatgcagatattataattagttgatataaaaaaggttttcaaattggctgtagattatgaatatggaagagtcagagataagtaaatatgtatagtaaaaaaaaaatcacagggacacaatatgtagatttaaagaatcaggaaacacttgtctagaatatagcaaatcttccatctcctgttgcccatgctccaggcccatacgactcacactgcctttaacaccacggacaggagcttttattatcactacgctttgaggaaaaccagaccctgacagtaacatggctttcagagagtaaggtgaagctggggtctgagtctggggtgtatgatgtcagggacttaaccctgagcagttactctgcttccctcttgccctttccttactctactgtaaatttgcagggctttatcagtagggcacagccatctggtcatttacacttagcctcagcactctgaggaagagctggtggtggcttttagatatgaggggggctgagtgaaagaaggaaagtgtaaactcatacgtaaagaaataatgatttcgtatttagttaaggcagttgactctgtaaggagggaaacttgcctccgcttcctcattaactccagcgaggagaacaagcatgcttgtatacagtatcttcacaaatatgagtgcccctcccccttattttgaaagcctgtgctgggggctgctgtgtatggatgtgtgcacggacatctgagttctgtttgggtgaaattagtgaaccctgtgtttccagggaaaggggccacttgtctcataactgacacagtaagatttcaaattagtattgcaacaaatgcgtttatttgtcggttgcttctcttcaagccttggaagtcattacctgcacagtatttcccatggccttttcctttagttaattctaagatttattatacttctgtagagagttctcttttttgactgtattttaactcctctatgctttttgtagaaagagtctcaacctgatgagacttttggcttcaacaaaagccttgttacaatgcatgacgttaggcacctgtctaaagtaccccgcttcctttcagtttgcttcaccgagcttcagggagggtatctgaacattgaaaaaacgaccacaggggcattacagagtgagttccctcacaggcttcctgtttcaccaagtgcacgtgcccatgcccatgcccatgagaaacactactttaaaaggttctggaaattcatttggggacagattttggaggccaagagatcctgggatagagaatggattttcagataagcaagtggatgtgggatctcttgattagataaggctctgattattggactgttggaagagccttttaagttaaagatgatttttctcctttctaacgttaccgagaagacttaggaagcgcagagtctgaacaggaagcccggagccctgacaggaaggactgacctgccctcatttcttagattctagatgaatcttggctagttgacttggttctctggaagagaatgaattgcacatttgctgacagttgtctcaaaatattttcctgcttgtcaatacgtgtttgctttggactgagttaaacatgattagggtatgaagagtacttaggatatccatccatccatccatccatccatccatccatccatccacccacccacccatctatccatccatctatcatgtacctatctacctacccatctatctctgagacagggtctcactctagcttctgctactctggtacttagtagagagccaagacagttctcttgcctcaggtaccaagttcttggattacaggcatgagagaccattttaaggcctctgtttcagaagcagtgatggagtcatggctaacgggttcatggtccttttaggaggaaaagttggatggctatacttattcatgttcaatcagaaataaagtaatgtgcaatgtcttagaatggttaagttttcctttcagtgtattgtaaaggtgctgggacatgatcattcagtaaggatgtttttgcaattgtgtttttctaacatgtaagtctgataatataaatagttaatgtatatctttagtgctttttaaacactttacattgatttagcgtgtgtgtgtgtgtgtgtgtgtgtgtgtgtatgtgtgtgtgtgtgtgtgtgtatgtgtgtgtgtatgtgtgtgtgtgtgtatgtgtgtgtgtgtgtatgtgtgtgtgtgtgtatgtgtgtgtgtatgtgtgtgtgtgtatgtgtgtgtgtgtatgtgtgtatgtgtgtgtgtgtatgtgtgtgtgtgtgtgtgtatgtgtgtgtgtgtgtatgtgtgtgtgtgtatgtgtgtgtatgtgtgtgtgtgtgtatgtgtgtgtgtgtatgtgtgtgtgtgtgtctgtatgtgtgtgtgtgtgtcttcgtgagcaaggtgctgctgctaacctggtacccgagtttgatactgaaaggaagccctgatccccacaagttttcctgtgatctccacactcacactgtggtgtaggtttgcctcccctttgtaaacaaataattataataacaaactttaaaccttacatttataatgatggcaatacattctttgattactaacgatacttaacgcattaggtaagatattcggagatgccatttttatctttttcttcctcttcctgcttgtggcaggcgtcacagataacctcatcttactgaagcagctattaattagtattagggcagcatacattctccacaaataggcagaaacctgagtaaagttttatcatgcacgggtatcagctggtgaaataatgctgtgatttgtgtcaacaagactttgaattgtgtcatcatggccacataacatgacgtgatgacatttatagtgcctgggagtgatttggagacctataaatgctattcgagctcaggcataacaagccagagccgaatgacttgaggccacgacagatgacctgaagggttttcttccctttaattaaaattacatttagattgatattaaaattacattgatacttacactcataacctaaagtttttctctttaattaaaattacatttatatttaatatgcctattaataaactgatagcagtatgctaagtataaagaacagatataacacatagtgtggatgaatacctgacgtgtactttctgaaaatacattctgacgagaagtaacttagtccttactttgtgatttgtgactaataaaggcacacaccaatgaaatgggctggagtcaataaggttgaattgctattttgttcctttttgaagtcaaggtgcaagacagatactgcttgggatgcccagtgtcattgaattcctgtgcctagaaatgatagcccttctttccgatctctgtgtgccgctgcattgactttctaagtgggttctggggattgggctcattgtctggcttgcccttccacccatggagccagcttcctagttccagcaaagtatggagtttttttttttttgtttgttttttccttcttttattattatggaactttttagtaacagcaattttttttttaaaaatgtcaaggtctgctaattttacctgcctgttaggatggccaaagtcctgcttgaagttttagtacacgtgcacccacataattttcactgatggttcagtacttggcatagtgaaccagaaaaactctggtttgacattgcaatgcttcggtgcgttgggttctgttgagccactgaaagcccttaatcaagcccctccctgcttttgaagtgtgcgtttgttcttcctgaataactaattttggttttaatgtttgagtccctttaactattttctaataatattgctatatttaggaagccgatagaaatcctttaaacgattcgggccagaagacagcttgagtctgtgtgtgaatgggtgatttataggttctctccccacacccccactgcccccaacccgagtatttaaatcatcaagcgttgaagggtattctacccttttctgaagtagtttgattcattgggtccttatttacgggagccagcagacaaccttaaacttccctgttagacagggttcttttcagcatcctttgagggttctcctcttaagagtggagaggaaggactgaggcttactgtgctgtgtgtcgggagtccctctacagacccttccggcttagcagttggggaaagtgacgcagggaatttaagactagcagggaatccaccagacccacttctgcttgtttggttcagactgggaggatattttagagccgtagtggatgtccaacttagatacatttttctgtgagagcgaggaggaggcaatgggagatgtatctgcttctgatgacttcacactaaggacagcgcgcttatggcttttcagttcacagcaacgaccctttacattactcaagaggtccttcggaagttttgatgtctgccctttgctttcctggcccgacctctccctcccctagaacggaaaagcccgtggatgcgctggagcgttccagggtgaaacaagcctccctgcaacttaagattctttatcacccgcgcaggggaattcatttcacgttactggtaccagcagctgcggcgtgctatttcccaatctcagatcttattgatgggtgggaaggagtgcacttgctgtttgagaaattttattatcttttggaaggggaggaatttattccaggggctttcttagatgatctttcatgttaaggcatttgacgtttgaatggccaagctccttagagattgagttggtggcgtctgggggatggtcctgctagctagtggttttgaagttgagacagcacagtgggcactcttaacattgctcaggtcagggctgtggagccagggtgctgtgacttttgcgttgctcaggactgttctggaagatgagtgactgtctcatctcaagtgccaataaccttctttctttcccaaagccttgagaagtgtggcttaattcacaatgctccgtagtgcttacagacaggctgattgcagggtgggagttgcttaatgaaaaactaagcagtgtatgcaagaactccccaaagggagaccaaggctggtgactgactagtagttagatggaaaaggagaaaatatgatataaaagacgatggctttgtctcctcatcccattgcttggcaaagaaaggctacatcccattctgctggcatttatcatggggaagcctatctattactcagacaaatatttaggattttgaagttgagctgaccttcagctgaattctgtgaggatgctgggcaaggtccctaggatatctgttaacagatcccttgcagtaggatctgttaacaattgccatacgaacaaatgttctggatctggccggaggcttttggagggttacaaggtaagacctatctctgctgacagcctgctggggaacatctcattagcctactctctggtccctgctctgcatgagagtctgaggagtctccatggccatggttgggcactagtttaggcttatcttcccagagttttaacatagtcccgaacaggtgaccatgaccactctgccacttacttgatgatgtcccctcccccaccccctttttttgcttgagagagaatctcactatgtagcctaggttggccttctgagtgctggactcatagatgtgcgccatcacttccaacactcctcctgttctctgtccaccacactgtcagaggttccccttgatggaggccttatcactctgccctaatgcatgctaggatctgttgagagtcctaactgggcagttatttttctctttgtggctgtggggaggttggttagtgccgtggaggcttctattaagtaagaatatatccggggctggagagatgactcagtggtgaagagcactgactgctcttccaaaggtcctgaattcaattccctgcaaatctgatgtcctcttctgatgtgtctgaagacagctacaatgtactcatataaataaaataaattcatctttttttaaaaaaagtaagactctatcattcacacagtggggacagtggctatgtatatgtaccaaatgaaaagtagttgctctaggtattgaataacatgtccccaatggtttgtaatctctgaagaagagccctatctcatttcttctataaacactaaaacagtgtttacatataggagccaggaattttattttgtgactttagtgaatttgacatgttcttttgttttcagatttatttttattttatgtgtgtatcatgtgcatgactggtgccagtggaggtcagaagaaggcattgaaccccctggaactggagctactgatggttgtaagccactgtgtggatgctgggaactgaaccccaattttttgcaggagtaataagtacttttaactgctgagccatatccccatgttaaaattaaaagatttcctattttaaattgtgtgtgtgtgtgtgtgtgtttgtgtgtgtgtgtgtgtgtgtgtgtgtatgcatgtacaagagtcatggcacatgctcacaggtcagaagacaacttctaggaatttgttctcttctgctaaggggattgaactcagccatcagctgtctcatcctccccgcctcccgcaacagccattcttttaacctgtatcccttccatggattctcttagaagagcggcaaatgctagtcaatagaacattgtctgaagtcaatacagtggagcaatttctgacccaaattcttcttccccccccccccccagatcctcttaacacatgcttttcctcccaaacactttccccggggaagttgatgtgtctgctctcaatgtgtgcagctaaataaatcacagtgattgctctgccttcgcagaactcagaaccagcgtagagcagttccctaattcattcataagttttgctcacctcttctgtgcttcatttcaaatcccttgacacggagagacatatctgtaatgtttataatgagtgatgattcagtataatttgcaccactgacctacataaaaggtcaggctcctttggagatttaaggttaactgtttataactttgtgctgtttcaatgacagccgaggtaacaaatcatgtggacgatcctgcccagcctagtggcgactggtaaacagtaatgagctccctaacggacctgaagcaaagccacatcctcattttctgtagagcattttagttgcttgcttttcataacagaacaccaaatgggacctgaaattcgtttgtatccttgatctagtctataaactcttgggcttctttttcagagcccgagtatgttaagaaggcatttgcagaagtcagatacttaggaacagagcccatgaaagcaattactgcataatcatgtacaataaccattttaatgcaacctaaaaagaattaggatcaggagctgactggatggttcagtttgagtattgcttcctagcacccgtgatgaacagcacacaaccacctgcaactcaaattccagaggtgcccgggcacctgcacttacacacatatacacgcacacatgccacacacttacatacacacatgcatacagtcatacgcacactcgtaagcgcacattcatgaacacacccacatgtacacactcacatgcacacactcactctgacacatacacatcataaaattaggggaaaaaaaagaatggaaggttagtatcatggtgtcttgtcttttcttccaaaaagaaattcttcatagggtctggagagatggcttagcagtttagaatacacactgctcttgcagaggacttgactctgggccccagagccaacataaggtagctcacaatttccttttactctagctctggagatgtgtatgtttgtatattcctacatgcacatgttgtatatacactcgtgtacacatatatgtaaccatatactcataaacaactgaaaagccacttcttcatagtcttcatttctaatcattccatttgtgtccttttcactttctttagaactttgctaagcagcccaggtctgatactttgcagccctaggccaaccttgaaaacatggtgcagatttcatgagacctggttttgccttttcacccaagagatcctcttgcctcagcctccttagggttggcattacaggcatctgccaccacacctgggttcatttctctaaatttaagattagaaattcccattcattgctctgttactgatttcctgacatgccttcattatcccacagtgcacagcaccctgccagagactgtaaatggcagtggagtggccttctcaatccagtggctttccctagaaaacaatgacttctttcctcctggacatttccttagtccaacactggggcctggaagcttgggattctgccttttaaagaaaactggtcttttgttatgctaatacctttgggctcttagttgtgaaatctatgcccatatttggtttaaatttccaggatgtatcaaaattccttttgaatttcccttagttgcttatgagtgctgcaaaaatttcaaagcttccctaaatcttaccgcaatattagtttccaagtagagtaagtacatgtctgtgtacgggttctgtgggtttcaggccactctgattcacgaactcaataatgctagatagcaagttcagaaaacaaatgaaaaccccacgttcatttttgagtttgaaataattcagtgtgcatgacaagaatgcagaacagtggattgtttactggagtggagatgttaggtttaagcgatttctttatgttatttgctgttgaatgctaagttattggacctctctgtacctgaatttccagcatggtatgtatctcaaggttgctataaggattaatttggggccttttcagggcttgtgagttaaggttgcttcattaatacaagacacataaaaaatacacaggaaccgattgatgttgggggtgcctgagatggtaatcaagacctaatctagacctttccacaagcacctggctttaaaacaacacacattctcttcatagtagaatgaaagacacaacttctgataccagtggaggattttggctgagataccacacagcaatgatctagtgtctgtttgtttttttctggagagatattttcaaacaatggtcatttgagagttataacagacatggaagttcccactgaaaagatgaatttgacaaattatcatggaagtgatgataaactgagtaaactggattttactttagataatggaacaattggagcataaactggaaatcatgacccgtagtttaaatgcaggatttcctatcagtttcaatgtttatgtgtgattttaaataatttacttttaagtattccaaaataatttttatgcctgttttgtatttgtgtgtgtgtgtgtttactttgatattttaacaaaattaaacaaaaccaaacctcagttggcttggcattgaaagcatctcaagaaatagtattaattaggtgtatttttttaaaacaggcaattttctttctgcgacaatataaaactctggtgagattgtcctttacagaggctatgatttttttcaatcaggagtgattaactattaagagacacaagtacattaaacttgcaaatgcattatgttggattactaacaatagacctgattgataaaggtgatttcacatatgttgtgttaatagctgaacctccaaagcccctaatctcccagggaaatactgcttcgtagagcaaaatccaatggggagctctgggattccagagtgaatttgtacattccttaggggcatttctgcaagggaggttgttgtgttttaaaggtagttgataagagacccgcaccaccaaccactaccatgcattaggctgtagaaggtatttgggtgtccgtacgcctgtaccactcggtaccaccattcagccaagggagacttctggccgtttgcagcgtacattataaatcagggtgtcactaccagacaatcagatttgaacattccgggaacaaagtagcttatattccctgggaatagatcacttaactctgtttatatcttgctgttgatatgcctgcattcacataagtcaggataacatcttgtttatttattctaggaggaggtaattgatctctatatttatcgaaggtggggttaattatagccagaaacctgaattgtctcatttagcatgattgcttaaatacagaagaaaaataaaatgatttttccccccaactttgaaaagtactcctattccttgggtttgggaaataaattggaattttctccaagctgggctcaggttgactgccctctttgaaattttttttctatttggcacaaaatttttgggaagctcactggctagctagatattggggaaacttacaggatttctaactgtcagattagtccctgcacagtcaaagtgtcatgcacagtggtttttgtttgtttgtttgttttgtttttgtcttttgtttttaaatgaaatgaatttaagtcatatcccctttacaatttctctgccacttgggtttggggccagatttgtaccctctggttgcaaaaaacatctttgtcagacttgacaatatacacactagttttaagtttctggttaacgtttgcttctgtgtcttaattaaatatatattttcatggattcttaacatatcaaggcatagatgtaagaaagtaccgattttcttattattggataggaacattgtagtttattatgagtaatgttgtgatgaaaacatttcaaatcttgatgaatatttgttctttgatcagttccttaggaaaaggagatgtgaaagtcccaaatctctctcctgagtgctgggattaaaggcatgtgccaccatgcctggcagagtaaacatttttaaggagcaaggtacaagtgtcaaattgcttcctggacaggtcatgtcaaggtgtactctaatcaactgtgtaggaaaatagccttcttgcagacatccaaacaaacgtcttctatgttatcagcgtgaaattgctttaccaattttacacataatttgcattcttttgcttctaaatagttgaatattttttttctttcatccctaacttgtattccgttcatacaatatcttgtttttcttttatctttgagaacagtagttctctctctctctcttttttaagatttatttattattttaagatttatttattataagtacactgcagctgtcttcagatgcaccagaagagggtatcagatctcattacagatggttgttagacaccatgtggttgctgggatttgaactcaggaccttcagaagagcagtcggtgctcttaaccactgagccatctcttcagcccttgtttttcttttattgagaatatttttctcacattctgatcatggtctcccctgtccacctcacctctggtcatgacgtatcttaaaagtttgttgttgttgtttgagatatgctctcaaaatagcttaagttttgaaacaatgatgtctgtttctctgttactacagaatgtggcagtgggaattttcgctgtgacaacggatactgtatccctgcatcctggaggtgtgatgggaccagagactgtttggatgacactgatgaaattggctgtcgtaagtgactaggagccaggcttggttgtgtgctctgagtgtctcagctgtaatgagagaagggctgtgctttggtgtcagatccagggctgggctgaggtttacacagagggacagcctctttgtatataaaaaaaagatgtagagtaacctgtgaaccaccacaaagaacgtcacagtggctagtttggtcttatgctattaaaaatctagataaagcaacataatattttaaacttgaatttacttatctatggacttttaaatcattttgacacatttcttcatatagctctcagcaataatgctataataatgccagaatattctgcatagattccagattaggaaacagtctcagtagttgagtcacttacaggtgacatggccgctcctctcaagccacttacctcaactctaaccctctagtcctttgctctgactcgtcaccagtgatgagtcactaggctgtgaagtccttcattctgacaggtcaacagatgagggttatcatcccagtcaggaaggcagcagacaacatgagtgtttgaccactccatgcacagctgagcagctgtcacgctccagtgatgcattcgaaatgggaatgaaggaaagaaatatgtctggggcctctcacacttacacatacacatagatcttgcagaaccacaagatgccactccatggctgggggcggagcctgataggttgtgcattcctactagtccctaattgatcaggtgatactttattttcagctatgattttggcatatgatatcgtaggacatgatcatatgatattaattcactctgattcctgggattttactgtttaagaaatgggggtgggagtggggagggggcagaatgtgcaaatggtattctaggatgcgggcatgcacagacagtctccaggtcttcagacatttcggtgccctacgactatgacctcaatagtgcctgtggcaatgagagttagcattacatggctcttttacacacattatttttttcacttttaggatgcagacattaaggctcagaactcaccaaaattcctaaaacaagtaaatgtggaaagaatcatttcattcttggtttctctctctcttcaaatttcacctattgttcatcaactgtgacactttacgcttagatgctagaaatctagcaaaaaacactagttaattttttttttttgttttacatagattagatttttgcgacttctgttagatgagtgtgcatgtgtgcttacttaagtctctctttgagattacctgtttggatgccatcgctgggatgatctaacaactgtgcccagcaagcactgctgttactgtatcaagcagttggcctgcataagcccctcccctctttatggttttgtttcagctcccaggtcctgcggttcaggctttttcctgtgtcctgccgaaggcacctgcatccctagctcctgggtgtgtgaccaggataaggattgttccgatggtgcagatgaacagcaaaattgccgtaagtggttttagagaaagggttttttcttcttctccttctcctcctcctccttctttcttcctcttcctcttcctcttcctcttcctcttcttcttccatctccagttagtgtgctgtatacaggtgacacacagagagctgatttttcatcaccaaggctctggaacttaaactatctagtgatatgctggtaatctcatcctgctaatctggttcagaggccgggtcatataaagtgtgtctatacaacagacttagacccctgaagcttggaactggttagcttgtcaggccttaatttgaagtataaaattaaaatagtggtagtgagcaagccccatctcaggatggtcctgctattctttgctctgtgggctgatgaggactcaaagctatgcttaggtcccagatctttctttttgcctgtattttatattaaaatagatttctgtttgcggcaggaaatatgttatccacaagcaccaaaagaaatcatgttcccactggaacctgccctgggaacatggaagttatttctgattgattcttccctctctttcattggccacactaatttaccatttcccacctgacttgtcccagaatctttcttaggctcagaaatcccttccatccctcctctcattctgtgcttggcacctgagctgtctgctgctagacactgctgccgagatccagttagaccgtgtgcctgcacataccttaagcagaggtgtgaggactgctgtgagcttgaggccattgggctacataatgctttctaggcctgccagggtgacagagtgaaatactgtctaaaaaccgaaatgacaatagccaaattaaataccttactaaaccccttttcgagccatgatttggtttccagttgcctcatggagatagcaatgatgcttccatgccttccttcctggtccttaaattgttcttggggcagaaagcttgctgttcccagtcatagccttctgtctttatgcatgctatctaggtgttcattgtcttttgtccagttgtgtcagctagatgctcgcccacagctccctgtctattctcctcctatgtgagaggaagttgcctttgccctccttctcaccgcacacccttatttcccgttccctgcaaagttactgaggctggtctggaactttgatcctcttgcctctaccttgcccttccatgttctggctgtacagtcatgcctattactccttcccatgacaccaggactctatttcctgcgtgtctgggagccactgctgccctttccttttttaaaggtatttattcacttatgtgtatgtgtgtttacctgcatgagtttatgtgcaccgtgtccatgcagaagcccaagaagaccagaagagggcattggatcctggggaacaggagtcatgggtggtcgtgggccatcatgtgggtgctggaaattgacccctggactttttgacagaggaacaagtgctcttagccactgaactatttctccacccctatacttaccagtctttggttaacgcccatatcttattcaccctcttttatacaccttttaaatttctgtagtgctcaacacatgttaataactacagtacaaaatacctttgcttttgcatatgtccctgtgaagtatacatccaatagatgcttgtttttgtcttcccctccagtatcattattcatatttggtaaacatcaatggctactctatgtttggtaataactgtaaacaaagttctctgttcttcgcagctgggaccacgtgctcaagccagcagctgacgtgctccaatggtcagtgtgttcccatcgagtacaggtgtgaccatgtcagtgactgccccgatggctctgacgagagaaactgctgtgagtctgctttgcccagtgcttgctttcacctttggcatcttaatcaacttgctaggtttgctgatggacagaaatgcctacaatacgcctcttgttgagagctcttggcagattcttttgtggattaggggtgatggtctgatggcagttctcttttaacaaggcatcctgtttttcctgtcttagcatgtcaggtttttttgaagtaagaaactttaaaacattagcagaattccccaagcttattgaatcattgagcacagcatccatttttggtcaaaatctatagtttttatatttaattgctttggtcaagtttcgaggtaaaatttcgtagtttttttttttttttctctttttgtggactctgtacgttccagaaaatactttggaaaatagttacattttgaaaatgtatctctgtataatggcagttacttagatcagtttgtaatggattgacacaaaataggacatataaatcatggtattctctgcacaatgtaaataataacagtcaaaacagaaactgccgcattgtatactatgaaaaaggcagagaggtttatacaaaaccggtaggcactgggtgtaacgggaggcagaaacaatcaggtctttatgagttccgggcctgccaccgtgtctatacagcaagttctaggctggccagggttatgcagtgagacataacctgtataagacacagaagtttgggctggggctgcgactctgttggttgagtggctgtcaggtagcatgacctggattggatccccagcttcgaatacaccaggtgtgatggtccacccctgtaatcctagcgtggagacaggaggataaggaatgccatgctgtttctttttactttggatgttatgcatctaagtgactggacactggcaattttagagatgataaggccttggtattttgtgaagcaagcaataggttctttaccacacaatggtgatatatggcatattgtcgcattttgtgaattctgatcattataattccagctattaggacaacaggacaggtgaaatagtcttctccaaataaaagaactaaaacttcaaagggtctaggggctgttctaggtctcagtttgtcttccggttcagcctggccactaccaggagaaagggccatctttcacagagagctccagggctttgtgtcaccagcactcggactgtgtccttttcctttatctacaaatgtgtaaaaatggtgcttcatgccaaatgtaggaaaggaatgctactttgagagagtgaaaggcagctgagagtctggagcatttccgtgtgagcaccctccagccaaggcagggtcagctagcacaactgcattggatcttccaggggttggtgatggtgggggtcgggaggaaacatggtaggatatgaggatgatgagcagccacaataagagagggaaggggagggactacacacacacacacacacacacacacacacacacacacacacacacgagtatggggaggtgagttctctccatgtgggttctggagattgaactcaggtcgttaggcttggcaacaagtgcctgtgtctactgattaaggtctcaccagaccttaatcaacctttgagatgcagatttttctctcagtgcaagggcttggtgagggaaggagagagatccagagtcaagatccctgttcctggaatgagacagtgccaggagctcttcagtgcacgcacacaaaagccttaagcaaacctcacatatttaaggagatttgcaatgactcctctgttaaatcgtatttgcttttatgtattagattctcccagatgaggaagttaggaaccttcacacttcctccttagtgctctcatctgctgtggggctggaacgatggcgccctctgctcccagcacccatttcagacagttcacaactgcctgtaaatccagcaccagggggtgtggtgcctccggcctagtgggcatatacacgtgcatatacaccctcgaagacacacgtgcataccacgttaaacatctttgaaaaacgtttaggaaagtgccagtgtgggtgtgtatgggaaccacaagagttcgaatctcttcagagaaggagctggtattcaccagctacccggcaggcaatcaccgtacagcagtgtaataagcacccttgttccacatggaatctaaaggcagggtcaggattccaatccacagcccaacagcaagggcacgcatgtctcatgcatcccagactggcctcaatcttactgtgaccttgaactccgagtcttccaaagtgctggggttataaacatactaccgtccttaatttatgccttgtattaggaatgaaagtttataaaaatttattggcttgaagtgtatgtagctatatatttttttccttttcctttttttccccttgagatgaggtctcactatgtagctctgctgtcccaagttcatagaaatctacgtgcctctgcctcctgagtactgggattaaaagctaccacacctggctgatagtttgcattttgaaatgttactctttatggctgcttttttttactgtggaagttttttttttttttttaatttcagttaaacaccctacacataaataaacaaaactcagaagaaggagggggaatggggaaaagggaagggagggggaggaagaggaggaagtccttcctgttagttgtcctagaattttctagtctggttttgattctttgcattcttcacctctttttttttttttttttaagatttatttattattatatataagtacgctgtagctgtcttcagacatcctagaacagggtatcagatctcattacagatggttgtgagccatcatgtggttgctgggatttaaactcagaaccttcagaagagcagtcagtgctcttaactgctgagccatctctccagccccatcctttacctctttgtccttcaccacggttttgtttttttttgttttgttttgttttctgtctcctagaaattagctgtatctaatgttgccaactctggcttcagtgacaccaagacttgagatttctagactgttctatgcactgcaggaaatgtctattagatgccaggagtgtatccccaacaggacatctcaaatgtctcctggagcaaagccaccctcttgctgctctagttgaaaattgactgataggcagaatgaatcgatgcctggaccttcaggaagggagtgttacagcaaagcgacagtcctctgtagagagtgctgtgtgccaagctgtctctatgcctgtgatgtccgtgctggtgagatccatttcatcagattcttagctgtcttaaacatgagtttggatgcatagcagccgctagttgcgttagtgttcttatgtgatcaggggttaagccagacacattttctcttgttgagttcttctgccccggagtcattgcttgtggacaaacccaacacaagcgtatgagatgacttttgttcctcttttcgtagcaataagaaactgggtcttgagctgtcagatacctagaaatcactcacagatagcaatggatgtaggaagagccccagagaatttattttcccaacatctgaagcccaaggagcttggctctgttatttgtagctctgccagagagaccagacctctgtgtcatgatccctagcctttcaagtttctaaggccgacacgttgccctccgagacagaacaccttgtatccattccaggaattcctttccggaaggaggagtgatgtgcagggatatgtcttctctagagaaggcgaggatggttgggaggaaggcaaagcagttaaggtcccaataactggatcatctgaagagtcaactaagagataggcattggagagacagacatgtttgtgaccccagagctacagaggctgaggcaggaggacctctagttggaggccggctgggcctcctgcacgccccctccctaccaatataaatttcctatgacataagatctacttaacgcctctggcctttttgcctgctctattgtcatatgccttaggtccttttgattattctgtacattgaagaatatgtctacctatgttaaaagctttgaaatagttatagcccccctccccaccacacacactggtgttttattactcatctgtaaaatggcatctaatattaaacagcttgcctctttctttctttctttctttctttctttctttctttctttctttctttctttctttctttctttttttttctaaagaaaccagaaagactgaaaactgcagtccattttacttgtaatgggattagcatcaagcaaaaccactcatgcagagtcttagataaacatcagaacaatgcaccaattatgggccattcatttaatatactgaagtgacttttgcttgctcaaaaaatagtagctgttttcagggaggtaaaaaaaagattattttttgttttattgagcaccagataggaacgattctggtgtgagtaaaactatcgctaattatcgtgggtttgcagccctctcttttgttacttaggaatgctaaagaaagggtaaaatccgcgttacaatggaggctttcttgctcttaagcagaggtatttggtctgcctgctaccggggttgctttgtccctgacagttcatttctattgactttctgttcagaatttaaacatttttctaactgcggaatctccagctggggccgcagttggaaggagtaaggaagacagtttgagtcactctggaccgcgagaagaacgcactgttcctgagcctcagttcacaataggccgcccgataagtctcgctcaggtgaccctggcacacatatcacagtacagttggacctgcttagtattctcacgacaagcctgaaatctgagggaaaaaagagagaaaaaaataaatctcttatttagtctacttcaaataagaactttataaatatctctaatctttataaaaattctaaaatcacagttagctattgcccaatttctctatcccctgtcacaacaaagcccccccctcacacacacacacacacacacacacacacacacacacacacacacacatcactgtatagccctacttgcttgtagccaatccaacttcctggaacactcttgtcaatacccccagtcaacaacattttgttacacttagtagttcttgttcaaatcttatcttattaaggagttattgttatcttaccctgctctttttttgtaattttttttgtgtgtgtacacatgtacattgctctatttattctggataacatttgtgttggtgtctgtcattccactgcctcaaacagaatgagaattccacaatagcagggactttatttacacagctctatctaaagtgccttgatacttgtgatatggaaggattattatttattatattagttttacaattctgaggcacagctggccactgaaaatggccatgaggaggagctaggaacagggccgaggtgttggttagctctgacaacacacagccccataactcctatattggaacactgccactaaatatggcgtctgttaacagttgtgcacgtgtcctatgaaggcattttgttctgcactctgggccattttactcttgtattagagtttgtgttgcaggtttgtttgcgtgtaggtggaaggagggagggcttcttctcaggcacatttctgagtttaatctcaggtcagtgcacactagatggtgtgcttctaaatgctaggttggggttgggggcttttaaccttgctttacatatcaaactgacatctttatagaatatgctatgtggctaaagactgtggagttggcctcaactttctgggaagttgagagaaagaagcttcattggcatgagttgttttctttccatttcctccctccctccctccctccctccctccctccctccctccctccctccctccctccctccctttggtctgcctcactctgtagcccaggctaatctggaattcactttgtagctcagactggccttgaacttgcatcctgctgagtattgggatttgaatttttctccattgccactccattcatgatctttctttggtaatttttctttttcgcccatttacttggaagccttgtgaaccagactgtctgaatttgaattcaggctctccagtttaccaattatgtgacattcctcaacttcttgggtgcttcaggctcctcatctataaagtggaaacagatgttcacctcatgtggatgggaaaaaaaatccatgtatattgaatatattacctgtttctgggacgtagttttcaatatattgttgttgatgatgatatttgcttatttagctttatgggttgagttcctgacggagtgctggatttactagtcaaactggtaaacttcttttggtaaatcattattacatcccttggatcagcctgtttgagagcagagtacaagacattaagtaaaagaatgactgtaagatcttggaagagccaggtatctgtgcttgtgtatcagtaacttcttatctgctctgtctgtgatctcgggctttagtgtgctctctcccttcctttctcttctcttctcttctcttctcttctcttctcttctcttctcttctcttctcttctcttctcttctctcctctcctctcctctcctctcctctcctctcctctcctctcctctcctctcctctcctctcctctcctcccctcccctcccctgccctcccctcctctcccctcccctcaccccctttctcctctcctcccctcccttcccctcccctctcctctccccctttcccctcttcccctttcccctctcccccctcccctctcccccctctcccttcaccctctcccctcttccctctcccctctctcctctctctcctctctctcctctctcccctcccctcccctccttccctcttctccttttttttttctttctctatctgtaaccctggctgtcctagaactctgtagacctacagaactctgagctgctgccttctgagtgctgggattaaaggatgggtcaccatttctcaatgagcaatgggaaattagttttcttggtatgcactgaagatgccttctttttataattagtttgctctactgtcatccctctacctctccctcccttcctttccttccttttcttcctttcttcttcccacagggtctctgtgccttggctggcctgaaattcgctatgtggatcatgctggccttaactcccctacctgcctctgcctcccagaccccggggtctaaagtcctgtgcactcttctgttttgatagagttctgacactgaagactggagacttagagctgtgtcttctggggggggggggttgtaaatgactccattcttagaggttcaggtactcggctctgttcagatgacttcctccttggttcttgttttgtttgggggaaggctcactttactttttagtcctggctgtcctgcatctcactaagtagaccaagctggcctcctagatctgccatcctctgggtgccatagagcctggacccagtccttgattatgtaatagaataatagcatgaaagtttcttgcacaaaaccaagtcattaaaaagggagcagagtgttgtgtgtgtatattttgtgacatatcaatttgtgagaacaactcactccattggaacaggagggaacagaaggagcagtgtgtagtgtgaggaagtgtgacaattttatcttagttgagtggcccctgaacaaggctcaggatgaagctgattctctgagttgttttttgctccctcaaatttcactttctctgcttgacaattctgcaagacacctcggtcattgggtggctttgctctgtggataaaacaatggaaggttaggtgaaggcttgccaaatgtattgcccaatgggaaactcacctgattatgacttcctgccctgagattagcttgaaagtctttaacattttcggcaagggaaatttggaactgtttcttttgggtgaatatctgaacagggatgcaccacaagctatctacacgcaaaaaaggccagaaggtttgtagggtttggagttgagatttgccatcttttgtttgagagagattcattatcagcgtagatggagacaatagccgtttgctcctcattgggagagctgacccctggccatcctgataccaccctgatgatatcaagctggccctgtttgctgctgggaaaagagccttgtcagtggatactgatttaactcttaagttttatggttggcgaaaacaagagaccgcccagcatgttgattaccgatccttcctagctataacagccaccttaaatgtggtagccacagaccaaacccaaataaattttcaccgacaggtggcttatgtgtggcagagggatgactttcttggcttgatgctgctctcagaaggttagataagaagttggctcctggaactatctggcacatgctgtggggtgggtgagggagtaaggagctcacctggccttgtacatctctggaaggcagaattaataaacgagttgtgtgacccattaaaggcacttttgcaaagcacagcatccccataacgaaaggagaacactgatctaaggatgaattcaatttggggctattgtaaaataaagttcggaacaaatttaaatttttagtgagatattttaaaacgccccgtcttttggtgcttcaccttacagttttcagaagtagaagctcccagagaaggagcagacagtgtcacctgacagcctaaccacactacttttcctggttcttcagcattcttttggacaagggtccagcatcttcttcaacctctttttactgtttattttttttaaatttatttttattgtatgtgcattggtgtttgccagcatgtatgtctgcgttgaggctattcgatcccctgcaactggagttccagacagttgtgagctgccatgtgggttttgagttggtgttgggtattgagaatagccagtgctctttaactgtggagccatcttcccattctcccaatccccttctgtttgtttgctcttagaatactttttcaaagcaatatgctcacacattgtgtgctggacatgaccagattgagtcgtgggtactttggcctttgttccaccaatatgctaattctggtaacatactggtggaccacactttaaagttaagagtttggatccttctagctcctgggccccaagattccagttacataggtgccaggtacacacagaagtcaccaagacacctgttgcatatgggggagggagatctttgtttttacaaaggcttcctttcctagtcttccctagagcacaagaagtatgccctgtggctatccatcccccgtgactgtccatttcccatatagagtatgaagggcatgctcattcatgtcagtgagctgctggcacctaggacacgttcattttatgttgaagccactaaggtccctagtgaagagccttctgttgaagtcatgtgactgagtggctgcatgtaactttggaaatttaaaaatataacgacactggtgactcacttttgaatttctggaaactgaggatgtaggcttatttttactatagataacagggagaaggttatttgagaggttatttttaacactggggcaaggtgaatgcagtttagcaaggattctggacctagcttttgcttgataggactatccaggaattatatggcatacatttattaagatttatatatatatatatatatatatatatatatatatatatatatatatatatatatatatatatatatgagtacactgttactgtcttcagaaacaccagaagagggcatcagatccattacagatggttgtgagccaccatgtggttgctgggaattgaactcaggacctcttgaagatcagtcagtgctcttaactgctgagccatctctccagaccctatatggcatatcttaataagcttgtaaaacctgaagttgggttcttcagtgcaattttagcttcaggttagggaggtgctatcctcactttgagatttgccttggttaaaattagatccaaagacaaccagagaatcaccaggaaaataatcctcaatgagaaagacaatcagaccaaggaggagatcacactgatgtgaaggactatatatatataaaaaaaaactattaagtacgaagtgacgccacatgcctataatcccaacactagggcagctgaagcaggagggtcctgagttgaggacaggctagcctgggctacatagcaagactctaccacaaaatgaaacaaagagtaacaaagtaaagcagaaacaaaacaacatttaactccatagctgcctatggtagctcaatagcaatagtgaccagttctttctccttctttcctccttcacttcccagaacatgtataacagttcatgagtttctagaatgtgatttgtattgtagaggaggaagttccattttgagtcatcatatgttttctaattcttcagctttcatctcaaaagctacctctttagggagctatctctctgctcccatatcttcctatggtgacttttttttggaaatttccatattcgcgtgtcattatttgattgatgcatccctcactctgtctccgggaggtcaggggtcatctcctagtcagtgcctagcatatggcagtgtctcaggaaatgttcactaaaaggatgcttttatttaaggtttgcttgctattttttttttccttaaacagattatccaacatgtgatcaacttacttgtgccaacggagcctgctataacacgagtcagaagtgtgaccacaaagttgactgcagggactcctctgacgaagctaactgcagtaagtcacgtcctttaaaggggtggtggcaagttgaggctggcttatgctgacttgagagggacaagagtaaccatctcttcccaagccctcgtccactgaatccatattagttgtttggaatcagccaccactgggaatattgacaccatggattttagtagaagctacatcctgagccctttctattccccaaggactggttctatcagtaccccactgcctagtaagtcaggtagggtcttctggtaaaattaagtggtgacaactcaactgaaatgatctatctcattttctctctcgtttcaacctcgtgtcccagctacgctgtgttcgcaaaaagaattccaatgtggcagtggagagtgcatccttcgtgcctatgtctgtgaccatgacaatgactgtgaagataacagcgatgagcacaattgcagtacggtgatttttctcttatgctgggtcatgtgataagatgtgataagggaggggtactttcctctcccttatactaacataccacttttttttttttttttttgtctcaaagaagtttctgtttggcagaagaagccaaaagttaatggaggagctactgctccaagcttattagtattgtgtgacctgcatccccttatccttatcctctagggatcatagtagaagtgaagagttgtcagcttgcattcttccctacatcctttgtgacagtgtcacaatatgtcacaggactctgatcttttaattttttaattttttttttttatttttgggttttcgaggcaggatttccttgtgtcgttctggctgtcctggaactcactctgcctggccttgaactcagagatctaccctcctctgcctcccgaatgctgagattaaaggtgttgcccactaccacacagtggagactctgatcttgacagtagctccaatttctgctttgattgactgatgcctcatctctctgtttttctgggagctaggtcttagaacctgggcattatttcagtgagtgaaataaaaagatggaggcatcatggagtgggtgactaggagtgttttggtgcagatgagagttacaatgcttctttttcctcctttttctcttccttctctcctcctcttccttttcttcttcacgtttgtcaagatactaatgctccaaccgatgcagatgcttcagttcccaggatgcagtgcaggcaggatgaacactttgattcccgcccccacccccaaccccacccccacccccagactgtgcctttgcagtgctcatgttgcatgcaattttaaaaacctgcttgctcgctctctttcttgagagctctttccaccctccccgctaggccctgtgatcagcagaccccagcctcactcagctctgccaattgccagctgatgttttttccttgaaagctgggagctgcattgctctccgtcagccaacaacaccctgcagctagctgcagccaatgaccgccccggctgtgccctttctcctgcccaccttagtcaccggggatggaaaacacgagacagccttaacattttaaaactagctagataactcaatggttgtgaagaatacccagtcccatccttcttggcctccacctccaccaccggcagaggccccaggacctacatgactgttgcttcctccactatactgcccgctctgaatcctcattcgcatcgcctttcttctatctccccagggaccaggaagccccacctttccactttgtccagagactggactccttccttttttattgacacaaccaagaagcaattagggaaacaatacctgcacctacagtgctctgttgctctcttccagactatgacacctgcggaggccaccagttcacttgctccaatggccagtgcattaaccagaactgggtttgtgatggggacgatgattgccaggattctggtgatgaggatggctgtggtaaggaccagaggagatgcctacctagaatcatattcctcccttagagattagaacccagatgtaacaacgtcagttaaccctctccttcctgtcattgaggaacttgccttattattttttcttttttaaagatttatttgcttaaagtatatgagtgctctgtcttcctgtacatctgcctgacagaagagggcatcctattatagatggttgtgagccatcagtcggttcctgggaattgaactcacaacctctgaagagcagccattgagccattgctccagctccacttttcttttttcttcaagactacttgtttttgttttttgttttttgttttttttgatattaaagtcataaaccaggggaaagagggaaaaggcagtatgagagcctttaaaaatgcctaggcctgtggtagtctgtgagtttcgattttgagtcactgaaggctgggaacatgaggatggaactcaggatgggcaggtgcacgtggcttcctatccaaggagagtcttcattcgagaaggatattgtccttagtatgccttctgccactgtcactagcagtccctataatttttcgatgtccactatatacagcaggtgcctctcacggctccagttccagacagaaggctgactcttattccgttggttttaggttttggtattcccgaggaacaccacttttgagttataactttcctttgattatcaatgtttgttggcagccacattcagaaagtgtgccatgttaatagttgcatttgatcaaaggctggtggtagcctttattttaacagataggttgtttggatttttgtttctcatctggtccatgtcttctcttaactatggattttattaggagtgttaaatctttagggtggcccataactctctctttccttccctttcagaaagtaaccaacgtcatcatacatgttacccaagagaatgggcgtgtcctgggtctggacgatgcatctcaatggataaagtttgtgatggagttcccgactgtccagaaggagaggatgagaacaatgccacaagtggacgatactgtggtgagtgtgggagctgtatatggctcacttcctgataagaaggtttctagaccagactctcaaatgcagagaatatcagctgacatttccacaacaaaatagctcggttcagtcacttcattgacatttattatgtctcatggcagttcttgcctataccagcccactgtctaacccacacttggtttcacaatggtggagagtagaccctatcatttgaacaattttaagtctctgcaagccatgtttgctaaggtattgaccacattcaggtgaggccagagtggaacaaaagtatatgccaacaaggaaagttttttttttttttgagacagggattctctgtgtagctttggttgtcctggaactcactttgtagaccaggctggcctcgaactcagagatccgcctgcctctgcttctgcctctgcctcccaagtgctgggattaaaggtgtatgccaccacgcctggctggaagttgttttaataacaagtatgatgactttaacatgggagcatctcatcttgtgatactagggctcagacataaagaattatgggaattatgccctacccattgaacttgttacatacgtttgatatcttatcttatcctggtcttatttagatattctaagacaagcttctgattcctagggtgtgtaagttgtcttctagcggttcttaggataggtaatgaactgaattggccatttggtatctaagcaccatttttgtctctctccccctaagtcaatccagttctgagaacatctcacatctcaaaggggacaattttgaacttgatctcatcatttcgacactaactcagttggtgattgcacagatgagcacatgtccttctaactccaaggatcccctgaccccaatacttgtcatatctaaaagtctttccattcagcttagaagatttagtataaaagcttcagaataaacaaatgatatgtaatcagtggccaaagttttgagaagagatattaacaggaaaaacaaacaaaactaatctcctgaaagcctactattgcaagccagccacagtcagagctaccaaagcttatgacctgatttttcatgaatggagttaacagccttttatgtctacaggtaacagtagctgtaatatgaaaagaaaaagaggtttaagaaacacaaagcatttgctacgtggtattgcaggaggtggcaggctctcctgctgtattgcatgctcattgttttttttttttttttttttttttttctgtttggaagttactaggtaaactagtcttgtccagagccatccagttagcagtttctttccttctgtttaggtacgggtctctgctctatcttaaactgtgagtaccaatgccatcagacgccatatggaggagaatgcttctgcccgccaggtcatattatcaacagcaatgacagccgtacttgcattggtaagtgtcagcttggaaggccaagggtccccctcccacagttcctcatcccattcttccttccccttgccgttgagggggtgctctcccccactagacctcccccttccctggggcctcaagcctcttgagggttaagtgcatcttctctgccactgaggcaagaccaggcagacttctgctatatatgtgctgggggtggggggtggggggctggggtggggtaggggctcagactagcctgtgtgtgctgcctggttggtggctcagtctctgggagctccctggcatctgggttagttgagacgctggtcttcctcctctggggtctccctccccttcagcttcttcagtccttccctaatccaaccataagggtccctgaattcagtggttggatataagtgtctgcatctgtttcagctgctcgtagggcctctcagaggacagccatgccaggctcccatctgtaagcatatcatatgattagtaatcgtgtcaggccttggtccccccccccccccatgagatggataccaagttaggccagtcattggactgcctttccttctgtctcttctccagttgtagttcttttagacaggaacagttctgggtcagtatatgttttgttttttagttagcataaacagtgtggggttgtagtgcatcattttcagataaaatgtttcagataaaactttcttagtgttaccaagaactataatagcagggtttgcgtgctgttttttttaaaagatttatttattattattatatctaagtacactgtagctgtcttcagacgcaccagagaggccatcagatctcattacagatggttgtgagctaccatgtggttactgggatttgaactcaggaccttcggaagagcagttggtgctcttaaccactgggccatctctccagctccgagtgctgtctttttatattcagtaaaataatccaaagaagttattcttgtgataaccgaaggaatgcagtgtttttttgtttttttttgtttttttttctgttcccacccccacccttttgatcctcttctttgcctctgcttaccaagttcaatatcaggtctatatcctaaggtatgcctatggcctaactgtctctcttaagtgactatattacttaagtcttccggtgtctcacacctgcaatcctagtatttgggaaagggaggcaaggagatctggacttggctgcatagtgagtttgaggctaccctggtctacagaaaactctgtggctcatgccgagagaccgagaaaagtctaaagtattataatcaaccatccaggtttctaatactgtgaagacattttgtaggtgaactattctttgagacagtgatgttttcccgttcattctcattgcactggggtgcagtcaaggattgaacagcccacacaggagcatcctcattggtctggctggtgggctgctcctgtaactctggaagccctgcccatccatgtctcctggcatccctctgtgagtggcattccgttttcttgggggcggtgctcatttgtggggtgagactgcccctttgtctttggcaagggtcaggcgtctctgctcccaggctgccagtgcactgccagtcccatctccaggctttcccttctaggcagttcccttttctctcagtagcaaaggaattccaagagaaataccagaaaccactctctcagtattacatcagctctcctttttttctttcacaatccctaaagcttgccatggggtgaggactgtggggggtggggattgtaggggatggagattgtgggtgggggtggggattgtggggggtagggattttaggggttgtggggattggtattgtgtgtgtggtgggtgggagttggggggtggggatgaggattgtggggggtagggattgtagggggtgggggtcgtggggatggggttgtggggggtagggattgtggaaggtgggggatggggattgcatggtttaggggttgctggggtgagggttgtgggatggtaaggggggtggggactgtagggggtaggggttgggggttggagtgccagctgtcttgcagtggaaacttgataagccttgatgtcttttcagcaagagtgacttgcttttacagtgtgccctgtcctgtgctgcccataacctgttcctctgcctcttctccccttcaacgtagcacatttcctgtcctcccattatacaaccctgagctctgtgaggcttgtctctacaggagctccttaaacgcaagagactcgcatcgcttctgtttctaactggcaaggtgttttgaggtctgtagttttacacgtagcctgataataatgtgatgcgggaaaaccagacttatcaagctgccaggtgtttgtttttagggcttacccaacacttttagttagatgcacaatgggaaccgcaatggctgaccagtggcagatgagagttttaaatttcagcgaatacccttcagtcgccccacccccaccccacccccaggctctttctgggacattcatacagacagccccacttagagataagctcaaacgtctacatttgagggcctttgtgactggaaggccccctgccacctgcagaggcctcttctgtgaccttccctgtcaaaaattctcgaatgcatggtttatttttgaggctgtttgtgtcaaagatgactttttatcggtgtgaagagaaactctatttaaatcaaatacaggacgttatgaagccagatctgcgctcctttaagctgagctgggagttcaggagaattgttttggtttcttctctgaagcatttcaactcagtaaatcctctgcagggtcttcaccctctgcatggctgactcggtagacttgaggtgtggggtgccttcttccacgggtctctccactgtacgattcggtggtaaatcaagaatagagccgagtaatctctacatgggatctggtgtctttccaccattcattggcccttggtagttctgacctggcagtggagtttctgtggcatgcaggaacagtttcctgggctcattgtttctgactgacaagacaggctggctgtttgttgacagagtgacattgtgctgctgaggtcagggcagggaggccattcagcacgcagggtttcacacagccaggcagaggtatcttaggtgatcttagcccaaaagtagggcttgaattttgtcaaagcagtatttgttggtactggagttgggcagagaataagaaagggagggatagacatagatcgatgtggagggaccatgcatgggctaggattcatttcgagccgtttccacggcgttcctagtttcgtgaaagtaactgctctacttttgtttccgtattttattcgactgatgatagatgtttaattagtcttcatttttcacagttagggatctaaatagcacataggtaaataggtaaataaggacttacatggtataatgaaagcaccaactcagaagttgtcccctaactttcacacacataccctggaatgcatgtaaacacacacacacacacacacacacacacacacacacacacttaataaaaattaggtggtatctgctcatagtgacactctttaatgccagcagaggaatttcaaggctaggatagccaggtctacatagagactttatttatttatttttaatttttttattaggtattttcctcatttacatttccaatgctatcccaaaagtcccccataccctccccctcactcccctacccaccctctcccacttcttggccctggcgttcccttatactgaggcatataaagtttgcacgaccaatgggcctctctttccattgatggccggctaggccatcttctgatacatatgcagctagagacacgagctccggggggtactggttagttcatattgttgttccacctatagggttgcagatccatttagctccttggatactttctctagctcctccattggaggccctgtgatccatccaatagctgactgtgagcatccacttctgtgtttgctaggccctggcatagtctcacaagagacagctatatcagggtcctttcagcaatcttgctagtgtatgcaatggtgtctgtgtttggaggctgattatgggatggattccaggatatggtggtctctagatgttccatccttttgtctcagctccaaactttgtctctgtaactccttccatgggtgttttgttcccaattctaaggggcaaagtgtccacactttggtcttcattcttcttgagtctcatgtgctttgtatcttgtatcttgggtatgctaagtttctgggctaatatccacttatcagtgagtacatatcatgtgagttcttttgtgattgggttacctcattcaggattatgccctccaggtcaatctatttgcctaggaatttcataaattcattctttttaatagctgagtagtactccattgtgcaaatataccacattttctgtatccctctgttgaggggcatctgggttcttttcagcttctggctattataaataaggctgctatcaacatagtggagcatgtgtctttcttagcacttggaacatcttctggatatatgcccaggagaggtattgcaggatcctccggtagtactatgtccaattttctgaggaaccaccagactgatttccagagtggttgtacaagcttgcagtcccaccagcaatggaggactgttcctttttctccatcctcgccagcatctgctgtcacctgaatttttgatcttagtcattctgactggtgtgagatggaatctcagggctgctttgatttgcatttccctgaaacaaacaaatagatagggattataatcaatacactttcctaatgccagaggcttagctggctgttcacagttagatagggagaggtcagggatatgaagagtatttaaatgtggtagtagttgaccaaggactggaccatttgagcatccttcaaactttataattgtgaagaaagtctcttgtaatgttgtatgtgtcatttacattagaattccttgtcctttgtgtgtgagatgtgtatctcttttatgtaagggacgttcagccttttaaatgcatgagtaatttaggaataaacaagataattttaacgttgcttatgactttgacgtcaaagcgaaggcacttgggtaaacagaaatgcccaaatacttaatttgaagctacagaccaatttttttttttaaatgggtcgctttacaaattcaaaaataatgttgctcagtagaactttctgggcaaatgtatatattccttcctgtagcttcacttttcttgcattcagcagtcacgtggagatattgaggacttcaagtgtggccgacaaggcttagacacttacgtttctgtaactaggggacacatggctagtattggaaaagcataggtacaggggaagtatttttgccaaaacgtattcatcttgtaagccgatgttaattaatgagacaatgagacatagtaatgtgggtctgtgggtaccgtgccaggaaccccggtaaaagcgagccttcctagggacagtgttctggggcttttttccccttgatgaaaataccagtcttaagcttctgcttcctgctttgtatacttctcaaggacttaataatttttctggacaaattctccaatatttctcactgggaatccccaagaaatgctggtgaacaagattatgaatgtgtgtctctcccacggcagatttcgatgactgccagatatggggaatttgtgaccagaagtgtgagagccgacagggccgtcaccagtgcctctgtgaagaaggttatatcctggagcgcgggcagcattgcaaatccaacgactcctgtgagtacacagcagctagcttccagtatcttccttccatagccaaggcaaaagaaataacagtattcatgtctgtggcaaagctttataacaccacagagtggaggtagtctttcggcctgagaacaaagataagccttgattgtatataattattaaggactgatttgcatattcatggtgtatatttctaatattttcttcttttctgccttcccttttgcagtactaggtattgaacctaaggctaccagtcttcgtttttccccagagacagggtttttctttgtgtggccctggctatcctggaactcacttggttttccaggctggcgttgaactcagagatccacttgcctctgcctcctgagtgctgagattaaaggcgtgcgccactgctccgctgagtttcagtcatttttaatggcttctttactgacccaggctattgtatcacccaattaattttattgtggaataagatttatggctgcagttgattggcacaaatgtttaacctttaattaatttgcctattacaaaggttgtcgaaattatatgtaagaataatttagaaagtttcaaaatggccatgctaaatttgttttacatttttgtgaacatcaaattctaggtattctatggatattcctagactgatggagatcagtctgtcataactggttcggagtgttgattttaattcctttcctccctccctctttccttcattacttccactgatgcacatggccaggtcttagctctcagttcacacttggcttttaaatgcctctggtgccttctgaaagtgcactgctcatgtgacccacatgagcaaccatttttctttttctctttctttttctttttctctttctttttctttttccttctccttttctttttctttttgcatattacatatgtatgattttgacagctacatttattcatttttgaatatgatatatgattatgatatatagatagtatgcccatgatcagtttggagggatggcatacggttgtaatcctagtacgtgggcggtgggagttcaaggtcatcctcaactccttaataagtttgagccaacctggactatgtgagatcctgtctccagacaagaaaataaaagtagtttcatgttaaaaaaatccatattatgtccttccatccttgattccttctcccaagttttatatttcctttgctagaagcaattgttcttcatttcaatcttagagaatttaaaaatgcaaaagcaaaagtagagttatagatttaaccccatccttcatgtaccaggagccatgaacatttgctagtgacactcaatattttctagactgttctgtataaactcttccatggttgttattatcattattattattttgtggaaatttatgagacagtttcttacactgtagctcatgctggctttaaactggatagtcctcttgcctcagcagcaattacaggaacgaactaccactgtctgcttcagtgattattttatattgtatggcatggtacatcagctttgaatgcatgtacagctctacaaaaacatcttttttatgtgtctgagtgctttgcctgcatgtgtgtctgtgcaacaagacatccagaggagggtgtcagaaaacctggaactggagttatagaaaactacaaggtgtccttcaagttgtgggactcaaacctgcatcctctggaagagaatccagtgcttttaaccaccgagccacctcttcccgctctgcacataattttataaaccagccaatcatatttttttgtactaacaggactcagtgagtgattccatcatgatatcttgtatactcgagaatctatcatgtggacttggatccaccagagccatatcttcctggattctttaaaatgtgttctgcatttaacagagcatgagcatacatgcgaccgtaagctgtccaaatcaagagacttcctgtattcttttcctaactgcattggaccaacagtgaggactctgctctaacccactgattggaacactttgttaagtgtctttgtgaggcagttcaccttctgtaaggctgggagaaggattgtgtctgcttgtctcattggaatcatagaggctgatactagttgttcctcactgtttttggctgtcgtccttctcccttgcagtcagtgcggcctccattatcttctctaatggtcgggatttgctagttggagatcttcatggaagaaacttccggattctagcagagtctaagaaccgtggaatagttatgggagtggattttcactatcagaagcacagagttttttggacagaccccatgcaggcgaaggtaactagaaaattcaagggcatagcttatgggccaaatggaacctaaagcacaaagtgttgatagcttttcattttggggggaggagaggggaaaattcctttgttttctgacaagaatagcccttgagatattttatgttagtcagcgtttttttcccatgctatactattacatgtgacctgtgagacaaagacagctattatttggattagccttgagcaacttttaattttattcataaaggagtccaaaagcctaatgaaaagaaatcatagacctttcagagctagatagatatttagtcgccattttggaaacttgatcatttaaaatataaaaatactcttcttacttgcatgataaaaatcagatttttttttaaaccttcatcttgcacatggaattgtaattgaaggttgggcaaaaaaattgtttttttttttttttttttaatgtgatgctcaaaatctcattgcattgttttacttagaaagtaagattgattttagttagaaatttgactataatatagattcagattcatgaaacatacattttagaaactgctaaaaagtcatggaattttgtttattcttgctgcatttcttttaatgtgaaaccaagtgtgtctttaaaacattctaattaaggctaacacacaaagttgaattttgatcattagcaattcttatttgaataaaactaaaaatcaaaacaaaatactatcatctttatcaaaacaaaacaaaacaaaacaaaacaaaacaaaacaaaataaaacactctacaaaactcgaccatgtatttaccttatatatactgaacaggatccattttcttctggtagcattgtagggttgaggtagtactttctatctatccatccatctgtctgtctgtctgtttatctatttatgtatctactataagtagatacatatagataaaaaatataggaaaacagggttcatgctcaggtttaggaagtataacaattgtgtcatttctttcaggttttttccactgacattaatggcttaaatacccaagaaattcttaatgtttctattgatgctccagagaatctggctgtggattggattaataataaactttatctggtagagacaagagtcaaccgcattgatgtggtcaacttggagggaaatcagcgtgttactctcataactgaaaacttggggcatcctagaggaattgcccttgatccaactgtggggtaggtgacacccattcctcgccatacacatctaatctgtcctggattcattgaaggttaattctgagttctttcagttctgtacactagaacctatgtttagaaggttcttaggtatagaggctttagcagagttcactaaatattaatccatgtgaggagatgtaatccaagcacgcctattggtgcctcggaagcacctgttggtgtgacttgtcgtcttcctatttaaccatatttgcctagctcggggttctgttttggtttaatcattaacataacattagcatgctccacctatgttaaggggattcatttgagcatgaactggaagacaaagttgttaaagagggaaggccactgtgactactctgcttcagagtggagctctcctgctcatcatcagagtgaaccagcacagcacaccaaatgcctacttcccttcaggcttaaatgcaaatgtcttattaaaacaaatatttgattgcaaatgtttgcatatgcgagttttaggaggataaagtaaacttgcaaacagactctttcatcttctgctcttcttttgtagctatttgtttttctcagattggggaagcctctctgggcaacccaaggtggagagagccttcatggatggtagcaatcggaaagacctggtaacgaccaaattggggtggcctgctgggatcactctggatcttgtatccaagcgagtttactgggtggactctcgttatgactacattgaaactgtaacatatgatggaattcaaaggtgagggttttttttttaatggctttataaagttgggaggaattgtataaatatgaaggaccagaattaaaatcaattttgtgaaatgtgagcatgattgatctttgtgttgacttgtgtgcccagtgacctgctctttcctagcaccaggaggcagagatggatggatctctctgtgagtttgaggccagcccagtctacatacagatatacttgccacaaaacaaccaaccaatcaaccaacaacacaaaacatttattttattttttattgctattattatttttattgtgtatgttttcatctttttgaagagccccattgtactgttttcagggcttggtaacattttttccttggataatagtttctccttgagaaatcctctctctactctcctgtgtctaatcaaatgattgtttgtcagctgtggtacacattctttatttctctccttttctcagtatcttctgccttgtttttttttttttttttttcttatttcagcagttctggcctgctcctgcaataattctgatctgtggacagtttcctccgacagttatgagtggtagcactgtatgtttgtcaggtgcttacctgcattccattgtctggcctcctagttgttgaggactggtctgtggtgggatgggatattgctgtcggggagtcatccaccagatttcagatcctgactccatctatccatccatccatccatccatccatccatccatccatccattcacccacccacccacccacccatccacccacccatccacccacccatccatccatggagtttaaaataccatctcacatcctagacttttatgtgaggcaaccctaaaagtatgaaggccaagtgagaaaacaagcgtcctcttcttcttcttcctcctcctcctcttcctcctcttcctccttccctttgctttggtggtactgggaccttaacataatggtaggcaccctgcctctgagctacaacccaagcctgatagttaagactcagctgtctttgtttaagaaagaaaattctacataattaagaagggatttcaaaagcatcccataatatttctattccaacttgttctatattataacaggaactaatttaggtttttagagattcagctgaacaaattacctcttcactaaaataaaaacagaacagcagaggtatgacccatgcttgtatccttttgtaacaggaagacggtagcgcgtggaggctccctcgtccctcatccgtttggaataagcttatttgaggagcacgtgttctttactgattggacaaagatggcggtgatgaaggcaaacaagttcacagacaccaaccctcaagtgtaccaccagtcttccctgacgcctttcggagtgacagtttaccatgccctcaggcagcccaatggtaagtttctgggcaatgttcaccttacttggaacaggaaagggtttcttgtagttatggaaactaatgaagcaccgcccgaagtttgggtgctatgtaggtatatttacagctgtccagagcgctaaccttctcaagatcatgaacctctgcagaaatcagtaaagtcgccaatgtcaaggggatgccttgcatgcatgcttcttggctcctgtagtgtattccagagcctgctcaggtgcttggttctagtggcaaatgacctataccaaccactccaccgggagcagtctatggcatttgtcctgccacatttgaggtcaccggggttccatgcaacataagaagaactcagctttcttactgcgaaatgtgttttctacttctttggatatgttttgcatttgttctttggtttgcattaaggctgtcatggaccaagtatgtttagtatgtttgtctggtccctagctacatctctggttgcaaatgccttcagtcctagccgaggcagatatctttctgaagttgaatataccatagagccatagtaacaaaacagtgaatagtactgacttaaaaatacgcatgaaggaattttgattcagttactgttattttagagtaggatttatgtgtgtttgagtgttttaaatcgaacttttggtatatctatctgcactgtatttggccattttctgtgtttgtggactgaagaaaagaaatactgaaaccaaggcaatgttggtagaaagatctattaataaatcacaatttagagaaagttctcatgttgactgaggaatctgtttagaatgaagaagaactacaaagtaattaaactgatgtttaaattaggaaagagagccacatgctagaacaaaatcacacactagatatagctagatgggtagaagttaataggatacacttgaaaaaaaaagcatgcttggtctgaaaacattctggacatctctggaatgatttttcagactctttatgagctctcattgaattcagagctactgtaatctgttcagccatccatattattttcgttattcagctgtgaatatctggctatcatttcctcaaatcaacacagttgatagaataagaataagtcaaagtttctgaagatggtttataaagcagctgagtggcttagcagtgaagggacctgcactgacacccacatggtggctcacaacaatctgtaaaggggatctgatgccctcttctggcatccttgggcactgcacacacatggtgtacagacataaatgcaggccaacacccatacacataagacaaacaaaaaacaaactttataaagcagacaaaggaaattagtgctggcagccttgagcacaggctgcagggacctatctgaaggtgtaaacttgttgcacaggtgcgtagtagggtttgcactagtttagtcaagcactcaaatcttggcaactttcagaacctgatgggataataatttttctctcctagagctattggtagtacactaacttacttgcaaaacatgtattcaccaagtaataggaaaaatgtgtattaccaggaaagagtctatcataggaataaatggttttgtgtggttggtgttactcagttttctcaatgcatcttaatccatgtgctttccccagccaccaatccgtgcggaaacaacaatgggggctgtgcgcagatctgtgttcttagtcacaggacggataatggcggcctgggctaccggtgcaagtgtgaatttggctttgaactggatgcagatgagcaccactgtgttggtaagacatcttaccttaccttcactgtctttctggtgaacaccacatgctttatgcacacacacttctgcccaggccatcttgttctgaactgggctagcgctgttgactgaattcttccctgtaagaagggaacaaagaggtttctctttgttccttgttcagggttagggaatcttttcccttttattactataaattattagctatgacctttaaattctataggttcgagctactttctatttctactttcctttttaggctgacctggaattatggtcttcctgcctcagaaccccgacttgcagttgtagaccaccatttggggagtgtccacatttcctcccctgtgctggtgttggaaccccagggtcttgtgctctgcctatcaccttagtgtctccacgttacacactaccttaattttggtgggatgggaagctgtccattcctgtgaatgacttctaggtcagctggcctcgtgtctatattctaaaatagttctgtttctctcctccctctcctcctcctggctctcttggagcctgtccttttccttgcttatcagctcatctattcccgatgactctgaactctgctaatattgctgctcgtcatcttatggatatatccttgctctctagatattcgtgcctctggtgccttctccaatatctagtgtttaaaaaaaaaaaacattgcctaatgatttgattttaaacttcttcagtttttgccttcttagtttggatgcacttccatcgtctttgaattttctaacatgctgtcatggttttcattgcttttagacatcattccccattctttcatttcctcaatctctcacttctctccctaacatctttttgaataatctacataatttctactctttgtctctgtgtctcttctgtctctgtctgtttctgtgtctttctctgtgtctctctgtctgtctgtctctgtctgtgtctctgtgtgtctgtgtgtctgtgtgtggttgccttgtaactaagtgagctgcaggttcaatgagaagcaccatttctgggaacagggctagagcctttcctctggcttttgccctctcaggtgcccccatgccccacagtacctcaaacacaagaagagctaacaagggtgtgaatatacatgacatttgtgtataaaaatgtaataacaaaaagagaggactttaacacttctgtgaccattgtttgcttatctcccttcttctagactagtttccagttatattaactctacatttagctgttgttcctctcggagttggattttatggttacctactgtactggagggagataagcaatgtctctggaacatggcggggccgcactgctggctcactttcatgtgtccttcctctttctacagccgttaagaacttcctgctcttctcatcacaaacggctgtgcgtgggatcccattcaccctctccacccaggaagatgtcatggttcctgttacagggagtccttccttctttgttggaattgactttgatgctcaacacagtaccatcttctactcagatttgtcgaaaaacataatttatcaacaaaaaattgatggcacaggtgaggaaagtgtgtatgtgttgacatatttgatttgttttccctaatactagcaactactcatttgttttgcatacatatacacatatatcatataatacacatttgcatacatattcatacatcatacacatacacacacacatatatattatacaattacacaaatgcatacatacatacatacatacatacatacatacatgcatacatgcatacaggctttgacctactgttctctatacctctcctttgctctagctcacactggcttagaacttgcaagaataccccctgcctcagcctcctgagttctgggttgatagatatgagccaccctattccctgatacctctcatttattttcaagacaaatcataatcagagttggctttatttgtaagtttgttggagatagggtcttactatgaagacccagtttgtcttgatctgtgttatataacccagtctgggcctcaactcacagctatgctcttgcctcaacttcctaaagtctgggattataggcttgagccactacccaggctcaggctgtggctttttctttgtttgtattttattttctttaagaaagtacattttaatgttgacaaatgagtagttcttggagccccaacctgctggtcctttgtcctccctgtccttcagtccctagctaagctgtgacaacacctggcactgtctccctctgctcccttgggaacatctaacctgccatgcactatcaggctgtgtgcactggagactcattgcttcctccgctccatatttcttgtacccaatgctttattttgcatcttgctactcatcatctataaaaaggctcagtaacaatccccatgcatatatcgtacccatgatgttgaatggatacctgcaaggaacctggctcaaagtgaatatttaagcagcatatttttgtattattggcacaaaaaggccaccttttatttttatctatctatctatctatctatctatctatctatctatctatctatctatcttgaaatcctttatttatttatttttctttttttgagacagagtttctcagtgtaacagctctggctgtcctggaactctctctgtagaccaggctggcctcaggaactcagagacgcaccggccttgattaaaggcatgtgtcttaaaacacactgcaaaacagaaatgtggttgcttattctcagtgagctagagagaaggaagccccaaagttgccacagggaaggatttgcagaggaaaggtgatcttgttctcacgtagccagctcctctggcttctttgcaatcttggcttcctatggctgtccaagcccgctgagtgtctctggagggttgggcggtactgtttgtgagctacccccaactgtacctggcagtgtcagctcagagctgtctctgggtggtagtaggtgagttcaggtatctttctcacgtgttctggaaggttgaagaagggagtaaagccagacccagttctgtttatcactcactaccgtatctcctcttggagatccaaactgtgggcaagagctagattctaggtttatctcattgttgctcagcagttcacagattctttttttccttaaagaattccacacatgtttctacaatatgccccttttcattcaatctttaaacgtgcagccgttgggaaatttgtcttaaataacatgactgtatttttaccattaggaaaagaagtcatcacagcaaacaggttgcaaaatgttgagtgtctgtcctttgactggatctcaaggaatctctactggacagatggagggtcgaagagtgtcactgtcatgaagctggctgataagtcccgacgacagataatcagcaacttaaacaaccctcgatccattgtggtgcatcccgctgctgggtatgtgagagcttgcaactgctgaatgcctttcatggtgtgttgctccagggaccagctgtgcaactcacctgcagtttcatctcttcggcataagcttcagggatcaccttatctacttgaaaattacgttttacctttctctaaagtattgtttttctatagttaccctaggaaggaaaaaaaatcttccttgatgcagggctatcaaggaaggatccaattcttgcctcgctttagtgtattgatatatacacgaggttttagcagggggtggggtggggtgggggcttgggtgataatcatctagtcgttttcagtagaagaactttcaaatccctgtttcatgtaccattaacacagggtcagacaggaggaaacagaacagtctacagtgttctttttttaaaattttacttgaatatgtacagtagcttattcagaacacacctgagaaaaacttgtgactcaccaagccaggttccctcacctggggcgggggtgggatgtagctaggtgaggtatagtgacttggaagggctcatactattgagccaaatctgtagtcaaactctagacctgctcagacacaaaatttgtcctttctttctttgcttctttctttctttctttctttctttctttctttctttctttctttctttctttctttcttccttccttccttccttccttccttccttcctttctctctctctctctctctctctctttctttctttctttctctctctctttctttctttctaaaagctgtgttctctttatacttttagtttttctttgtaaaccttatttacctacacagttaaatggttgattttttttctaatggatttatagcaaccttaatctttagttttgaaaagctgtttcattcttcccattttctttgaaatgatgtgaagccatcatagtttagaaagttacacccggaaatggttttgattcccagcgattgtatgaaagaaaaaaaaaaagaagtggagagaaaaaaagtggtgtgtgactttaatcccagcaattgggagacagaggaaagtggatctctttgagttcaaggcctcctgcagtgagttctaggatagccagggttatatagtaagagaccatggttcaaaacaaaaccaaataaccccccccccacccctcaaaaaaccaatacaaaacaaaaaggaaagaaaaagatgttgattagacttaatgagtatgtgtttagagtttgattaatgtgtgtgtgtgtgtgtgtgtgtgtgtgtttatatgttgtatgtgtctgtaggtaagaatgcctgtgaataatctagaggccagaagatggtgtctgggatttgaactccagattccatgaacaagtgctcttacttactgaaccatctcttgatccctaacactgagagaattttgtagaattataaattccttatagaagaataaatagagaatggtctggtgggttctgaatgtttaatcccagattaaaagaaaatatatttgatttcttattcatgaagtcttcactaggtaacttgaatcagggtcgcatatgaaagttgacacctaactattatctagcattggtgttatagtgctgatgacaaagaaacataagttgaatgccagcttggctacataggtggacataaacccagcaaactcctgttctgttctgttctgttctgttctgttctgttctgttctgttctgttctgttctgttctgttctgttctgttttgttctgagacagggtcttcctatgtagctctggctgtcctgaaacttagtatgtagaccaggctggccttgaactcactatggaactcaaggtgacatatgtctcccaagtgttggaaattaaaggtgtccactaatatgttgggtgacagaagttttataacctgtggtctagttattctctctcccagatgctcattttaaaatcatgtataattgtgactgtgattacatatttataacttaaattgtaacttagaattaaatatgccaaacttgatagcatatatggagagtaaaatcagttgtaactctttcaaggttatcagtttgttcccatattgccctccttgatttgctcctgctttttaggtatatgttcctgagtgattggttccgtcctgcaaagattatgagagcatggagcgatggatctcacctaatgcccatagtcaacactagtctggggtggcccaatggcttggccatcgattggaggtgcgtagataccatctgaattttaatcgctgtagagtgtggagaaggtatactagacactagttctagtattctggacactggttccagtatcctggacacatggtagtgtgttggagtaaggaaatgaatcctgaaagtttctgagactttttgattgctgtcaggtcatgggtaatggatgctcaatgatctagaatacaaacacaactggccagctgctggtaggataaaaagtcaatgcactcgtaagtattttgaggaaatttctaaaaacagtagaatgacagggccaagatggatgaagttcgtgtagagattggatgaaatgtagcagcttcaggatattaattaatcaacaagtgagttagttagtgaatactgactcaatcgactagtttatacatgctttatatcgatttgtttatacatgctttggggattcttaggagttgatcaatttaggaagaagaccaatgagcttataaattattaaagcaggttatgggagaaaaagggcagaagcatgtttagtcttttaaacgttaccatcaatattcttgtctatttctcaaggaggaaacacatttcccagctcaaagatttcaaattttaagcttactgtatgtgtgagaagcatacaatgtaaatttctaatagacacatttggcttttatatggaagtaatccgccaatgtcctccctgtttgggacactcatgtcttgggattagataacatgtcttcttccttttcttagtacttcccggttgtactgggtggatgccttttttgataagattgagcacagcaaccttgatggtttagacaggaaaagactgggccatgttgaccagatgacacatccgtttggactcaccgtttttaaaggtatgctttgaggcaacaaaaggtatatgtttgccacagaaccctattcccaccccaaaatgtgaacagaaacatatgactgtgtttttccattcatatttctatacaattttcacattgctagtaaagatttctgagaggcatggaattgtgggaaatggccatgattcccgccaaacttttgtctacttctctcaactaccttcttcagtggagacgtgcttctgtgacttgggttgctcagaatgaatctctctcctctctctctctctctctctctctctctctctctctctctctctctggtgagccaggcttggtggcacacactcatctgggaggctgagtcaggaggaccaccatgagagtggcctgggccacatagttaagtcatggctcacttgtataacaagactatgcagaataaaacagctgacttgtttattcctgaaacagggttcttgtgtgtagtttgtggattacacacaaatactctctcaaactttctggtggtgtgttcctgttatcccagcacttggaaaacaggggaatcatgaggccagcttgggctgtagggcaagatcacagccaactcaattgaataaattgaatagtgagaccttgttgctcaaacaaatgaacacagtataccataatttgcctagtttgagggttgacactttgtagagagctaccaaaagtcctgtgtacaaactagttgtgttcctgttcgaaccccctagtcaaatacttagcatagtgtgttaagcaactagagtgggtagtcatactgaatattattccatcctgctgtctatctgtggagtgtgtggtattttaaaaatattttaaaaatgctctgagatttttgatgagatgagtcaattataaacagtcatccctcccattttcactccccctttcaaatattgtctgtcaggctcgtgctatttgctagtcataggaacattttttaaatgttaatttttctctgttatatggtgtgatgtttggatatcttttggtttttatcagcatgaaaaatagtgagtgcattctaatgagaacaatactataacccaaaatattagttttagtcaattctgattttcgttatgaatctcttttccctttctttttctttgaagatgggggtctccctacagagtctaagctcattcaaacccgtgttcttccctcctcagtctcagaaatctatgaatgccaccatgcctagctagcttcactatgaatttggtatggaatgctcttttgtttcgcaatactatgaaaaccattaatcctgtactgaaagactagctagatttccttgacagcatactgcacaggcctataagtttgatttgactctccatctatttaaatacgagacactgttctgaatggtaggactgaaatctgcatttaagagagagatgatttagtggttttaatgacgtactagtatggaccacaggtgaggaaacttgatttcataacatgagtgacattgttaagcatttattcttacttgtatttttttagttagttatggtctggtagaattctttgatgaaatctaaattattaagatcatatgtaagtttgcacaattgttgatatttttacccaaacatacaactttttttaacaaaatgagatctgtatttttccttattaaaagctccttctccctctccttctcccgcccccctcctctgtgtagccctggctctcctagaactcactctgtagaccaggctggcctcagactcagagatctgccttgcctctgcctcctgagtgctggggttaaagacacgggccaccatctctcagcaaaagcttcttattaaaagtggatctaaaaaaacagtaggaattctcataggaggtgaaaggatgctacactcctttaaaaaaaattgagtgttttggctggagataagaactcaaaagattctttttcatgtttacttttatatacggaggtttaagcctaattactactaaatattatgtagctgcctcagcctgagccatgatatcaattaaataagggcttccaaagagcaaatggttatacgtagatgggctcctggaccactgcattcttgtaagccgattacatttctttaaactgtgactgaagtgtgaatcattctctttttctccttagataacgtgttcttaacagactggagactgggtgcgattattcgggtcaggaagtctgatggtggtgatatgaccgttgttcgacgtggcatcagcagcataatgcacgtgaaagcgtacgatgctgacctccagaccggtgaggggcattgccaagtattctccatccggacatagttatttgacttggtggttcctttctctttaactgtatcttcaacataattcctgacagtgctacattcctatcagccatatagttgaacacagcaggactctggtttcttggaaatacacaccttagaactttcctgcccttaaaccgaatgctgtctttggtgggctgattcccaactttgtagtgttggctctggtttttttttttttttttaatgtttcccttcatacgttgaaggttggatctgcttgtttctgcatttccaggaactaactactgcagtcagaccacccatcccaacggcgactgcagccatttctgcttcccagttccaaacttccagcgggtgtgtggctgcccctatggaatgaagcttcagagggaccaaatgacttgtgagggagacccagcccgagagccccccacacagcagtgtggctcctcttcctttccctgcaacaatggcaagtgtgtgcccagtatcttccgctgtgatggagtggatgattgccatgacaacagtgatgagcatcagtgtggggcacttagtaagtatctgtgctggggttttggggaggtgaatagaacagaagactggccatccataagcaataatcaaagcatgagctatctatgagtatgggccctgcgtttgatcagcagcaatggtgagaatagtattacagaataggtccttacaactgtagcctttgaagacatcacgtcctgtgtgtgttttatccctcttttcggagtgaaatgaatggaaggcggaatgggtctgtaattctacactttttgatggtattctagtctataaagtttcagtcctaacgattaccattgcagaaggcctaaatatcccattaaaaaatgaaaataattgagatctttagaagcctctattaaaatgatgccagtagtaacctgtggtttttgagtgaaagaagagttatttgagccgggcgtggtggcacacgcctttaatcccagcacttgggaggcagaggcaggtggatttctgagttcgaggccagcctggtctacagagtgagttccaggacagccaggctacacagagaaactctgttatttgaaaagttgtacattttcctgaaattgtcataggagggaagtaaaggtgagcccaggattatacagactagagatttagtcttgggaagattcccatacctttcaaagtctaatttaagataattatataataatcatagttttctcttgatggtcaaaaaatggatatacatgtatgtgtatgcatatatatatgtatatatatatacatgcatacatacatatatgcatataatatacacacatatagtatgcatatattatgcttggtacttaccaaacctaaaccattctcacatttcgtctaattttgtgtgatagtatattgaaaggtgagcagatctttgcttctacaggaacaacctcataaatgtttagaaccaagcattttcatgactgccttgtggctttttgtagataacacctgctcatcttcggcttttacttgtgtccacggtggacagtgcatccctggccagtggcgctgtgacaaacagaatgactgtctagatggcagtgatgagcaaaactgccccactcgttcaccgtcgtctacttgcccgcccacctccttcacctgcgacaatcacatgtgtatccccaaagagtgggtctgtgacacagacaatgattgttcggatggatcagatgaaaagaactgtcgtgagtgttgagctgacttctctgggttggttagccttgtatgcatgtaggtttgagtagcctctaagactaaggttttttcctctaagactctcacacagttcgatccttgtcaacctctgaatatcagtagtctgagacatgtggagagtttttcctaaaggtactgagctttatcacagcacaacacagctgtcagacatccagatagaaaccgtaaacaaaggaaaatgaacaaaggacctgagctggatgcagtggtgcacatctgttgtccctgctcactgttgctctaaaggaaggggaggactgaggtcgaccaatggaggatgacgtcaacctgtgcgatcagatgcatgtgcacccatgcatgtctctaacatccatttatgatcatgcatatatgctgcacacatgtacgcatgtttttctttttttcaaagcctttaatgaaaaaaaaaaagatttaccttgtaagcatccagacatctggctgtttattttcctttttttcgcccccttccctgtctttcttttttatcttttcatttaatacagagcaaggacataggctctttttatctccctggttcttattctttagcatggttatttgtaacaatggtttaagatggacacagagttctctagactaaattcttatactggttgcaagtcttggcaattcattttccttctggggggagttgggcctttttaatttttgcaatctagcagtgtgattttcactgactttatggaggggataggcagcctgcatgcatgcattggtgcttcttggcatgtggtgagctgaccatgtcactcagattaggtagagtcacagacccgtgagatacatccctgggctgcttcctcgatgaatggcttctgcttccaaagatttaattccaaatcctcactttgggttctcccactgcgctggctttgacgtggccgctggtctgaaggagtctgtacacatagcactgagttaagtctgttaacagaaaataaacttgactttgtttttgtttgccattagaagcttcggggacctgccaccctacccagtttcgctgccctgaccaccggtgtatcagcccactgtatgtctgtgatggggacaaggactgtgttgatggctcggatgaggcaggctgtggtaagtggacagctttgcttttctcttactgtgtgctctgcttatcttggagttaatgtcatacacttctcttcttttgtttccagtgttaaactgcacaagctctcagttcaagtgtgctgacgggagttcttgcattaatagcaggtaccgctgtgatggggtgtacgattgcaaggacaactctgatgaggcgggctgtcgtaagtgccacacacacagtgtacttcagacaaagggatcccttatcttagtattggatattaccatatagtttttttaaattcaaataaagcacaaagtgttcttatgagaataaaagattgacaagaattaataaatattacataatgatttgcatctggtgttatataaatggacatatcaaacagttaattccttagatatcacatcccaaggacatacaaaaatatggttcttaaaattacatttatttgcttgcatgtatttgcgtgcacacttgcggatgcatgcaagtcacagtacatatatggaagtcacaagacaactttgggggagtcagttctttttatccattatgtgaattttaaaccctttcaccattttgccagccttatctagatgcagtttcactgaaatctcagttgggaagccaaattgtggactagaaatggtataggcctatatgggatcgattcattcattcaagctgtaggtttgtccatagagagattataaaagggctatggtaactgaagcagatagctttgtatgcgactcaggtaaacttctatgaagggttagaaagcgaataaactccttctaattccaagatctaaggagaactccatgtaattctgatggatcctgctctgtcatagtcccagactagggactatgatatgatttttcatctgcttgaacagtgacattttagacaatcccaaggaataagaaaggaagtatgtaaattcattaatgggggaggggagaaacaggatgaatttctgacttgtacttttacacaagagtgcatagcttgttgttggatccactgatctcctgtaaatatgtccatgtaccacaatgtacaggaatttagtattggatccattttaatcattattataagcctactgtttgtccagaataaattcctgaatctatatcccaataggatcatacattcaaccacaagtgtgttactcacgtgcctttgttccctctagcgaccaggcctcctggtatgtgccacccagatgagtttcagtgccagggagatggtacctgcatccctaacacctgggagtgtgatgggcacccggactgtatccagggctcggatgaacacaacggctgtgttcctaagacctgctccccgtctcatttcctctgtgacaatggaaactgcatctacaactcgtgggtctgtgatggggacaatgattgcagggacatgagtgatgagaaggactgtcctacccagccttttcactgtcctagctcacagtggcagtgcccaggctacagcatctgtgtcaatctgagcgccctgtgtgacggcgtctttgactgtcccaatgggaccgatgagtccccgctttgcagtaagttccctgatcacagtttgctggacacaaatttattctgaacagtagatggctgtaccccagcactgtcacagaccccatatagtattttgggaaggggatttttagttcctctgtgactttatatccctgtaggagtaactataaattccaataaatgatgactgcataacacttctcattaatatctctttacttgtgtctgtggcttctcttctctttatgtcactgttcaggatatcatatcaaatcaagtataactctcttagtaatgtgtccataaactttactaacttgaagattttctaattttaatcggaacttgtcatagaaccgatgaaacccagggggttgtgtttgcagtgattaaaatgctccgattggcatgtaatcctaactactgtcctctctctctttcctctttattaacgctcactctcagatgaaccacagcaaggtatgactgtgaatattctagacctttatgatttcacatgtgtcatgtgtatgctgacacggtactaattactgtgacctccccttctagtgcgtgttctgtgttttggctctttacccataagttacggtgctcctggcaatagggagtatttcatacccagtatatgacctggctttgggctgcttctgccattgccacgatggccctaagagtaaggaatgatgggtgtgtttagcaaattgtgtcctctccagttgatcacttccagcttttcctgcaaaacatttctagttaggctggagaagttcagagggagcacattagatttctctgcttcatcggtgacagtttggtttcttgatgccagcattaatctctcaaggttctctaacagccataaatggagctatatgggagggtggttgtatcctatagcttcaggcaattcagagaagacaagttgaacagctcacccaagagattggggctcttaattaactctcattaaagtaggcatgtaactacattggagtgagtaaaaaaagcaaggatgtctgacttttcaccccgtgactctttcctgtagatcaagacagctgcttacattttaatggtggctgtactcaccggtgcatacaagggccctttggagccacctgcgtgtgtccaataggataccaacttgccaatgataccaagacctgtgaagatgtaaatgagtgtgatattccaggcttttgcagccagcactgtgtcaacatgagagggtccttccggtgcgcttgtgacccagaatatacattggaaagtgatgggcggacttgcaaagtcacaggtaattattaagcttgaaagggaactaactccaggaaatttaatagcctctctcagtgtaagactgattgtctagtcagtctgactagacaacttattcaatgccttttgacccatatgaaagtgaatacgctagatatcagaatgttgattcagccgctctcaaaatgattcaacagaggagggtttgaaagtttcctgattgcaggacaccatggtttatgccttttatcccagcacttgggaggtagcaccagattaattagcctgggctttatagtgagttcaaggccagcctaggctacaaaaataccaaagctttgcttcaagaataccaatgtcaaacaaggagcctttcttttcaaggaggctggatgaaacagtctaagggacagactgttttttaaaaaaaatatttaattatttattttacatacatgagtacactgtacactgtacactgtacagatggttgtgagccttcatgtggtgttgttgcgaattgaattttaggacctctgcttgctctggtcaacccactcactctagtcgactttgctctctcagtccctgctcgcttagtcccaaagatttatttattattatacataagtacactgtagctatcttcagatgtcccagaagagggcatcacatctcattatggatggttgtaagccaccatgttgctgcttggatttgaactcagggccttcctaagagcagtcagtattcttacccgatgagccatctccccagcccaacagactgattcttattatctgaagttccacccaagatccaagaagtttgctctagtctgttctttcccttagaaaataggctaggcaaagaaaggtccttttcaggaagtagatccatcattgttattgatgcattattggtcagaactcagtcatttggttctagcagctgcagggaaggcagagaccagtctctatttgagtagccttaggccaacctaaatgtagtgtgacttaacactaaaaagaccagggggaaaggaatattcattgatggaactctctgctacacctaaaggtttgggagaaaacaaaaatactcaaaacttggttcctgccaagaatcaagcctacagtctgctaagatagaaagcaaattgcaacaagcaagtcaaggatcaatgtatgaacagctcactccatactggtacttagatgcccactgcaataatccaagagagaaagctttttcagaacataactattttacgtgccaatgagtatccatgagcaaacaaggttcccctgatcccgcttagctctgatgaggtcagggatgttcagggtgatatgtctgtagacaacgtgattatttctcccatttctctagtttggtaccacgcacttgatgttggggagactttaaaactgtatttaattgtatttttctttcagattcattgacggtttctttttctttttttcctttccctacacagcatctgaaaatctgctgttagttgtagccagtcgtgacaaaatcattatggacaatatcactgcccacacgcacaacatctattctttggtccaggatgtttcttttgtggttgctctggattttgattcagtcactggtcgtgtcttttggagtgacttattggagggtaaaacctggagtgcctttcaaaacggaaccgacaagagagtggtaagtgctattctctatctacggtcctttcatattttctgttgttgctcaccaagagaaggtcttgccctccctcgtcctgggcagcacatcatattcaagaggtctggatgttcctgcgtgtgtgtgtgtgtgtgtgtgtgtgtgtgtgtgtgtgtgtgtgtgctctcccagactctccatgagtctgaattctatgctatgtaatgcagatactttgtgaatctttcataggtcagagagagagactcaaggaattgctttactgagctttaattgacttaaaattttccacacatctctctgagtttgtttggtgaattagttttttattttatgtgtcggagtgcatgccacatgtgtgtgtgtggtttctagtagaggccagaagatgatgtttggttcccagtcataagctgccccgtgagtgccaggaaacaaacttgggttctctgcaagggccttttaattacagagccatctcttcagccccctaagtttgtttattaatttttaatagataaagcggttactcattggtagagccccttggcaagtgtaaaagcttttaaaatcacaatgaaacctgctgctaatacagccatctcacattatttaatgctatgaatgctttttatatttatccctaaaagcactgctgttggcttgctggttagttacacttattctttctaatgttaacatcttatcctttcgtctgtaggtccatgacagtggtctctctttgacagaaatgattgcagtagactggataggtcgcaacatttactggacagactatactcttgaaacaatcgaagtctctaaaattgatggaagtcacaggacagtactgatcagcaaaaatgtcacaaaacctaggggactcgcattagatcctagaatggggtaagagagacatttactaggtattgaatacatgcaggtattgaatatatggtaggtttctaattaatgcatgtaataataatgtcccttagagccacacttagctgtggttttgatacaacaaaatgctgtttctgcttacagttcatgttatttcctagatattccctttaagctgtatgaggaagagacatttgcctgataggtgtaagaagaaaaaagaaattcatgaatttcagaacctttgaaaaaatttcctagattttaagtaaattctgtaagttagactgtttacttttttttttttttttttttttttttttgattttttttgagacagggtttctctgtgcagtcctggctgtcctggaactcactctgtagaccaggctagaactcagaaatctgcctgcttctgcctcccaagtgctgggattataggcgatctataggatgaattagacagtttatgttcaatatcatgctgacttccccgagttactacacaccagattcagagataacgaaatctctgaagatggagaagtcaactcactacttacaattggtagggtaacaaattgcttgtggattgttggcattggggcatgtccatgccataatgtaatgcatgctttatgcacattataaagacatccagatggcctgcggttgcattatgatcacaggaagtaatgacccacgtgttgcattatattaagtgggcattacctttcctgtgtatgtcccctctctttacagtgacaatgtaatgttttggtctgactggggtcatcaccctcgcattgagcgggccagcatggatggcaccatgcgcacagtcattgtccaggaaaagatatactggccctgtggcttaagtattgactaccccaatcgcctcatctacttcatggatgcctatcttgattacattgaattctgtgattatgatggacagaaccgaaggcaggtcattgctagcgatttggtaagtttgttataattaagttcaaatttaaatcaaagtggaaatcagtatcaagagaattgagagcacatatatacaatgagagagagagagagagagagagagagagagagagagagagagagagagagagagagatcagggaagaaaatcagtgagatatcatcggccttctgttactaacaagaaaattaagatatttattccactcagtcatatctcccatgccttgtaaaagattaatgtgacttcagagatctgtggatgccattcttttgcttatatatcttttaaaatcatggtctagtaaaagtgaataaactagactcatatttgtgaatgaaaccagaacctattatgtgtttagcattttttctttttatttagtagattctatttaagttttacaaattggccaatgtacgaaatatacatagttttccaaagagtttagtttctgtgacttgaggaagcccaagaggagccttctttatggtctttgggggtaatatacacctttggtataacagattgagaggcagaaacagctctggaacaatttccattttaaaaatcgataccctagagtgccactcctagagtagaggcacttgtattagctacttcctggcatctccagtatctaactggaatttaaggagagtctgggtgtggtctcactctggttctgcttcccaggttctccaccatccgcacgctcttactctgtttgaagactctgtgttctggactgaccgcggcactcaccaggtcatgcaggccaacaagtggcacgggaggaaccaatctgttgtaatgtacagcgttccccaaccgctcggaataattgccatccatccctccaggcaaccatcttgtaagtgactaaagcagcctgcctggggaccgcatagccacttcctcttctggacatgctagtgcacaggcaatacatttcccttccacagaccactaccccatgcttctcctggcccctgcattgctctgtcttttatttactacaagaaaattggtcttttgtaagtggcgacagcatatctatcttcattatgtcgttccatccagcaatcagctctgtgacctttttatgctgccagttgttgggcctcattatgatgctgctgctcccttgtaggcgttcctctgtggccagcacaagtcaccttcatgcatggggtatgggtggacggatgatgtaaagatttgtcctcggtggtgatctttctgttgggagggcgaacacttaaacccttccataatcttctctcctcaaatctctccagtggtgtctcacagtctggccctgtttcttctgtggcttacattcaccacgctggactacatcatggtccagtgacgcaccaggcgagttcttggctttgaccttttactttcttgctttgtcttgaacatctgtcttctgtctctgttgcaatgactgccttgtgtcatttagggctctgctcaaatgtcgctttctcagagaggctgttcttaaccaccctgccccaaacgaccaccatgttccccatatccgcttatcctcatgttctgcaattgctacgcccaacgtgaacttagttctgttacctttctacaacgtacactctgtttaccctcagtgtgtagaatggtgtttggtacctagcagatgcttaatatttttttttgtgagagaaagaacgggttacctcgcatgctgtaagtagaagaaatgggttctagaagcacctgcgagcctagatggcacagagtcctcttttcaagggctggcacaggcaaggatgtggaacaactgaagattgctatctaaggaaaacttggatattgccggataagcatcaaggtcacacgaaagacgtatagcctgctttcatttcgtgaaagaagatagcttttaggtctggcaaagagacattgtatttatatcatgagtcctagataattcagtgactggtcataatctggttacagattgggttaacccaggactttgtgaaagccaaccctttctcttttgccccttagctaaggtaactgcaagcattcccctttgcaacaataggagctgtgggtaggaccatgaccttgctcactgtactgtaggcgattttgcattcaaacctgcctttctttctcccacagccccgaatccatgtgcctctgccacttgcagccatctttgcctgctttctgcacaggagcctagacattactcttgtgcttgtccctcagggtggaacctttctgatgattctgtcaactgtgtgagaggtaagggtgctctgatgataggacgtgtcacagtctgtgctaggctgtggaaacccaaaacccatttgtaactcaatctgagcatggtgtcttgcacgttgttcagtgggtatactccaaggggtgattttcactgagtgcctcagttgtcacataggttgtctatggagtgttgttaaacaacctttaacctcccgcttactcacacctgaccttcctgataagcaactttccgattctgcatttaaaaggtagacagcttaaacattttcaggtccatttcattttttaaaattctcataaaagtagtcaataatgaatgatctgtcgtaggtctgatggctccaacttcagtattgttattattattagtatcatccgataccttagcaatataagctctatctctgtgagaaatattacaagtggctatttgagcaatttaatcgtcgttatcttaacaggttgattgaagggtatgtgaggtatgatgtcaggtgctttggagattgctaagagaagatgaatggctccttcagagtgtgtacttgtgcacacctcttttaaaaaaccaccctccattgcttagaaacagacaaagtgactctgaacctattcctttctcattgaagaggagtgaatgtattttgaaactgatacaaattactagagatagcttgaaaccaaatagttaattttaacatatttctaaattaaaagtacaaatctatgggaaacctggggtttttcaaatgggaaataatagatatggatctagggcatttatagtgtttacaggctatgcaggtgaggttacttaagatgaagccccatccagacatgtgacgttgtgcagtgataatttcatgatgaaaggttttaattattggtaatagttacaacagggattgccattttctacttttcttcagagatttattacattactaatccttgctgacattctttaatttagtatgtccttgagtctttcagagaagattaatctgagcatagatattttaaatacaaagaattctttcaccagacaaagattatcagctgctcattggggactgatatcatccatactactaatgataatatttttgggggggggttcaagtcggggtttctctatatagctctggcattcactatctaggacaagctggccctgaactcatagatacctgcctgcctctgcctcctgagtgtgggtattaaatgtatgtgccactactgccagactctgatagtgattctaaagggcatcacttatcatttcacaagaaattcccctgtggttttcccatggcttgcctatggtagtggtctttagtattttctaattggtttctgaagtgtagcctgactgtcaatatatgcttattaggaaaagcagtcagtttgaagtgtttggaagttggtctggagttgtcagcttgggcagtgcgtgcttgtgtagggccttgggtttaatctcagcattgctaaaacaaaaaccaagctgacaatttaaaattctggaagaaggcataagtaagcctccataaaccaatggtggttattgatggtatgggaattattattattgtgtgtttgtgtgcatacgtgacttgtgtgcctgagcacatacatgctactgtgtgtagatgtcagaggactactacagagtcagctgtttcttcccagtgggggtttgagagttcgaatttagcacttttacccactgcgccaacttattggacttgcttttcctaatttcatagagtgaaattagaatgagaactttcgccaggtgtggtgtcgcacgccgttaatcccagcacttgggaggcagaagcaggcggatttctgagtttgaggccagcctggtctacaaagtgagctccaggacagctgagaactattttacatttgtgtaggaaatatacttcccacaatgaccaaaccaagtagatggactctagctacacactcagataggtttctgactcaggagttataaatgcaatctggggtgtttgtgtcatcgctagttatctggaggaacttttgaaggtagtatatagtctcttgtgtgaattctattcatttagttatgtggttattattaactgtgtacacagagacacacacacacacacacacacatggacatacacggacatacacacacagagacacagacacacacacacacaaacacacaactcatggtctcctgcaagcaagacaagcacactctctgacttagctacttctccatcccctgactacagatacttatttgggcaaatctttgatttcaggctttcttcctatcaagctttagctttacagtagtgataaaatgaaacacaatagtaattgtgctactttgtgaattagaatctagtaaggaaggcataaactaactaaatgatatctgagaagcaggaggcaagttactcttcaccaagtgattgttcatcccctcaacccccaccttccctgcagatcgactctcaatggttaaggttgtctatgggagggtgaagaactttcggactcagatcctgatagtttgtcaccgtgaatgaggagacagagatcgttccccactgcaggcctgtggttactcaagacacctctgttgtgtgtgtagttattgctgcagtgctgtgatatcactttgactgctgtttttacaggcgatcaacctttcttgatatccgtaagagaaaatgtaatttttggaatttcccttgatcctgaggtgaagagcaacgatgccatggtccccatatcggggatacagcatggttatgatgttgaatttgatgactcagagcagttcatctattgggttgagaatccagtaagttttggatgcgttcaatgtgtgtgatcattatttaagacaaagttccctcagggaattccagcaaggtgtttagtggagctcctgggggactttggattagaatccttgcttggggcaagtgcttctccagtacccttctgcttgagattcttcccttcttcatggaagcaatctgccacagtgggaaaaaaagccaggagaaaggaaaaagaggatgaagaactcttagtgtttgctgtctgttttgcttcgtgacttctgagccactttagaatgtgcttttaatttttatttttgagactctgtacagtgagttttttttcctgacaggtcaggtactcatctttgctcgtccttcccccccaccccccatccccacgtgtgaggagcattaagaaaacactggcagccagcagaggctgtcgggagagaagaggagggcttctgtataggggctgggctgtgtctgcgtctcagattagctcaccaccctcgtttttctttccagggtgaaattcacagagtgaagaccgatggcagcaacaggacagcgtttgctcctctgtctctgctggggtcttctttgggcctggccttagactgggtatcaagaaacatttattataccactcctgcaagtcggtccattgaggtaatgcttctgttattatgtaggttcacacattgctgttagattcctataggatatgttctcaggcatgatggctcctgtaaccaggaggtttaggcaggaggactgctaatgatttaataaataataataataataataaattaatagaacatcctattattctatgttgtttcttaccaatgatcaattccattgtaccctataaaggattctaagaaagctaattaagatcatagaagctgggcagtggtggtgcatgcctttactctcagcacttgagaggcagaatcaggcaaatttctgagtttgaagctagcctggtctacagagtgagttccaggacagccagggttatacagagaaaccctgtcttgaaaccctgccccgcccccaaaaaaaggatcatagaagaaatactatgtcagttatcaaccaagtttataactacctctcttcccagataagaatcactttatggcttctagatagtttttctagcagtgaaagacagaatagaagaatagaaacttgattctaattcctttcctctttgagataagtgctctctatatctcagctcccagaagaaattctagacgcagggtaggattgaaatcacatgaagtaagcccataccaccagcattggttttctccactctggaacaagaggaacatgtataggaatattaattcatgctggttttgaaagtgagaagggttttatgagagggatagtcagtaaaccttatcattgacatgtagccggtcagtagttagctctttggtttgtttggtcagagtcagattggtgagagtacaggccacagtggaacagtccttcatagtttacaagttcacgatgatctgatggctagtgattcacaacgactgagacatttacagtaggcacacatgccaatctgtggaatatctcaaggcaaatggaatcgactggcatgatgggattcttcatgaaggcccatctggtacaaacattttgcacaagtaactgagggtcagagaagtcaagaaattctgggtttcaatgacaggaatgaacgcagagacctagacctttctaactccatttgacagtgtcagaaggaacctctcataatctggagttcatcaacatgacgtgttactgagaatcacattgctaagccagagggcctcatagaaaagtgaatgctctctttctgggactttgttgattgctttaaacttcgcaaaggctttgagtaggtgtccagcagcaagaggtaaaatgagcagcctcggggaaccaccgagcacgcatatgtgtgcatcaagtgatgaggccacttgaactgcagaaagttacctcatttataatctgcaaccctataggtggaacaacaatatgaactaaccagtacccccagagttcatgtctctagctgcatatgtagcagaagatggcctagtcggccatcactgagaagagaggccccttggtattgcaaactttatatgccccagtacaggggaatgccagggccaagaagcgggagtgggtgggtaggggagcagggcggagggagggtatagggaacttttgggatagcatttgaaatgtatataaagaaaatatgtaataaaaaaagtaattgagctttcagtggggcatgatacagtggggaaaatccaggtcagcctggccttgtacctattttacttgcatattttattcatttagcagacattagtaaatgttttctatggattggtagcctggttggtactggatattcaaagataagcaaaacatttttttttccttttaagtagctcacatatgaaccaatactttttttttccagcatggtaagaacaataaatgtaaaatgctatttagcagtgaggtccagtggaaagcttgctaattcctattcaaatcgaccctggtaggtgacacatacctatttctagaaaaacagtcaagtatggaaaagggagagggattgaaaccctgtgaaaaaagaacaaaactaaactaagacaaaatatgtgttatggatagagacagcaatgataacctccagtcatgaactgtttgacattggacaaatgacttcttgactttgctcaataagtaaaagggagcaaattatcactgtattcaaaatgggagattacccatccaaagatctgtattggttcccctcttaggtaatataaatttaaagtattttgtgatgaacgcatagaaagcaggcagaatgcttgcttatcggtattgttcccgcatgggtgaaacacactttgttccatgttgaaaataggagtgggtgctcaagaacctgcttgccactaggggtagctgcatgcttagtcactgagaaaatgcatggtttaaaagtgaagtctacaggtggctgtgtgagagaacttgaggtaggatagaagaagccaaggagaaaggacttaatgtgacccaagaagaccgttaggtccagaaaaggtaggagattgtaacagaaagaggcaacttgaaatgagaaaggttactgtagttcaggcaggaattagagacactagacagggtgcaaaatgaaaaagaaatgtagcatctacaagcttgcatttgtgtgcttgtgtgtgtgtgcttgtgtttgtgtgtgctttgtgtgtgtgtgcttgtgtgtgtgcttgtgtgtgtgtgtggttgagggagggaaagagcgaggtaaacactaacagaagcaatctatatccagtagcaactttacagaccaaccttaagtgtaaaggaacaggataggtagtgaccttgaaggtttactcatcagttggcaagccctttgctgtcagtgcagcacgttgaagccctgttggtagccataagagaatgtcagatcccctggaagtggagttgtaggcacctgcgagccaaaatgtggatgctgagaacttagtccaagggaagagcaaccagtgctctcaaacactgagccatccccccaaccctggttgtgcttttaacattctcttttccactgagatcatttcctcccggctccagagaggaaagaggaagtgggagcagggcaattcaatgagggatcatgggtgtctcacgccatctcaatcctggacatgctttagctttagttttagatcccacctgtctttgtttccatgaaagaagttaagttctaatacatgatttttgcactgcaggtgttgacactccggggagatacgaggtatgggaaaaccctgattaccaatgatggcaccccgcttggtgttggtttcccggttggcatagctgttgatcctgcacgtgggtgagtgacaccaagtgacagtacgttcctgtctgcaccatctctgtcagtgtcctggtcctgttagatgaagtgtcctgttaacatttcaaactgtaggatatgtgacatttgaacaagttagacctcagtgaggaagagcagtcactgtgaagatcggtaactctggattatgttgaatgtgaaagatataggctatatcttcttttagaacaatgtgttctgacttatcagaccttaaaggctgagtagatgggaaattttaccatcctgttttcagtaccattgaaaatggcatgtagcccccataacagaactacagagacagtggcaggacgctggttaaatgttcccctacattgtgttgccctgatctatttcttggttcataaagcactcatctttttgcacggttctaggaaactgtattggtcagaccacgggacggacagtggggttcctgccaagattgcaagtgctaacatggatggaacatctttaaaaattctcttcactgggaacatggaacatctggaggttgtcaccctggacatccaggagcaaaagctctactgggcggtcaccagcagaggcgtggtacgagcggctttagttttcacgatctgtagtgtgaaggaacggctgtgtggttctgaacgtgctgagttctcagcagcttgaaccatggccttcctgttgccctttctcttgacgatgctcttcttactgtagtcttgtactctattcccctaactatgtgcaacacaaggaaatacagaatgacggttactctttttttcctatcaacctttggtttcaatcgggataagatatcaccagtttccacttcttacctgtcctttcagtgacatttatttaatgtttcagtgatgtcactcttttctttgagaacactctatgttctcccattgcagagtatatacacacacatacacacacacagacacatacaacatacatacacacacactacacagacacacacacacacagacatacataacatacaaacacaaagacagcacacacagacacagacacaaacatacacatacacaacatataaacacagacagcacacacacacacagacacagagacatacacagcatacaaacataacacaatacacacagacacatacaacatacatacacatacacacactacacagacacacacacacacagacatatacaacatacaaacacaaagacagcacacacacagacacagacatacagacacacagacatacacaacatataaacacagacagcacacacacacacacacacacacacacacacacacacacacacacacacagacacagagacatacacagcatacaaacacaacacacacacacacacacacacacacacacacacacacacacacggagactaggaagtgtctcagctcagcagctaaagacatggttaatacacagaaatttcctctgctgataattttaaactccaagatagagctcccttattctgtaatgagtgcactgtaaggttccatttgagacctggcttttgccgtatgcttatatagctgatcttggcaaaggaagcactcagtaatattagtgatgaattagattgtttgtatgttgaacatattctggactctttcaccagtagtggtttcaaattattgactctgatgttagccaaaatgatcatgcagtcgagtcaccagatattagcttcgtttctaataatagtaacaattactcttattagtaatagtatcatgagctacagttctggatagtaaacttagggcacttgctaactctacctaacacaaatgtagagcctctgctctcctaatatccacaatgatggtacctataggcataccttagaacaataaaaatagatcaaacttgcaacacgtgcatgagcaccttgtgtacttggatatgtatgtagcaatgagggggttcttgccacatgggatggtctcatacaagttattactggatctcccctcccttttcttacccatggtgtcctcccgaacctgtgagacctcttgtttccatctaagaaaaatagttctcctgtaatcatccaaggtccttgcttttcatcattactttgtcttatgtccagacttctactgtctcaattctgagccctctggccatgagcgacttggctttcatcctgttattgaattctttttcatgtttttataagaccactgttttttataaaactgcagttaccaatgtgatctttgcccagttgagagccctagcccagagaggcagcttcaaggttcgtctgctctagtcaccggcagcagcctggaagttcatgattctttttcgtctatgtttttagaatgtctgtcatttttggcgtataaccttgtctatgaggtagtgaataatccagtcctgtcagctatgcccaactggattgctgatgcaaagaaagtataaagaaacaggcttttggacccaagttaaaccagttacatctcccacactcctcaaaagcagtctacttgattctttctcaatggacaaaagccattttgacttcacaccatatcatgcttggccaccatgtagtaggactgtcctataattctggggggaacgcatctcctatcctgattaaagaaatcgcaggtaaagatgttacagccaatgtctgtcagctactgcatgatggtgcacgctcagacatttctatgcattcttaaatatactgtgggtgggtgggcgagatagttggctctttgtaagagggaatcagctcatgggctggtactatccatccaagacaaagatgttcgcctgttcagtgaactccagatggacccattccataacaggtctgagaaatctgaaacagagagtgccacagaaatgcaagacaatgttcatttgaacgcattcccttacctcattcactatgaatcagccaggtaacgagaattctgatctttcagattgaaagaggaaatgtggacggtacagagaggatgatcctggtgcaccacctggcccacccgtggggtcttgtggtccacggctccttcctttattattccgatgaacagtatgaggtcattgaaagagttgacaagtcctctgggagtaacaaagtcgtcttcagagataacatcccatacctgaggggtctccgggtttaccaccatcgcagtgagtacttgtcacgtgtgatgtgtagtcacgtgtcttcaccctcacatctagaagcctcttcccacactgtagttcctggtgcatgtttgtacatgtatgcagaattacttgcgagatttgacagttaagtgtctgactcatctgacatctcaaaggccagaattggcttctgagtaaacttactcctattctttcagagtttcagagacagggttcctctgtgtagccctggctgtcctagaactcactctgtagaccaggctggtattgaactcaaagatccacctgctgctgcctctcagtggctgagattaaaagtgtgccccgccactgccggctcttctcctaagttttaactctgaccctgcttttttgcataatagcacttctcagatgttatctgggttttattgtccaggtttcttgtggtaatagaacttccatgaaaggcagttgcgtcttttgttttatttactgatgtatgcctaagataaggaagagtatttgtctatgaattttaagatagaatttttattattagcaggaatacctccatccccccaattaactttagtttattgactcagagtctttgctatcagtaagaccttgaactcacagagatctgctcgcctcagacccccaagcttttatattagcaatttttagtttttagtctctaaccaaagagcaacaatgttgtttatttgctgtttttcctgcatgtgattaaagattttaaatatccttctctcatggttgaaaagcaagagaggcaaaatgccagttataaatttctgccatctttaatccttgtgtgcttttttagggaaggaaacacaacacaacacaatacaacactgctccatcttctaactgccatacactgtttcctcccattactagttaggcattcaaataaatccccatctttcagtattgattttagcctgctgatcttgttattacgtgcttcttatttttatactattcagttgactcaatttaaaaaaaatgagctagcctgccaagcacgtaagattaaagactgattttcaaattcttttagatgctgctgactcttccaatggctgtagcaacaacccaaatgcttgccagcagatctgcctgcccgtaccaggcggaatgttctcctgcgcctgtgccagtgggttcaagctcagccccgatggtcgctcctgttctccatataactctttcatagtcgtttccatgctgcctgcagttagaggctttagcttggagttgtctgatcactcagaggccatggtgccagtggctggccaaggtaagggaactcctaaataggtaaactttgcttctgtccggtgtcagctccagcttcattttatcagactgttctgaagggcagtcaaactcagagctgagccaagtcctatccctggagtttgctcacttggaactctgggtcatggctagaggatctgtattcctcatggaaccagattttgttggtttatgagaaccacaggcccagggagacagaaagcataagcatggatttttcttgaagtattgaagaatgcttgtttaggaaaactgttctgtagcgaggtgtacgcttgttatatataacatataataaaataatccacaaatattatttttttggggggtgtgtgtaaagtctcactatgtagctttggctggcctgaaacccaggctattcttgaattcagagtcctcacctgtctctgcctcccaactgtttgaattaaaggcatgtgccaccacacttgattcttaataactatatttttacagcagttatgtttgtgtactgtgaatctgtaaatatgtcttttggatatgccaaggtgtgtggctagaactttctagagttttctagtaccataaggactatgtgagactatccttgcaaggatacctgttttagaaaatcaaggcttggtggtgcttatagaacagtgcttgctccgtggtagcattaagggccatggatttgttcctcagcatcacaaggccaagccaaaccaacgagaaaaaggaaacaaactcagaagaaataaaccttgacagggagtattatgttctcgatatgggatctttttagagtatcttgtcagtaatttagctaaggtgttcacagtcagtcactgctttgtaaagaggcatttccttgggctatctattacgtttgacttgggccccagaagaacttgttccctaagctaccattgactttggcagtcaatggtgactactcatcactggtgatcctgcctgaagtgatcatacacgatcatcttgttctgtcgttctttcacatttattactaatattctgcacctatgaaatctcaacaccagctgacatgtcagtgtggacagtgggcatctcacacacaaggccacttccctagatgaagaactgcttgaagagagaatcagccttcccagggatgagcctggctaactgctcatccaacactgagccgtcagtgcgtatggacaacactcagcagactcagccccttgtagttacatatgtacatgtatgtatacatgcaatagtaagaaaggaaaagacatagaagcacatgaaaatagaatgagaacttagaagcagacgacagggaacagtagtgaggagcaggatgttgataacaggggtgcaaagttacaatggggcacgcaagtctgcatcatttaccagtgctaacagaaaggggaaggaggtaccagatcacttggctgatttttcttaaacgttctaggacgaaatgttctgcatgcggacgtggatgttgccaatggctttatttactggtgtgattttagcagctctgtgagatcctctaacggaattcgtagaatcaaacccaacgggtctaattttaccaacattgttacctacggcatcggggcgaatggaatccggggtgtggcagtggattgggtagcaggtatgtggtcctgtgcctttgtttttccatctctgtcatctgaattgctttttctagataaccaataagatcatttaagactaggctactcactcactaaatcaaaagatgggatgttttgtttgacagattaattatggaagaatcatttcgttttcgtctacttgttcaatcaagcaggaaaaaatattaaattgtgggtttgtagtttttgtcctaaggttgacagaaaattagattagaaagatccaaaaagggggctggtgagatggctcagtgggtaagagcagtgactgttcttccaaaggtcctgagttcaaatcccagcaaccacatggtggttcacaaccacccataatgagatctgatgccctcttctggtgcatctgaagacagctacagtgtacttatagtaataaataaaactttgggtctgagcaagcagggccgactggagtgagcaggggttctaaaattcaatacccaattacatgtaggctcacaaccatctgtacagctacagtgtactcacatacataaaataaatctttaaaaaaatgtgaagaggaaaggcgttcacctactttaatgtcaagcagtgcagttctagttgcagattcttaatgcaacttagttgcttcctcattaatgcatacaaaaatcatcgggtgtttctcttggttactagtatgcccaactcactattttgttaacttattcaggtttgagttatcactcattcctatgcttggagaactactacactacaagttttgtgaatatatttttaatcaaaatggatatcattgtatattattgagcttgataagcagacagtgcttaaatataagcatgcattgtaagtagtaaatctagtaagttagctaaataagattttaatggattcccaattcccaccctgaggtgcactgtttctgatggtgtgcataaatagggtcagtatggcagggccagaaggacaagtgtagcctattttctctttcataccattttactgtgacacacttacggtcattcatttgtggttttcagtggctgttgtcacgtcacaatgtcagagttaaacacttgaaggagaaaccacttatttttggctgtgtgtgttggcctatgcctgtaatctcagtgccagggagagaaggcaggagtatcagaaaagagttaaaggcatcctcagttacatagtgagctcaactcaagccagagattcaggaaaccccactcagcaagcaagcaagcaagcaagcaagcaagcaagcaagcaagcaagcaagcaagcaaacaaacaaacaaacaaggaatcaaaccccacaagcctaaaataccacctggtactattcgacaaccctggattaaagtagtacacagtatcacaccagcatcccatcactagagatgcaacgtatagaaacatcagttacatatttcacattggaataatttctctggctattttttgaggcaggctgggaaataatatgtgcatagtattgatagttcaataactgacttgacatggatcagtaattgaggatccagcagcttccactcataccacaaatccattttatagtacttcacgtgattggtatgttattctcgaatttacgttatactttaacacaaaagggaagtggattttgggtttggtggctatttataaagtcaatggataaaaaccatgtacactagttaggaagacttaggaaagatcacattaaccttacatacaaagagcatttgaggatatgtctagcaatctgaggtggttatggctgtcttctctgctcttttaggctctaattaataagctttataccatgataaagtatatttaggctctttggtaagaatgttaaagactcatgttttaagtagaagaagaaaagtacacattttagtaggaagtgggttgtaatgctagctgtgaattctaatctgaataagaaggaagctgaagatttttgagaaaatagattttaaaaagtattccctttatgtttatatgtttatttttatatgcttacattgaaatttattgtcttgaaaatacaataaatttgtttatatttggtagttctgttcccagtgtccatctggttgtctttttaaagtttcccatacttgccaatatttctccgatcatatttcaacctcatacattttattacgcatgttttccttcttggtttttcactcatcagcatccttctttttttttccctgtaggaaatctttatttcaccaatgcctttgtgtatgagacactgatagaagtgatacggatcaataccacataccgccgtgtcctcctcaaagtctcagtggatatgcccaggcatatcgttgttgaccccaagcacagatatctcttctgggccgactacgggcagaagccgaagattgaacgctcttttcttgactgtaccaatagaactgtacttgtttctgaaggcattgtcacccctcggggcctggcagtggaccatgacactggctatatttattgggttgatgattccttagatataattgccaggatccatcgtgacggaggagaatcccaagtggttcgttatggcagtcgttacccaactccttatggcatcaccgtctttggagagtcgatcatttgggtggatagaaatttgagaaaagtcttccaagccagcaagcaacctgggaatacagacccaccaacagtgataagagatagtatcaacttgctacgggatgtgaccatctttgatgagcatgtccagcccctctcaccggcagagcttaacaataacccttgtttgcaaagcaatggtgggtgttcccacttttgctttgccttacctgagttgcctacccccaaatgtggatgtgcttttgggactctggaagatgatggcaagaactgtgctacttcccgagaagatttcctcatctattccttaaataattccttgagaagtttacactttgaccctcaagaccataacctgcctttccaagcgataagtgtggaaggaatggccatcgcactggactatgaccgcagaaataatagaatcttcttcacacaaaagttaaaccctatccgtggccagatttcctatgtcaacctgtactcaggggccagctctccaactatcctgctctcaagtaagcgcacaccagggttagggtttaccttggcactagatataaggagggccacataccgaatcgtcttaatgccctttgagattctaacatcttatgagtatgtgtctttctatttgtgtgtatccagatataggggttactgatggcattgcctttgactggataaatagaagaatttattacagtgacttttcaaatcagacaataaattccatggctgaagatggatctaatcgcgctgtgatcgcccgtgtttccaaaccaagagctattgtattagatccttgccgagggtatgccaaggtcttattgatttatctgcttatttgaggatggagtggggactagaaattactttatgggcatagagaataataataatagtgtataaacttgcacagagacagagcttttggtgacttttcctggtctgacttagagcatccatttgggcaatgtagtctgaaaaagaatggaatacttctttacttttatctgtatattgatggttattacaatcaatgaatgtttccactgtaaagagtggaaaggttttaaaaagcttcctggttgtgaattaattatgccttctgtttgactaactaggtacatgtattggactgactggggtaccaatgccaaaattgaaagagccacactgggagggaacttccgggtccccattgtgaacaccagcctggtttggcccaatggactcactctggacctggagaccgaccttctctactgggcggatgctagcctgtaggtgtctctgaatcacatggatgttggacatagaaggacttgcttccatgctatgaaaatctgataaaccagagagattattgcctaaatgtagaattgaagttttaggaactattttatgctctagcttggtctatatcctaaatctatgtctaaatctccacatcactaagtgtaattataattataatggaatcactcaatttctgacgtgtaggcatcagatctgaataatgtgtctgttggtttgggctctctttttctctggcgtgcttctcagcaaattacacttgcaaactcccttttaacataattatgggatatctccaagtagctacattgtagtcatcctgattgaggagttcaagagatgaaaagattttattcattacagttgtttgtctgtatgtttgtttccctgcagatactggccttgtgatgaaatattctgattttttttcttcatactctcatttgaaccatagcaatgatgttctgtgtctttctaagtaaattcctcaaagtaaccaataacagaaaggaaataaattctttttagttttttgctatgtttcacatcaggtcccatgcattaagcaaatacttccttggattgttcctgcttctaatgttagcctggttcggatgaaatgatatatgtaggccattgtatgagcaaataagacttaccatcaccaagaaagagacgtgtcatgtctacactacttgactagccatttgaagcaggcctaaccattataattcttttttctgcttagcaatcgcttttctttctctttgcttcaggcagaaaatagagcgcagtactctcacgggctccaaccgagaagttgtcatcagcactgccttccattcctttggcttaactgtctacggccagtacatttactggacagacttttacaccaaaaaaatctaccgtgctaacaagtacgatgggtcagacctgattgcaatgaccactcgtttgcccacccagcctagtggcatctccacagttgtcaagacccagcagcagcagtgtagcaatccttgtgaccagttcaatggaggatgcagccatatctgtgctccaggtaaggggcggagcaggaagatgaaaacaagtatttagtgacaaggactgtcaccacaatgacaaggacactcggcgagggaggctgcaagggtattacctccaagaagaaaaagaaactgaaattcttgatttcaggttatttatcaagtgtactaagggttatattttgagagcattgtcttgtgggtttctgatctgttctacatggactggctttgtaaaggcagtttaagtggaagcttgttgaagggaaagagtaagatgaaaaaggtttggctttctgactggaataggattccattaacgtaatctttctgtttaggagctattgtttctagtgtgatattttagggtgaaatataaatctcactgaggacagcttcataggaatatgtctttgtgaattcttccatgggagtcattgtgctgtaggtgggcgtcgattgtttttaatagaaaaagagatcagaatatagttgaaaggtagatggtgtcttagttagggttttactgctgggaacagacaccatgaccaaggcaactcttataaggacagcatttaattggggctggcttgatgatgtccattatcatcaaggtgggaacatggcagcatccaggcagacatggtacaggaggagctgagagtcctacatcttcatctgagggctgctagcagaatactcactttcaggaagctaagatgagagtattacaaccgatacccatagtgacacaccctactccagcagggccataccttctaatagtgccacttcctgggatgagtatatacaaaccatcacagatggtgtttcatctcacagatgtcgtaaacgccattctggagaagtctaagaaaggtttctatgctcatggtttttttgcttctctctgtcccaggtccaaacggagctgagtgccagtgtccacacgaaggcagctggtatctggccaacgataacaagtactgtgtggtggacacaggtgcccgctgtaatcagttccagttcacctgccttaatgggcgttgtatctctcaggattggaaatgtgacaatgacaacgactgtggtgatggcagtgatgagctgcccacagtctgtggtgagctgtagtgtttagagctaagatgtctttgtgcgagtgtttggcacaaagcactgtgtatgaatggcttttctgttggagccaaaaagcattcactctgataacccaggctatatttctgtttaatcacctccatatagatgagtaaagtcattagattaaaatcctggcattagcatttctagtctctgtagagcttggaaatattgctcaggtagttcatctttaaaacagtggttaccagagatcctgtaagaagaagggagcaggctgtggagcatgacaatatggcactaagagccccagcgggttactgttatcattttattgcactgtttctgacagtccctgcccagtttttatgtcactggagtgagacacagtgggctttcaaggggatttgtagttgggtatctttctctaacagtgtgcttttgaatgcttttctgcatttgagataaacttgagaagtgagattatggacaaatgaagtgaatttcatggctcacttaaaatgctttctttctttaaaagcactttgcatccagtctgactttcaggcatttctgtcttagaagtgagacaaattttaaccctaggagtgttacaatgttaacgttacaaattgtaactggaaggcatcttctctccctgtcctttcttcctcccagcctttcacacgtgccgatcaacagccttcacttgtgccaatgggcgatgtgtgccataccattatcgctgtgatttctacaatgactgcggggacaacagcgatgaggcaggatgcctattcaggagctgcaacagcaccacagagttcacttgcagcaacgggaggtgtatacctcttagttatgtctgcaatggcataaacaactgccatgacaatgacacctcagatgagaaaaactgccgtaagtgtatctttaaatctttcctttggggtctgtggtcacacaggagatgaaatgtttccataaaatctattgctttctaaaaaaaaaaaaaacctactgtgtgtttgtaatagtcaattaaatgattataaaaatatatctagctaacatttgaattgcttgcttaatttgatggctctgtatatatctgctagattaaaaactcacctcatgaacatgtttctctgccaccctggaaccaacttgggcctctctttaccaccagcagcatgaactgtgctttcctgcacacttagaactgatttggacccttccctgagtctgttaactgagtcgacgctgtagatgatatacttggtagttctgttttaagtgtctatctggttgtctttttaaagctcccatcacttgccagccggacttcgcaaaatgccagactacaaacatttgtgttccccgagctttcttgtgtgatggagacaatgactgtggagatgggagcgacgagaaccccatttactgcggtgagtacgacaaagctttttcgccctctgtgggtccaggggagcgactagggcagcacagaaacatcctagctttgatattgagtctgtaaggagatgtggaaggcagttgctttaagatatgaggagagtggtgggagaagtctcttgcttcaaatatatttttctggaaacctgttagtatccaggcctttaaccctcaatctgtatttgtattatcagcagttattacttctgaatattatggccgtgatcttgagtagcttagttttattgaaacaatttcctctatgaacagaggaaatgaaaaggtctttcttaagtttaataattttgagaataattagtatgaaaaggggtatcttttaaaaattttgccaatttcttgtagctgaatttctcatcacatcctgaggaaaccacaggctatcacaaaaatttgccagagcaggactcaggtacaatattaacagcagcccaaagaaacagaatttggcttacagcataacacagggtagggcaggttggagttactgcttttctaacaagtgtttaccggcaaatccatctggcactattaaggcccaggcaagggagagccttgtagagtagaatggcaagaccccattcaggacaaaaattcattgcaatatttgtgaccacacagtagaagctaacataaagttcacaggtagtcatctctctcatctaccctaacaattctgagttacagtgagtaggtgagaattttgcttacttttgagaattatgattaacaaattgtggtgagggatagaattgagtgtaacattgttttaatagaattcacttaattaaaaaaaccaagccgggcgtgatggcgcacacctttaatcacggcacttgggaggcagaggcaggaggatctcagtgagctggaggccagcctggtcttcatactaagttccaggacaaccagggctaggaactttgtcttgacaaacaaacaaacaaacaaacaaacaaacaaacaagaaaaaaatcaagacttattttgcacagttttacagtacaatgtcattttttgatatgttaaaatctaatcagagttgatagattattgggacagaatcttcatcttttgcctaggttgtccttgaactcagaatgcaaggagcttcctgtctcggacttgttgaacagccaagagtgttcacctgcctgggcgctctttggaatttctagcaaatagaacttacaccttgtatttatggagtcttgaataaaaattcaggagaactgggaaatattcccctcttgtatcttatgcacctgcagccccatagtaacttacagacaaggccttttccccatggcagcaattaaccagttcagagatacaggcagatgggtagcagatgggagtctgttggtgttttaatcttgtgcctgtcctccagcctcacacacatgccgcagcaatgagttccagtgcgtctccccccaccggtgtatcccaagctattggttctgtgatggggaagccgactgtgtggatagctcggatgagcctgacacttgtggtaagagtcagcaaccgtgggaagcttagggtgcagttagagaggccggggctcctcccacacatcaaatgcaggagccacactgctggctacttactctccttgttcctgctcccagaagggatgccagaaccatgcagtaggtgctcatgagcggctagtgcaggcaatgagggcagctggggagaatatgggggctattagttgatgttgatatattgagatggtaatgcatccagtggatcatctggcttgcagctcaattctagctgattctcagttagagtttaggaattttgtctgagccttttaagacagtaggaggatccaagagtgactggattcttcatatagggctcagagcaggcacaccttattttatttctttttctactaatgtttggtaggccctcatcgaggcccatgttccttttttgtattcaaagcttgctttttactgtcacaaatcctcatatgcatcgatgcatattcactgaaattaattgtactcatttccgaggtgcttttttaacccgtcataaaatccttgctatgtagtatctagaaaagtatggttacagactagtgacttgactgtatagatgaatgttgtcacagatcatccatggctactttcttgttttgtgctggaatggcaataccaagtaggcatggcagaccatggagctacaaggccacctcagtattctctactgagttgagaaaagcctactcatccttatgtacattcttcatactcctctttagtgatgtataatattcctaagattggtatattattaagcatttttctcttgtattattgtactatgtaacatcgtatataaaacccttgtctgggttgttcattagtatagttttagaattaaattcatgctagtttccattgagttctatgaagtttaattctatggctgattgctagcagttcttggccaagttttacttttgcttttgtatcctcactgtaacactgataaacgcgtagaaaatcaagggtacctagagtttgagaatctgcagagagaggagataataagtgttaggtaagtttataactttgaaattattctaatgtgttcttgtgtttaaaacctaaaaataagaattttcatagtcatagtagtaacagcaagtagtagttgtggactgcattacacactgtagtaacccaagtgtggccatatatcttataatctgcactttggatcacagtttttccctgagtctctatgcagctcactgtcagccttctctatgtgtctgagacgatgttataccccaccctatactgctgcaccgcagacctatcacatttgtaaaatcatttgtgaaatcatctcaaaggttctgacagccgtaaggtttcatgtattcctgatgtgtatgtgagtaaacttctcactgacataaaccacgcttgaatgtccttgctggagacatcccactcttttcatgagacttcctctcttgtcagggcattctctaaacagctgctcagccaatcagttccactgtgataacggcaggtgcatctcaagtagctgggtctgtgatggtgataatgactgcggagacatgagtgacgaggaccagcgacatcactgtggtaagtgaaggccgataattcctctgtagagtcacattccagggaaactcagagccgattatcatggttggagggcccagttgtcagaaactcctgttgagtgaatgcacactaacagaatgctaccattatttcctgctgttggacaccattgcttacattttaccacgaggcaaagtggccggagctcattctccttcatacctggctaatgggaattctgtagtaggtgacaggaactcagttgctcatttctgacaatggtgtggcagccaatcaccctaggagctgtgatggggttgggtagttgtggtattcatcagtgagttcattactgagtaccactgtttcctcttttttcaaacaacgtattttgatcatattctttccccttcagctcctccccattccaacccacccttaacgaagatgctatgtgcaatggatactctaatggagtgtgagcggctatgtcagtattccacggcaggctccatgcccgagagtagtcagccaatacaaatgaactcaatggaatttttgtgggtttttgtttcattttgcttggttgggactttttgtcttggccttttgtctattgactctttaaattttttgtttcttgtctttttttttttttttttttttttctgtttgagagaaagagaaaacaaagttatgggtttgggaggtgaggaggatccaatagaggagctcagataggggaaggtatgatcaaaatgttgtatggaaaattttcttgagactgtttttttttttttattggtgacattttaattttattcagtcccgttacttcttaaaatttgattgagccaggcagtggtggcacacggctttttttttttttaattacgtattttcctcaatgacatttccaatgctatcccaaaagtcccccataccctcccccccacttccctacccacccactctcatttttttggccctggtgttcccctgtactggggcatataaaatttgtgtgtctgatggacctctctttccagtgatggccaactaggtcatcttttgatacatatgtcgctagagtcaagtgctccggggtactggttagttcataatgttgttgcacctacagggttgcagatctctttagctccttggatactttctctagctcctccatgggggggggggctgtgatccatccaatagctgactgtgagcatccacttatgtgtttgctaggcccctgcctagtctcacaagagacagctatatctgggtccttccagcaaaatcttgctagtgtatgcagtggtgtcagcttttggaagctgattatggggtggatccctagataaggcagtctctagatggtccatccttttgtcgcagctccaaactttgtctctgtaactccttccatgggtgttttgttcccaattctaagaaggggcacagtgtccacactttggtcttcattcttctagagtttcatgcatttggcaaattgtaaatgataggaaatgtggttacttttataacacgagtactacattgtttttattgccagcaaaacctggagttgctacctgaggggctttagttagcattgtgtcacctttccctcttaacatagtaagggcagaggttcctggtgcttgtgtttggtagtgaactcacttgctgtggccagagctctacatctgctctgtcattgatgacttacacgaactattttctcccgttttctcttacgtcttgtttgcgagaggattgaataagacatgaatggttccgaatcagtatctcactttcttccccgttgcctttctggcaactctgacctctcctagcattcctcttcacttgtgtggtgcttgcaatctgtattcaaatctgtatgcctcaactttttagaggagaaaggtctcttccgggtctctgactctgagatgcccagttaaccactgtgaactcagttttctcacacattaaattggcaccaagatagtaatcgcattttgtacgtatatgattatacagtggaatatgaggcatggtgtgagaatataagatatttgttcaatccttcggaagatggaggaaaggattggaggagccagggggatcaaggacaccataagaatccccaagagtcaaacaacctggcctcataggggcttcatagagattgagtggtccatcagggagcctgcatgggtctaacctaggctctctgcatatatgttacagttgtgtagcttggtcttcttgtgggattcttaacagtgggagctgagactatctctgactcttctgtctgcttttgggacccctgaactcctcttgggttggctcatccagctttaatattaagggaggagcccagtcttattgcaacttgatatgacatgtttgactgatatccctgggaggtcttccctgttttgaagggaaatggagaaggagggggtggggagggggagggagagagggagaggagcgagggaaaactgcagttagggtgtgctatatgagagagtaaataaattgtaaaaaggcatttgttcaaattttaaaaatggaagtcatttcctgaagccttatgggaaaaaattttatgtaaatctcacagaagagtaagtagagtctttatgccgaggttttgcttctgtaaaatccagaatcaaacagttgagacaggtctcaagaactctaagagcctttgcgggtgtttatagtcctaccttgcccatatgattagcgagagggttaaagatgataagattgtgaagagagcatttccgggctctgagggattcttgtctgccttggtttcagagcttcagaactgttccagtactgagtttacctgtataaacagcagacctccaaacaggaggtgcattccacaacactgggtctgtgacggcgacgcagactgcgcggatgccctcgacgagctgcagaactgcaccatgagagcgtgctctacgggagagttcagctgtgcaaatggacggtgtatcaggcagtcattcaggtgaactgggattcaaacacatccctctacaccccaaatattcacgggggcggggatgactcacacattaggcacaatggtcacatgatccaggtcagaaaaaagtgttttaatatgtaacatgttaatacacgttttataccgatgtggttatttatgtgtttttatgggtgacgtggtccaagaagatcccagggttcatgaaagccataatgtggccttccacagagaggcagagaaggagttaacttgacattagttggtgtgtctccttgtcttccacttgggggcaggcatggctctaagaactgtttctgtatttgctctctgctataagaagaacagctctgtaagtacacttggctcagggtcaaggcaactaatgctgagtgttaggtgagaaggccaaagcttttgaaaataaggattcctatgtagaatatttaaagttcttgacactgtctcaaacagattccgccccacagtatgctgctttggggaatcttgtgatttcctgtggtgtggtttctcaccgctttctccaaatgggtctcttaaaatgaattttgtttttgtagtgtccagcctcttaccactgtatgtagtaaatttttggctatagaggaataaagggactaatagaagcctcaatcaaaataaagcaacctggaaagaagtttgctgatgggagaaagtactcgatgttgtagacattccttagatgtaggcactaggcatttggttatgtggacctgaaacagaggtacaggacccactcgggggttaaaaagcacaggggctctttcgggcaccaggaactatcaggattccacggctagagtaggagattgaaaggtcagagcagcagaggcctgaggcagatgccccattgatagatattgagataggtctggaatgcaggatggccaagatttttgtatgatggtatcctgaagaggaaaaaacagttatgtgctataaaagttgaaacattgagagtgggtcttagcatgtagtgcagtgaatggcagtgagtaaggacagatgtatcccagaaagtgtatttacagttgttatttgggcagtcaaagtgagtcatctgcctgtctggttaagagttctgttctagtttcagtaagtagtcaattccattgctgttagatgtgaatatctgaaaacccagggctttgttttgattagattgggttgtctctgcctccctctctatggtcccttctacctgactcctgttccccttcctttctaccgtctctctgctcccacaccctgtactttcaggttcttactgactctggtcatttttctctttttctcccttctttttctgctgtcctggcattttcttactcctcatatttcttttttctttctgaatttctcttggcagtgctacagcagaaaaaaaaaaaaaaaaaaaaaaaaaaaaaaccaaagcaaaacaaaagaaaactgttctctggaaacctggactatagggcccagatcctatattatctctgcaacatcagaatcctatatatctaagtaaataaaacctccagcctggcggagtgtgtgctcccccatttgacactgtgggacaaggggataattttcttcttgacacattgtggtggtgcttgctgagactgggttacggcaggagtgctcgctggggtaatgggatgcactcgtgccagaaacctggtgatttgctcgctgtgtaagctagttaaggggggacactagtgtctcagatcatttgggaattatttgattttctggaaaatcaagtgggctaagtctgttttctttgaccaaggatttcttcataaatctatgcttatgccttaggttgaaatcatattggcagtaccctagcttgtggatggcagctctagttagcaggcatggtcagtacacagctgtagaactgactagattcatcttgggtgccttaatacctcatgaccctcagtccttagctcctgggccttcttccatcatttaatgaattatcatatattagcattgtttatatttatcctgaattcttttatatgcatgataacctgtcaccatgatcctgttcagtaagcgtggcttttcatgggatctttgaccatgagtatgactcatggtagatcatgaaactgtgtcttacttaggacctgggaatgataggtatcagagctaagactacaacatgcaaatttgccatcacttaatgataatctgctgcttttaatcttcctattgccataactaactcacatatgaaaaatcccagtagaattatatgaagaggtctgctgacgcaaatattaccccagtggagagatgggtgttttaaaaagacactatccaacaacagttctataggacacagagttcatgctgaagacttgtatacaatgtgtctgtctgcatagttccactgtccataaagctattccatgagttacaagtttatgaatcatgttatttggcctataaaactgtgggtgaatgaatctatgtttacatttattatgcagccaccagcaacaggggaattcatgcagatggccaaatggattgttccagagttgggttaatgcatattttggaggtagagagcgtaaggtacagtaatcttgttaaaatggtctccgtggtcctttgtctcgtaacacaggtgtgataggcgcaacgactgtggggactacagtgatgagaggggctgctcgtacccaccctgccgagatgatcaatttacttgtcagaacgggcaatgtatcactaagctctatgtctgtgatgaggacaatgactgtggagatgggtcggatgaacaggagcacctatgtcacaccccagaacccacgtgcccccctcatcagttccggtgtgacaacgggcactgcatcgagatggggactgtctgtaaccatgtggatgactgctcagacaacagtgatgagaaaggctgtggtgagtacaggagggggaggaactgacctctctattgctgccttatgaacagatagaggtaggttggcataccagggagagcaacattcagggtgtcctttaggagaattactcaacaaggcatgcagaaagaagagagcatggaggttctcccagggtccccagagtgagttcttggcttgcttttcatatttatctttgggagactggaacatttagtctccttttcccactgacaaccaagtgtaaggaggcagctgaagcggatatgaattgtgcccgtttgaatttcacactaccaatgggccatgctctctgtgcagcttactcttgcttgttcttttctgcatggtggcattcctggggggtggggtgggggaatcaaatggtttaaaagcagcccaccactggtaattgagtgttctcactaaatacatttgccaaattgactcaaagtgtgtgtgtgtgtgcacacgtgtgtgcatgtgcagagaaatctagaatgaaaatactatggaaatttgtggaattataatattataagttattccctgaagcacacaaaattatttaagttttcatcaatatttaaaaatatattacattgtaaaatggcatgttttatttagatgacacacatgagtatagtacgataaagtttttaatgaagatagagttccattgctgtttatgtaatattttgtttctgtttttatttcacatatttattaattttgctatttggggactgggactcactttgtagctctggctggcctggaactcactatgtaggtaatggagaactgtctgcctctgcctcctaagtgctgggatttaagacagacaaccatgccctgaccttttctgagaccggatcttactgtgtagttcagtcattccttgtctccttcagtctttcaagtcctggggttacaggctcacactgccatacctggtactctgtaggaaccaaatcctttgtgatacatcactcaattttaatgttcagcttgaaaaggaaagtctctcttacaggcctatttaacatccaaactcacagccagcaggattgctagtaatctagtacacgttattctttttgcaaacaataaaaccagcagatggctagagaatgaattgtttagggttatgtggtaagttaacagttgaagtagatttggttggatcatggttttgcatctgccattcattaagaagtctatattctcctgctttagggtgggcttggccacttgttacagtgtcagtgctgtgagggacctatcttcgggcacatcccaacccatacgacagatgtatataccacactggtagcttgtgattagtcagggcacgagtgtcgcaccactgaagtgggatgtgttacaagtgaacacactagaccacctcttgccttgtttcttcttccgccattttgtgactaagcttactgagaaatgggcacagtagtttgtgactaatgtcccagctacttgggaaattttagctgagtgttcaagactatttctgcttaaaagtactagtcacattaattgttaagatctggggtaaagggttaagctgggtagagtgtgctggatatccctatacctttgtgcaggtgactgaagaaccagtaaaaatctatggctgctattgacacgtattatactgttcatatgcatatatacatgtctatacaatttgagtatttaaacatttcagtcatgctgtaaactttgaaaaggaaatttactttgttgcacagaaattaacagccttcttagatgagagactttaaacttagtttttctccagttttaaatatgtcttatttaaggtagtttgattgtaaaagcttaataaggaattctctaaataatgggaggaaaaagattgagctggggaggaagttgaaaatttactgacttttgaatgatcaatgtggcctctttgaagatcccagtggcctctcccgttatgatttgctaagaactggcaccgtatggtaggggtgttgattttgagtgtaattatgggcctatggctgatattttaggttctctagtaactgtcttttgcctgcaggcattaatgagtgccaggattcttcaatcagtcattgtgaccacaactgtacagataccataaccagtttctactgttcctgtcttcctgggtacaaactcatgtctgacaaacgtacttgcgtggatattgacgagtgcaaggagacaccccagctctgtagccagaagtgtgagaatgtcataggctcctacatttgtaagtgtgcccctggctacatccgtgagccagatgggaagagctgccggcagaatagcaacattgagccctacctcgtcttcagcaaccgttattatataagaaacttaactatagatggcacgtcatactctctgattttgcaaggattgggcaatgttgtggccctggactttgatagagtagaggagaggctgtattggatcgatgcagagaaacaaattatcgagaggatgtttttgaataagacaaaccaggagaccatcataagccacaggttaagacgtgctgaaagtctggctgtagactgggtcagcaggtaagaacacaacctctggtacgggctcttgtttttcttcctggtttggacagtgtttctttgttgtggaccagcatatgcatgtagaagggacactgggttggcagaagtggaccattgtgccttggcttcacagagtttcaggggattctggttccacttacccaatgagccatctttccaaccatggcgatttgtaaaaccattagaaattctgagtttttcagggcaatagggaattgcttcttttagcttaggtatgtagaaccatttgataacctttcctgtttccctgtgtcctcttttgtttgaggaaggtaccatggaacagatgtatgtacgaatcttagggcactgggcatataaacaaagggtccatcatggtaaccactgtctttccattgcagaaaactctattggttggatgccatcctagattgcctgtttgtctctgaccttgaaggtcgacaacgcaaaatgctagcccagcactgtgtggatgcaaacaataccttctgttttgaaaatcccaggggaattgtccttcatcctcaaagagggtatgagtcctctgtaatcttgggccttttctttcatgtatttcatcacttgttcatgtaactacttatggatcaatatcttgctgggatctgtctctgtttttctgcttggtgaatgtgttagtgcaatgagcagcattcatttctcattcaaaggatatctaacagatggactcttgtctttatcttttcatcttctgagtcacatttgagttgtatgcatgggagattgtggtatttctttagtggatccctatatcaaagccactgaaatacacaagggttcattttgaggactgttggtcaccatccttattgttatgaatattttgccaggcctctttcctttctgagacactctgagatgggaacttcatttctttagatggagaacagctgtatcttttggttttggggtctgaactctctgtgcttgctcccataggtatgtctactgggcagattggggtgatcatgcatacattgcaagaattggcatggatggaaccaataagactgtgattatctctaccaagatcgaatggcccaatgccatcaccattgactacaccaatgatctcttgtactgggcagatgctcacctgggttacatcgagtaagtaccttgggggagaaaagatgaactaagtaactaattacaaactaacagggttgtgctttcagaggattcatctcaacaatcgtgtattcatcttccaactggcccgtggactcagaatcactctgagctcccttctcttttctaagacaggagctcatgtatcccatattggcctcaagctttctgtgtggctagggatgacttttagttccttactttactttactacctacaggaagatgcatggagctctatagaaataagcagaaagagaatggttagagtttatggctagtttatggttagttaaggcaggttatcaggagcctgtcaaattgactcagcaattcagagatgttctcttcttgcagaaaacctgggctcatatggaatggctcacaatactctgatacttcatctctaggggatctgatgcctctggcctctgaagacacacacacacacacacacacacacacacacacacacacacatctagaaaactagaatgatgcttatctcaggaaatcaaaagtgctcaatgggcggagccagcataaaacattattaacccataatacctaaaccacagctatgaactggtgattctgtcaatctctgtggctattacagtttttgagtatagcttttaaactttgatgtcatttgccatttctttagagacccaggggtgtagaattttcctgattgatggctttacacactgatcctggaggacatttagaggagaggggttactaacgtgcttttctttctaccaccaggttctctgatttggagggtcaccatcgacacacagtgtatgacggaacactgccccacccctttgctctcaccatttttgaagacactgttttttggacagattggaatacacggacagttgaaaagggaaacaaatatgatggatcagggcgagtcgtgctggtgaacacaacccacaaaccctttgacatccacgtgttacatccataccggcagccgattagtgagtaactggtggactttgggacagttgcttttgggaacatgatttgaaggaactcattgacacttgttaatgttttctttgaaacagcttttgagaactaagaggaattcatttccctacttataaatcacatttatattctgcagtgctgggctagaacccaggtccttgtgcctgtgagatgagcactctgccaacgagctgtgttttaagttcttagttttaggctaggtatgtagctaagggtggccttgaactgacaagtgacctcctcctaagtgaatgacaggtattcccatagctagtattttggtgagaggactgttgtattttaaggtgagttaaatttcaactgattccatccctaagtactttgaaaaataacattctataactctatcagtatgcacctttaacaatcatcccttaataacaaataaaatttagaagaaaattgtagtcattataaaatagttattatatctctgctcatggcagcttggtttgagtcacaaaaatgttattattctcctcttctgagaaaataatggtggagggaagagcatactccactctgagtttttaattctgcttcatgcaattaaagttaattaatcttttcgaaataatgtgggagagatttgaagtatacttttggggacgcagattggcttttcggggtctgctttgttgtaatgtcttgttaaacacatctttttttttctaattttttatgctttaactagctcagtgcctgggcacttctaaacctcctcacagccagcacattctcctctccagcgttcctgacttaacacttaaatatatattttatcttgatgccctgactccttctgggcggctcccttatctttgctcctcaagctgcttctggggctgctttccttcttgttcctacatttctgccattgtgccctcctgttccttcctgacgtggcccatcctattcccttcttctggctgagatcctttctttcctctccccttgtttcttcttccaggaacctagaaatcctctccctctccctctccctctccctctccctctccctctccctctccctctccctctccctctccctctccctctccctctccctctccctctccctctccctctccctctccctctccctctccctctccctctccctctccctctctctctctcttgccattagctgttgactctttattgatcaatcaaaagtcaattggggacagggacctttggcatttggacatgcagagtattcccattttgggggctgaatcaagacaaagcattaaagccaattcccaacatctcaccgtttctgtgtaaatagaaaaaaagactcttctctcagacataaaatgagcataaccctagcaattatgtaaattacaaagtatggtatacaattaacgtcttgcccatcatatttgtcagttagataaagcactataccatctatatacctgagttatgttcctattttagcttgcattactatctgaaaaccatttttttttcaaatctatgtcatctctttcaatgctaaacaactttgattatgagagactataactagtcttcaaccctgtcagaaatatgagaatgaattattacctgaatatgtaggaagcatatagcttccaaacatagcttccaaaacttaaacaaataagagacatctgactacctggacagttccctaatttcttataatgttggagcatctgtcttcagccttgtggcccagaaccatctgacagaccttgaaatgaagcaggaactatgaaggactagtttgttctgtcttggcagagctaaactgtcaactatcctgtgttgtatgtcctttcctggacagtatgttttgtctgaagatgaatagggcagttcttgtccaatggctaccttgccataactggagcaactctatatggaggttttgatgcttaaattcttctttgaagtcgaataaggaagctgtcaggaacagatatgcctcattgtcaaatgatctttagtaatgacataacattaaatgccacagtctgtggctctctgatgtttttgaagactatctatgtaaagtatatctgaactgttaaaccttaactactcttagccatttctatttgagtaatactgaaaatgctttattataattagaacagattctaatataaccatgaggttactatctggcctttaacttgtgttacttaatcatcctacatgctattacagtgtctaatagcagttattagaaggactgagtctaagccttgtatttttaaatgagttgcaaattttgtatcaatataagagatttatatcaatgaaaaccttaattctatatcaatatataaattctggaccaatttttcatcacccctattcagcaggaagaagttgtggagagttgtcattccaatctcttggatttggatgtctggttatggttattttacaaattatagataggttgtcattttaagggataatttaggagtagcataattttgaacagggaggaaatagatgggatggattactaaattcattcttgaacaaagtattgtgtagccataatccttcattggtagaaacctctataatggatgcaaaattgaagttataatttctaacatctgacaaacttagaagtaaagaaaaatgagaactgccaccataatggtattcagtatctctttctggatgttaatagtcttcatttggtcttcctggaacttaagttaatctttgtctctaagggaagaccaaaaaacttaagacactgcacatgcacaggctattcatgcatggctctggcatgcaaacttttgttgttccaatcaatccttaggatgcaggagacttgatgtatgagtgtctgctgggaatcacaactcatatttaaaatctgggatagaatgcaagcagtattatactttattttccctggacttggagaaacatcaaaaccactatctgcattatttaaatgttggcataatgataaaactgacagcattctcttagttaagttggtatgctgctaattggcatttgacactcaaggcaaatgacaacaaatgcgtgctttcttcttctattccatagtgagcaatccctgtgctaccaacaacggtggctgttctcacctgtgcctcatcaaagcaggagggagaggattcacctgcgagtgtcccgatgacttccagaccgttcagcttcgagacaggacactctgtatgcccatgtgctccagcacgcagttcctgtgtggcaacaatgaaaagtgaggctcccgctccccttttcaaattgccttgcctgcccttgggcatacattgaccttcgagactctagagagttggacagagattttcttttctgattttttttttttgagatgaattcttgctgtgtagttcatactggcctacacgtcattctgtagcccatgcaggcctgaaactcacagcaatcctcctgtttcagctttctgaacgctaagagtatgggtttccattaactgagattttggttaactagtttggctcataagtgggatcaaactttctgtctaggtaagatctttcttgagtaaaaggaatttgttatccaaagagataatgaagtagagttgacaaagacttttttccattctgtggactgtctgaagaagaaattgtgccccacccgcccatttctttctatttgttaaagcttgatttttggtccaggatggcttcaataatggagaagacgccatgtgactttaccatctgtcatgtcataaacactcaataatccttagaacctcccagctttccaaaaaaaaaaaaaagtctccctgcattttggtagataatcatgtactttctaaaaatgtaattctatttgtctcctctccaccatcgcttgggattcagcatctaattcacttctccttgtgaacattgctaggtcaatggccctccatgcgtttctacaggttttactctctttgtgcaggtgtatccctatctggtggaaatgtgatggacagaaagactgctctgatggttctgatgaatcagacctgtgtccacaccgcttctgccgtctgggacagttccagtgccgagatggcaactgcacgagcccccaggctttgtgcaatgctcgccaggattgtgccgatggctctgatgaagaccgtgttctctgtggtacgttggcttcctttctatacccttctttgtctgtttctgtagctgattttgtagaagcaacccaaaatctcattcaaaaattttggagaaaagttagggccaaccctgtatgcattctgatagaggatttaaatttgaacctttaaggtcaataataagttatctagatggctggttttcttctatgtgctggttgcagaatcctccttgagctgacattgaaaaggaatctttctttctcttcattttaagtgaagactgtgttttctcttttattaatacggttccccaactacaaactaaaaacagagtgtcaaaagtagcaataatcacaaactttggagacaattaaatgatagaaaacagagttggaaggtgtgtttagcatctggcccccaattctgtgtgaagaaaagggcatgaactcacaagtctgataaaagcctattagttattctaaataagaataagtcttcacgcagtcgtcaatgttaccaggaactaccctagagtgtaaaacccagtgaaaggaagttaaaatggctttctctggaccccacccgtggtgctcccattcttgacagtttcgcaacttgtaaccaaacgccctgtttgcagaacatcaccggtgtgaagccaatgagtggcagtgtgccaacaagcgttgcatccctgagtactggcagtgtgactccgtggacgactgcctggataattcagatgaagacccttcgcactgtgccagccggacctgcaggcccggccagttcaagtgtaacaatggacgctgcatcccgcagagctggaagtgtgacgtagacaatgactgtggagactattccgacgagcccatccatgaatgcagtgagttccctggggtgggcccatgcaaacaaccaaggccagtagacaagcagatggggacgcgtccttctaccccagtgtaagagaaggaaatatcctttcttgtctttccttacaaactctatcactacaacatagagcagagttgagtggtttctatttgtaaccagaccttggccacacctcccatgccaggcactgagctgtccacccatgcagagcacgatagggaacactcacgtgatccatatgggaaacactgaggtcaggaaggtaaggcctctgcattgcaggtaaataaagtgaggctcaggttaagttcatggtcatattaccacagaaccagcattgcaactcaaggattttacttcaaaccaggtacatgccctgccttagtcaggcttttgttgctgtgaagagacactgtgaccatagcagctctcataaggaaagtatttaattggggattgcttacagtttcaggggcacacggcagcatacaggacatggtgcttgagaagtagcttatcgttccatatctggatcctcaggtcgcgggaagagagagtgacactgggccaggcttgaacttctgatgccttaaagcctaccaccatgacacgcttcctctaacaaggccacacctacttcaaggccacacctccttacagtggtactctttatgggcctttgggagtcattttcattcaaactacatatcccttccagtctaaagtacatcacaaccctaatgaatgagactgagataacaaaagaagttagggctctaatgttctgctcattgaacacatcacacctatcacacctaatggaggggtctgtttaatggttacgtggtaattgttagttccaggcaccaagtcctctgtataaccacagtgaggagccttctggtgctgtttccagcaagactggtacttccactctcatttcttgatttcttccttttcagtgactgctgcttacaactgtgacaaccacacagaattcagctgcaaaactaattaccgctgcatcccgcagtgggcagtgtgcaatggttttgacgactgcagggacaacagtgacgagcaaggctgtggtaggaagggctctggggtctggggaggggcaagagaatgtcagtgtcaagcactgctctcataaggatagatgtcccatctctttacctctggaaaggagcttggggtcattggggggacttaattcatgtcatcttaaatgacatctggtcccaaagcagatgagttagagacaatatcattaagatgttaggatccttgctgacaggagtctgatatagagttatttcctctcctgagaggctctgccagtgcctgacaaatacagaagtggatgctcataggccatccattggattgagcacaggatccccaatgaaggagctaaagaaaggacccaaggagctgaaggagtttgcagccccataggaggaacaacaatatgaactaacaagtacccccagagctcctagggactaaaccatcaaccaaaaagtacacatggtgaaactcatggctccagcttcatatgtagtagaggatggcctagttggttatcaatgagaggagaggtccttggtcctgtgaagagtctatgctccattgtatgggaatgctagggccaggaagtaggagtgagtggattggtgagcagggggaggggataggggaagggagttttctgaggggaaaccaggaaagggagtaacatttgaaatgtaaatcaagaaaatatctaataaaaaaaagatgttaggagcatgtttaatttcttccaaatgtacagtccttattcatacatgacatgtctaaacagcttgtctgatctcacagatggtggtaggtacaatatggcacagaagaggtatttccaaatctggatgtattatttcatgaccatcatcttctaagtgtctttgtgactttcctaatcatctagtaggcagctatagtcactctggcaacatggaaaaaatgtaggcaaaaaaagggacaaatttaatggaaattgtcaaaataaagtatatactgtctcttgaaaccaaagcatctgaatgtatagtttagagaggaaaaaaagataatgggttatcttaatgacactagttctaaaaaactaaaggtggcgtaatagaatgttcttatgactccattttaagcctctgaaaaagttttagcatcttgttgccaattaaaaacttgatattatattttacttttagagtagtttctataaaaggtaataatggctagtcacatgcctttctttaatccctgaggcagaggcaggcaaggcagtcaaaagatactcttcctcccgcaaggtaataaatttactttcaaaatagaggatgggttagggttagctaacagaggacatcccagtgtctgggttcttcaagaatatggaaacgtaattctcagactctatcaacatgagacggggaccctagtttacgaagtcttgaccatgattgtgctttgtagaatcggtgccgtgtcacccttctggggatttccggtgtggaaatcaccactgcatccctctccgctggaaatgtgacggcattgatgactgtggagacaactcagatgaggaaagttgtggtgagtgtgcttaggattttgtgaccccatgagctgcagggcctgggatgtctgtctatataattcatccattcctcctcagagggtgggatgtcagtttgttgggcctttttctctgggatacggaagtatatattttcctgaaatgctaatcaggcaagctttgggagaaggtatctgtgaaggggatatttaatcaagtctacaatcaagtctactttggtatgttacacacacacacacacacacacacacacacacacacacacacacacacacacacacacacagagatgatgttttggtagcaggtgtaatgacttagcaatggaacctgaacctgaggggaggaagccagagaacttgattgagcatgccaaactcagtatttagttttgaatgggaaggcatgtttagaaaatacgccccgtcatcatttatcgtcactggctcatggtatgttttcaatttcaagtttctttttaattatatccttttcaactttagttatgtttcagaagtcctcagccttggctagaggcattccagagaatcggggtcttgattacacctagcagtgtcaatcacctaagacttgttacacaagagtgctctaggaggtacttctcagccctgtgggtgtcagaaagaggaaggtcacaagcccaaggcctccttggatcatagtgtgagtttaaggctagcctgagaaacatagtgagaccacatatacacatgatgtctgtgtgtgtgtgcatatatgtatgtatatgtatattatatatgtgtgtatagatctagtccaagaatgtaaaaacagtgttaaaacacttgtccttcatggatgatgtcctaggttcacttcccactactagtacatgagcaaaaagataataaatttcacattgaatactgtcattgggtagcaagagttttgcaaaactctttatggatttgaaattgaggcagttgtttgtatggtgttccccaccccccccttttttttttctggacaaggtctcactatgtagctcaggctgtctttgaattcagtatgtagaccagcctggcctctgcttcccaagtattgggattaaaggctgtgctaccatgtccagcgaggcataagattttgttttagaatgtgactggatcacaggacagaattaggtacccatgggcccaggccagctccccaggtaggattcctggtgcacactgatggcttggtccctctccttttcagttcctcgggagtgcacagagagcgagtttcgatgtgctgatcagcaatgcatcccctctcgatgggtctgtgaccaagaaaatgactgtggagacaactcggatgaacgggactgtggtaactatcagggcacacagaatcttatactgtgatgctgtggagactttgtcaaccagtgttgataagttctttagtgtgcaatgacatagaatttttgtcatgttaaagttccacttaacatgataccatttgcattttccattttttatgtttaacttacaatagtctgatcagagtgataggaagataagaagggtacctgtgaccctgggatagaacacagagccttgggacagacactctaaaactaattaaatggtgggtatgggtgacatcatatacccttgaaactattatttctgaggaggaatttgaggaggaatttaagagctgaggttaccctacagggccataggagtattcatctccgtatgctgaatggagaaattgaattatgagtttgtctattttactgacggtagcgagagttcactatgagtcagccatggggtatggataggaaaggagcagtagcctctgtgagcccagttccatgagctcttccaagacttatgatcttttctcttcagagatgaagacgtgccatcctgaacattttcagtgtacgagtggacactgtgtgcccaaggcgttggcatgcgatgggagagcagactgtctggatgcttctgatgagtccgcttgccgtaagtgcctgctcacttgaggtcctgtgtgtttcagtgcataggaagggcaatttagacccaacccacttcttagtttaaaagcctaagtatgttctcttcagccttctcatgacgttgagtttgcctgagtcattatttcccagtggacttaggatccctagttgtttgtagtggtcgtgcagtagttatctacagtagacttttgatgatgcagctgccgctttctgaagttcagggagacaatcaaagatgatgggaaagacagttttgatacatgtggtaagtggcgattggccagagagacacagtatagtgttctctctgtgatgatttgtgtcactgaaaactgggttcagagaactgtcttgcccttaagacataaacaccccctgtctttttggttttccaagacagggtttctctgtgtaactgtggttgtcctggaactcactctgtagaccaggctggcctcgaactcagagaaccacctgtcactgcctcccgagtgctagtattaagtgtgcgccactacacccggccaaagacatttatatccctttttatagataagccacaacaacagggtaatgaataatgaagagtcacaatagcaggtgttgagggagacccaacttcaggtttctgatggttgtaaacttcgatataggtgctaggaatggaacctgggtgctctggaagagcagcaagaactcttaatctctgagccatctctccagctcccgataaccactattttaaaatctccagagctttttggattcattcctggttaagagctattgatttccataaagtgagtaaaactgtatatgtctatctcattaatgttttgtatgtgtcccctccttaccaacagcgactcgctttcccaatggtacctactgcccagctgccatgttcgaatgtaaaaaccacgtgtgcatccagtcattttggatatgtgatggggaaaatgactgtgtcgacggttctgatgaggagattcacctgtgctgtaagagggcgagggaggggctgaaaggacagttccttgcttggccatatatatcagtgttcattctatgcggcgtgtgagcgtggagggcagatgtgtaatcttgaggcctgattgatgggcaatcaatcctggtgatttcatttagtcctgttgcttcagttctccagctggagcagctggaggttaagagccaagattttaaacatgtaggctgtagcaaacatggaaacccgaagtgcacaggtcctgaggtgggaaggaagaggaggagggggaggaggaggaagaggaggaggaagaagaagaagaagaggcataaattgtagctctcctctccatccttgaagtaccccctccttgtccccttggagctcttgtgtaaaacccgatgatttgatttttgaaaccacttccctttatgtaataattcaggaccattataaatactttttttgtttgtggtgtggacaggccagaatcataacacattttctggcttggtttaagcttacggaggcagaatctgtaagggtgggtttttttttttttttttttttttataagattagaaaagactattgtatgggtatttcatctgcaagtatgtctgtataacgaactatactgaacttaactgaagccagaagagggcatcggatctccgggaactggagttacagatggatgtaagctcccttgtagatgttaggaatggagcttgggtgatctggaacagcaacgagttgtcttaatctctgagcctctgtccatctccccaaaactacgttttaaaagctccagtgctttttagattcgtccccggttaagaactattgattttcaccaagtgaatgaagctgcagttgttttggatcactggtgagaggctagtgtagtaattctcacagtgtctccctcgggctgggaatcactggtggaaaacatgagaaatgtaaatttgcttggcttgggtggcccaggctcctgttcaggaagacaccttccaagcgattcagaagggagttgcagtttcagaagggacccagggacatttctgcctgaaatcttccgatggctcgagtgaagtggctctaattcaacaatgcttccaaagtcctatcacttccattctcttcctgcaccgtcctactcattctctgtgcagagatgggattactgagtgtgatgtcagagttcctctttcagtgactgttgtattttcacaatggccttccagtgctgccctgtgactcaaaatttcagaagcacttaggaagttatttctttctgtaaggcaaaatctgtcatagcaaataaaattaaatgttagagaggtgaggacacacacatacacacacacacatacaccattccacatactcacacaaatgttccatgttctttcctaatgtctgtaccagccattcacagcaaataattcaaatagtagtttccctaacagtattttcaagaatcagccctgggggtcgactcctcctttcctctaaaggagcctaattacaagggtcatcttttgatatctgtctttgatgggaagtccaaataattcaagtcctccatttagaagaacaacacagatttatgagttattcattgaattacatatatggatgtctcagtttcatttgttgttgttgttgcaaaaaaagcaacttgaagacaggttcaggttccagtccacgatggcagggggttcacatcaccaagagcttgaagtaattggttatcgtatacccagagccataagaagagaccaatgagtgtgtgtatgctagtgcttggctcactttcccacttacacaatccattaacactaaccatcatgggagttccctgacatgttggtacatgcagagaggactgtgtctccagtgcctgggtgtgacccttctgttcttcccagctgcataagtcgctgctagacaggatgaaatgaagacttcgtgttatggatatttaaagatcacaatcagaaggacgaaactgtggtctcctggctgtcaggatgactcctatataatctcaatggcttttccaactccatgacttaacacatatgtcctccttgttctgtgccctagccacagagatttttatatagcttcttctgtatgtaaagtctgttcctgtccgactcaagttccatgagtataaagactgtgtctctcttgcacctctctatatctaggatctacctagcacttgcaacagtgatgtaatgtgtatctgagactcaggacatgtttgttgattaattgaatgagcaagtgaatgaatgaatgagtgatgagtgaatgaagtgagcctggcactgggatagcctggaggttttagacattgtcacttctacttttaatttggagcttccttttttatttcccagtcaatgttccatgtgagtcaccacagcgtttccggtgtgataacagtcgctgtatttatggccaccagctgtgcaatggtgtggatgactgtggagatggaagcgatgagaaagaagaacactgtaagcagaatgggaaaaggagaaggcagaaaccagggtccttagctgtttgtgagatcttcctcggggtttccaatggtcctggagaggcttgctttgtgcctgtagtggtgaatcacagacagtgtgaactcgtacattgctcacacaccagcctgccctatccttcctatctcccctgaggaagatgttgatgactctttgcttaggctaagtttaaataagatactttcatgctttttagaaaaatgagagaaaagaccaactgcttgagtcatactccacaaagttaattgtatttgttgtcaaggatgaggacttcacaacctacagtcgctaattgctaatctggcatgtgaatgtatatttcttctaatgctcagctgaaaagatcatgttaaataaggtgcctccgtgttaacatagctaacccggtatccttcttggatgtggaaatccattttgcagaggagaaaaatgaagtgatatctttaaaaagtatattattttactatttttttatgtatttgggtatcttgcctgcatgtatgcctgcatctcatgtatccctggtgcccaacccaagactagaagagggtatcaggtcacctagaactggagttagagttgtgagctgctttgttggtgctgagaattgaatccaggttctcaaagagtgctcctaaccacagatccatctcgccatccttagattagttcaagagaaaaacctgaaactggctgtatttcacatttaaatatcagaaatcatacttttgtttaaaagttactctattgagtactctactcagtgttttgcaagtttgcttagaaagaaaccactgagaaaatgggaaaagctagtttttccaataaaagcatgacagaaattttatttcattctacttggaatgaaaaaattagactctttgcaatcaccagtaacagttctgggctaggatgccacattgacctgagaaaaacctgagttttactagagtcagtacttaacagcacctcggcatgctctaaggcatggagataccagaccaggaatatattcagcccgtgcagatattgtgaaggccccacttgaatcagaagggatttgggtagatccggatgcctctctgtgaggaacatctcttcctcttgtgcttcctagactctggccctcctctttagccctatagccttgttggctttcctctccatatgatgagccctccttagggggtggacagctgtctaatgtcactcacttgtagtaggttggaggccaagactcctttcaagaaaaaaaataaagattttgattaatgatgcacagtaaaacacaatgtactgcatcttaaccctctgtaaactgtaagtgcatcgaggtcattaccttaaagagaatgatatttactacgatggaatcagttgtttagtattctgctgataccaaagctataatggtctaaaggaattctataggtagatacatccatttttaagagtgtgcttttgaacaagagataggaaagaaagaacacatagacttggaaacatttttatattcctagccatatgttaatgagctgatgagtatatcttttatttgaagcattatgaattagcttctttcgttcaccaatctgagtgattatctttaaaatcattattgtttttaagatgtcaattcttgaatttctttcctggtcaatttttcttaaaaagatttatttatttattttatgcacgtgagtacactgttgctctcttcagacacaccagaagaggggatcagatcccgttatagatagttgtgagccaccatgtggttgctgggaattgaactcaggacctctggaagagcagtcagtgctcttaaccactgagccatctctctagaccctatctattagatggcattgttctggacctattcttctcactgtcaaaatatcacacctagaaaagcatgtacaggctataattttcctgaatcatattttaattcacacttaaatttcatgatgaaacaaagagttatggccttggcattttcagccacgcactgctctcaggaacgtagaaggaatttgaactgctttcctctattcagttctacagtagacaacctcactgagtgatgctcctccgagaaagctcttttacctgtctcctttcctgttttctcatacacctttgtagcagttcacagccatttttccaccattaggggaaaaaaaggacattttgtcaaaccttggtgtcatttggcctgtgtatcctagatagagccttttaacccacaaattctccctacttggggctcccatgtggtcagcttgtcccatactgcaaagggttttgcccttattttcttgcattcctgttgttaatataacaaccagtcctccactgaccttccctcttaagcacctttgctgagtaaggacgggctgggcactctaacacactcttttctaacctctttgcctagaataccaagtgccgtatcacgtgatctgccttccctcctcaccactgctttgccatagcatatgaataaccttgatctcctgactgctaagctgatgccaagtattttcagcttttgatttggaaagatcctacttctctcatcattccatattactcagagtaattaattttgcagccaccaacgagtctccgagtcttaacacaacaaagagttctttctcgtgtgtataaagggccgtgcggctggctcagcgtccatcatggtactagccaccggacacacctgactgccaaggttataaccccagcgtaggagacagtgtgaaggcacatgggctttggattgctttagtccaagggtgacatatgtcacttccaatacacagcccaatgactagaactagtcactagctgcaagggagccagggaaaagtggggaaacgtgtatttatctgtgagtggacaagtgaagcattctgctttgatgaggaagagttttgactttacctcgttcttaaattgcaggtagaaaaccaacacacaaaccttgcacagacaccgaatacaagtgcagcaatgggaactgcgtctcgcagcactatgtgtgtgataatgtggacgactgtggagacctttctgatgaaactggttgcagtaagtgaacagttccttttatatttcactatgacaaaataaccagactctcaaatgacccagatgggcctcaaacactgtgtcgtcaaggatcacctacaagttctaattctcctgcctccacccccaagtgctaggattagaggtgtgtaccatcatgtgtggctctttcttttcctctaagtaggaggaagactttgggttggaagagattaacataaccaagggatggatttggttcatttggaatggttgaggctatattagtagctcatacctttggtatcccttcctagctcgtatgcacactatctaattgttactgccccaatgggtggctgggattgtctacctccataccgatgctctcgaagtttaagtcactcgctgaggagcaaagagagtaacagaagcagaaattaagtatctatggaactccaggcaaggagagtggcctccggtgccctcaggcacctgttgtgctatttttgacacagtctgacctctttcaatcagccaactagctactgtgtgtatgtgtacccaggcatgccatagtctatgtgcctctgtgtgtgtacagcagagtacaattgtatggtatggttctttcctttcatctttccataggctctagacatggaactcaggtcgtcccagtggcctctgagggagctctttaaacactgagagcgtgtaactggttatgtgttttcaactccttgggtattacatgactgccgcctgcattgcccccaccatacataccccaggcatccagaagactttttgatagttactaactgatcacactgacttggcttgccactaatctcaccctttcagagggacttggagtgcttgtcaaaatgaagtgactttattaagctttggatacaatttggtaagccaggtggcagatctctacacagagactggtatgtaaacagctttaggaggctcaagattttccaagtttgacttgggctaactgaggctttctcttgttgcctgtgcctgtatttagagcaatactttctattcaagtggactttcactgaaagatggtttagttaaaggaaataagcagtgtagcattaacttctttttagatgtgatacggaattcagatatgggcttgtcattcgacagaggtgtagaattctttttctttatcttcctctttattttatttcaaaacagggtctcactatgtagccctgggtgtcctggagttcactatgtagaccatagtgtctttgaactcacagaggtccacctgcctctccttcccacgcactgggattaaaggcatgctcaactaggtgtaaaattatttataatgccactgctggggtccccaggcccatcaccttctttcatcttggtccctcactacctccccatctcttccttcctttacattccatatcattgaatacaatgagacagatagggcttctaaaaaaattaagatgcgcatcatgaccctttggaatacagactgaaatcattgcttatgcatcacgtgtatgtgacacacgcatccctcgaatgtgagtgtgctcagagcacccaaacccagttcagtcatgggatgacatgtaaattttcctagcaccattcaatcataaaggaaattataaagctgaagtcaggctacagataacatttctgtaattgtaaaggtagagtaacttgctatttctgtgatatttctattcctttttttcttcttctttttttttttacatatatataagctggaagctagagagactgtcttataaacagagagccatatgcttatgtttgtagaagctggttgctaggcaactgctctgacactaagctgcatgcctagccttaatgtcactgttccgtggattaaggtgatggctagatgttcctggtcttcaaatgaaagaagttgtatggaaattttccattctaaatgttatcatagatctgctcctgttaaggtctcttactttggaagattaatgattcactcaagggagatctttctgcattccggacctcttaatcacaaagtccagtggtagagttaagagaatagttcactgtagagatactatggcattggaaagaggatcacaacaagcttgccaatatatgaaaaaattcctagagacactgaaaccttctcgagaagaattagaaaacttggggaggtttatttatttttaaatagatcgatattggcagctcagacttctaagttttcatgactgtaattttcaggcagtggtaaactgagtggcattctcctactcttgaaactcaatgttcttagtctatcctaaatatatagatgaatagctttattatgccataagaaatagaagtttcctttagctaaaataataacaagcctgtgactgaaacacgtttcatctgaaaggtagacgaggcttaactcctgaggcaaaagctgctcaccacttccttatctagccccagcttcttcagcttctccgaacgacctgagtttgggagtagatgacagaggatgaaagaaagctggcaatgacaggaattggtgacttgtagagattgccagggacaagatcatcaggcaagaaagagaaaagtagaatttggacagactccaaactgtgaggaatctatcctggataatctagacccagaaaattagggataagaatagctatttagcaggctccaacacaaacaaactattgatcatcttttgctttattataaaggcaataaagtctagagatgttaataagtagaggctgggtgtagctcaatatccatgttgtagagttacacgcatgtttagcatgtgcaaaagcccaaggttgaaggctcaaggttcaatccccagcaccagaagaaatgaatttctctgaatccgaaaaccaagaaaggtttactcttttttgtacattaatttctacatttaatacactattttaagcaatgtaacaatcttttttccatttgtttttagatatttcccatagcaaagtatcatttgaagccttggatcttcataacaacccttaatataaataatcaaaactcctcatttctgagatatatgctttcttttatattttaacatgtctcaaaatgaagtacatcttacaaattataacgtgtcataatacaacttatcattttctgtatcactaatggtgtatcagtggtaacttagagatttaagatagtacagtatttcttcttccttaatgttgaaaatataattacacttaaaaaaaaactatcagtgctataatccttaatcacaaatcttagtgcataattttatcccttcctaggggaaactcattaataaagtaacagtaaaaaagatgtgaatgttatttgtattgattattttctgtgttgctggtgatggagctcagggccttctgaatgctgggtaaattccttaccactaaatgacaatggcggtcaaacaggagtattgttaaagtagtttaagatatatacatattctaagatttctgttatatatattaatttaaggctttatatatgaactagacaaattccttgacagacacaaagagtaaactgtatcgaaaaatataaaaggaaacctgaacttatataagaatgtgtagttgttgagaattcagagtcagtctttgttataagcattttgtgtatgtaaagagcataatatgactgcatattactacaccttgatagctaccctttcaattaattagttaatacttggcaaaattataactgtaattttgttctaacctacctgtctgtctgtctgtctgtctgtctgtctgcctctctctcacacacacacacagagtttgtctgtctgtctgtctgtctgcctgtctgtctgtctcacacacagagtttgtctgtctgtctgtctgtctctctcacacacacacacagagtttgtgtgtgtataaaatatacataactatctatctacctaattgcattagatgattgagcaagaacatgcaatgttagctgtggaatctctggtttcataatttctgactctggttttggacactgtgtctgaggttgagcctggtagtgctgtatatggtgggaaatggcctcaaggaccattgcacatttgtgtagagaacatccaggccttttacagacagaacaaaggtcccctctcatttcaagcttctggaaaaggatcgcctgaaggtgccgcatagttggtgaggtatctgtgtgcttgtggctgacctgttttacccttcacttatgacgttgagattttgttttccagatctaggagaaaatagaacatgtgctgaaaaaatatgtgaacagaactgcacccagttaagcaatggaggatttatctgctcctgtcgacctgggttcaaacctagtactttggacaaaaattcatgtcaaggtagaacatttttccttccattgttatttagagaactttgctttttttgttgtttgttttaggttttccacctattgccttttagctaagccacttaatgggttaacctcctggtgttgtcattttggtacacagtgtcaataatggaggttttggtggtaatgactgcttaaaaccaccagaagtcaaaaagctcaatgtctttgtcaaaacccatgtgtttattacctacccacttaggcaaggcacaaaataagttctgtggcatgggctcagaaggtagctcatcaagacgagaaatgactgcgattttaggtatcttttatcatgtatattactgtgtctaattcatatgtcgttctgtaataagttcttggcaatactagggactgaacctagcaatctaccataaagttatttttccaacccatcagagacgatttaaagaattcttatggttagttaagcagatcagttgttacaccaaatcggtgactcttcttgaagctgtttagttatcagaagggaagcaatgccaaatatcgaccatgcagatgttttttagcaaggaaacatttgcgtgaagtcatgcagctttagttaaaatagccctctgaccactactgaccagcttgggggctttaggctcagtagctgtccattgaagttttctttttattgtggaaagacttcaacatattttggtctcatgtacactcttcttggttctcattgcttgggaagtctaattctgaatgagacagaatatgtgttgcattcttggtctttattttgcctgcagacatcaatgaatgtgaggagtttggcatttgcccccaaagctgccgaaacagcaaaggaagttatgaatgtttctgtgtcgatggcttcaagtctatgagtacccactatggagaacggtgtgcagctgatggtacgatgggttcatgtttggaacaagtcacctctgggggacatcagtactggcataccagaaaattaatttccacatttcatagtctctgctacttcttccttccttccttccttccttccttccttccttccttccttccttccttccttccttccttccttcccttccctccttcctcctcctcttcctcctctccttcctcctcttcctcctctccttcttcctctccttcctccttttcctcctctccttcctcctcctctttcttttttttatctttatctggagacagggtttccctgtgtagccctggctgtcctgaaactcactctgtagaccaggctggcctcgaactcagaaatccgcctgcctctgcctcccgagtgctgggattaaaggcgtttgccaccatgcccagcttggttctagactttaagaaatgtatcgagaacatgtgttcagaaggtctaccctacacatagcatacgctgggtgtttaaggtgcatgtttgtcaagcatttgagagtgaacagaaacgagagtgaggtcatttgaacagctggtcctgcaattaagcagcaaattaaaaaataaagtttaaatcttttaactaagggaatagctgaaataaattagaatattcatctaaagcataatgtcaagtctgaggaaatatatgcaatgaacttttaaaagtcacttaaattacatttgattgacattttgcaagtaaattaaaatttaaaaattttagagaagtattttgggatgagtcaccgttgaaagagtttaaaaaacaaaacaaaacctaaaaatccaagaacaagcaggcttgcctctcattagctagcagttaaattgggctgtggaggtgattatctgttaagacaatcacaaaacctgtcattcaagagccagtgcagatagctccctgggatgctttcagcaggactttgaaaactgtacttcttcgtgagtctccatgtctatctagttcttatcagtaggtggaggaaacacttgtggtaaaaatgggcttttttttttaggtggtcttgtctaaactgccgttggggacaagtaaataaacaaatatataaattaattttaaaacataaaactgatgcttacatctggattttgagttcaaaggtagccagctgtgagggtcagattcctctaaaagtatctcatcctctccctcctcctcatccctgcccacaagggaaacacctatagtgcatttaatgcctacttcttaaacatcttagtggcattcagagagacaaagcagccctttgtttgtttacaggaagccctcctctcttgctcctgcctgagaacgtccgcatccggaagtacaatatctcctctgagaagttctcagagtatctggaagaagaggaacatatccaagccattgactacgactgggaccccgagggcataggcctcagtgagtatgagactcacaaccattggtcattgcattggttttcttgattcttggatggtgactttgtggggattgccatttcatatcgagtggagtcttgttgcctgattggaagtgcaggctcctgcccagcgtgcccctggattttcacagtgtacgtgggcccccgtcaggttttcttgatttcccactgaagcttctccccacctctccttgtattttaaacccccctgtctgcacacactgctgcccttcctttctaccatggcatcggggcagatttctgagcaccgacgtcactgctgtgacattctgccagagtcccacaaaagcccaccatgaggcaatagcattttatacgcgcttctagacacatgctacatgccttttgccgctagttgttcgaatgactcgtctaattgtgtgccctttggagactgaacctaactcatctctacatacgcagctcctgacctggtatatcctgtagacaatatatgcggtgggcactaaaagatcttggagaaatgaaaagtgaacagtgcttgtcactgggcatgatcttctgcccttctgtcctgttttctggagttatgacatcaagcaatcgttacaattctttagatcttaatttttttaggcagtaaagtgttaataatggtctcattcttatctacctgagaggtttttttttggggggggggtaaatatgacaacacatgaaatgtttatgatctactaatgatgatgccaatgtgaaacttattatggtattttcacatttatttatgcaatgcaatatttttcttttcaactctaagtttatttcaagaatgatacctgtttaggaaagaagtgtttgcccaatgcactctgaatttcagtcttagtctttgtgtgctcagattaacctcagtgtttggtgggtagggggaaggagaattagaagttaaaagtttcctgaactactaggcccctgtcttgggcgggtggcacaatctttgtatgtatgtatgtatgtatgtatgtatgtatgtatgtatgtatacatgcatgtttgtttgtttattttattagatattttctttatttttgtatgtttatttatatattatatatttataataactttccagccttttggttacggtcaagtataaaataccccttgtatcttgttgtagcagaggaagttatacattgaatctttctagttcaagtatggtgtgtattgaggtttgatataagggagttaattgcattatgaaagtgaggaggtagagagatcactcactgcatgactctattagacccaatagacccactcttactgtgcactcctccctaggtgttgtatactacactgtgctgtcacagggctctcaattcggtgcaatcaaacgtgcctaccttcccgactttgaatctggtagcaacaatcccgtccgtgaagttgacctgggcctgaaatatttaatgcagccagatggattagccgtggactgggttggaaggtaagtctgtcactcatctctcttgcccatttcattgtcatgaaaaagtgctgcttccccatggtgcatgtgttataatggtgagctcagcagctagaccagatcagccctgcatgggcctgctctgaccacagccatcacccctgcttgcctctgtaggcaatacaaacactgtccttttctatattcagtgcataccacaagattctatgttagatgtgagagctctgtgttccaagactaactttgagtatggccgtgttcttcttcaagtgtattactttgggattaaaacatcgcatctggtaattatttgagaaaaagaacaagccacagtttttagtatccaagctagctgataccggctggaaagttaatagagcctttactcttgttctgctctgttggagcgtctagttggctcatagtttggatgaccccttgcttagaaccctccataaaatcttgctcacactgatgcctggtatgtaagtgttaccaacaacccctttcccggaaagagtcctatatgggtcagtcactggtgggagagtgtcttagccttgaaaatgaagcaagactgggaagcctcagtgcctacctgcctgcctagatggagaatagggagtcatttgaagtacaaattcatttttccctttaaccatcttgtcctgggagacttgagcttctccaaagaagttaattgagtccccagcgtgcctggaggctaacagaaggctcaccctcagcatgttctgccaggaagccaggccttagagaaccattacagaaccctctatctgttaactcacctgcaaagtaaaggtagcatccctccttctcatcagcagatgtgggagctgacactgcagaagttcattttgtttgccagagaatgagcttgcagccttagacatggaaatagggcaaggctagccttgctggagtttttcttttggaatgttatttccactcatctttgggactgatgctcaattcttctgattacacttgggctcattgccaaggggtgtgggtgggggtgagggggtgggggggtggggaagagacccatgggcagtaaggatgaatgccttaatctgcctatggaagcatgtgactcataaaaattgagatgggcggtcaatctacttgctgtatcctctgcaagcactgataaagcgtctgagtgtttgttgccctggctagaactcacaaatcaaatcttcttacattcacatttctttttaagtgattggtcccagcttttctattgtttaactctgtccctctacattcaggcatatttactggtcagatgctaagagtcaacggattgaggtagctacccttgacggaaggtaccggaagtggctgatcaccacccaactggatcaaccagccgccattgctgtgaatcctaagctagggtaagtatttgaagacatgctcccagtcaatgtatagtttctactggagaaattccactttgggatatacatgaaaatccatctgcttacacgaatcctttttctgcactttcatttagatgcattcagaagtatcttgctgattggaattcagctggcaatttggtttaatttactggcaataaaattttatttccaaagtatgaaacatatgcaaaaggcatgttcatacacatacattacttacttatagaaatgctgcaattggtagctgagagagaactagtttggtcttttcctcttgatttttgacattttcatggatatttagcaagtactttgcctatttggacaggactagtgtcctgtatttgtgtttcaaacactgagttattattactttgattttattgtctcccctatgtgaaatcacggcccttgggcactcagcagtgatgcttaaaaagaacatctaaccctgagaagatctaagtcttaccatggacttgaccatagcatcaaactatgcttcttgtgtataacatatcttggaaataaagcgacatctttatagaaacagtgttactcacactcaggaaagcagttggttgtgccgtcagatgctaatgcttccggtgccacaaagcgaggaagctccaccagataagttgcttcaattaggacatttttcgttacaggctcatgttctggactgaccagggaaagcagcctaaaattgagtctgcctggatgaatggggagcaccgcagtgttctggcttctgcgaaccttggctggccaaatggtctttccatagattacctgaatggtgatcgaatctattggagtgactccaaagaagatgttattgaaagcataaaatacgatgggactgacaggagactcatcataaacgatggttagcagttagctaggatttgcatatcagtaatgttctaatgtatttctgcagtgtcttaggataggggatagggtttatgtaatcccgcagatttgtttccatcagcacccagctgctgtattgaatccaaactaattcacaacaataatcctttttatatttttactgatcaaatcaagaaagaactaaggtttctgctaggctcctctgagattgtgttttccatatgttaagtcaggtgtgttcttactaatatgcataaactgcttctagacttattcattttccacgtgctagcctgttctcactttccatgtgcttgcctgtccttgtgctcaactagaaacatgtagaatggagtattttgttacagacatctaataatcgagtacctaccagtacctttctcctaactggccggtatgctcttacattcaaagtgggagatggggaggggctttagttcatcacatggtgataaatcagcagcttaaagtcagcccatttatacggactcagtttaatttatcttgaactctcgaggtaacacctccagaaagtctgcccaaaatatgctagataattacttggagccaaatgccaatgggcacagttagtagtgctgggtattgtgtctcattagctctcttttgtctctccactattgctatgcagcaatgaagcccttcagtctggacatctttgaagaccagctctactgggtagctaaggaaaagggagaagtgtggagacaaaataaatttgggaaagggaacaaagagaaattgctggtggtgaacccctggctcactcaagtccgcatcttccatcaactgagatacaaccagtcaggtaaataccagccttgggaagagatggtcctcgtggaccagacaccttatttaggaatacaccgtctatagtgttagtggatgataagggttatgatgggggggtgggtctgggtgggtgcttaaacattttgaatgtagaaagagaacattgtaggatgaatgaagttattatctcaaacgtgctagattgccattcactctggacactccttaaattttagcatggatcagactggcagaccctgttaaacatggcttgctgtgctctctacctgttgggtgttcaaagttctcagtcatcttgtgcattatgatggttcagggaaatgtgaaaccagttccctggtcttttgctactctgcagcttgagcacaggcatcatcaggcgtagatcagttacaatgcagatgcttagacttcacttgaacttctaaagcagaatctgaattgatgcagatgtcatatcacactaaaatgtgaagaactctactccagaaagctgacaaaatagtcaactggggcagattttagatgtggcttttgtaacgtgtcttattgtctgatgtctatgcctcaactaaggtcatcttttggatggtggtaaataaagaacacagaatgtgagcctgaagaaggatccggaaaacatgagtctaatttagcccttggatccttcacaatttgtgtggaagtatatttcaagtgattttaaaacatgaagagttttaaaatggttgtagttgggatccatcccaatgtaatgttttgagtggctcccacctcattctgtcaaatcagttataagtaccctttttatctagaaagaaactgaagcccacagtaaaattctttccagaaggttttatagaaagctcacccaggataggcactgggtagacttgatgctatgacccacccagatttgggcagtgacgtcttgttataagacttgggatccagccaggcagtggtggcgcacacctttaatcccagcacttaggaggcagaggcaggcagatttctgagttcaaggccagcctggtctacagagtgagtttcaggatagccagggatacacagagaaacactgttttgaaacaaacaaacaaacaaaacaaacaaacaaaaagacttgggatccattgatctcttgagccattattacttatcactaatagatgttaagattaggcctgcaccaagcaggtactcactcactttccaacagcagagatgaatagcaacagtggagactgtgactagcactttggtagggtggcacagatggtagcgtaggtgagtgtgggtctccaggtggcctagaggtcctggatgctgcttggctgtgccaatgccgggcagagccacatcagttagtaggcatactttggctgaggtacccagtctcctgtcaggacctaactgttctcatctcttttccagtgtccaacccttgcaagcaggtctgtagccacctctgcctgctgagaccaggaggctacagctgtgcctgtccccaaggctccgacttcgtaactggcagcaccgttgagtgtgatgcaggtgagaatactcactgcctgggaagcctggggcctccaggggctggatgatgtgaccttcgcagattcaacttgggggtagctaggaaaggggatgagggaaccacgaagagctgtgtgaggctctgggtgcagtcatgttgctatttatgctataaagacgtttcaaagagacggttttctgtgagggtcttcctcctttttttcctcccagtcacggagaattttccttttcccagaattcacgcaaggtgcagaactatttcctgaggtgggaggagcttgcatagagcagggaggggcttgaggacagtcctgcttttctctcatgcacatttcagaattttaaactgtcaaaggactgtctgtgttttgaaagctggctatgtgactaagaaatgaggtccggaataagggagcagtggtttggttctcacacaatcctctgcattagctcttctcggcaagacccgcttttcagtagcccttctaaacagttaatacgacaacgtggggataacaactgcccctagccaacatcctctgcttaatgagcaatcagaaagtcatcctgcagtttaccctgctgcccgttttatggctaacattctgggggagggggtgggggtcttcctaaagactaagctggtagggaaatgcagaggcaggaatagtttctattactgggggcacaagcgtttaagcaaggattcatcccattggagaatgtgatcagggtggaaatactgcttttcttatctcttctcctactccgtgtgtgcctggagaactgttgacaagattttggtgtttttttttttggggggggctggagagatggcttagtggttaagagcactaactgcttgtctactacacttcccccaacccccaccccgccgtgattcacaatcaccagtccaactggacaactccagtccaagggggatctcacaacttctggcttctgaggatgctacactctgtaataggaggataccacacttctgtggtgcacagacacacatgcaggcaaacacaaacactttataagattttcatttgaaagaactttatccaaagtaagctcacgagtggtaacagtggggccttgatgtggtctattgttaattaactcatcagttagtttcagtgctatttattgaatgtccactctgtactaggtatgaatgaaagtaccagagataatggaaatgagcaagcagacagatcccttctctcattgagcttactagctagttgtacaataaaccaagaaacctatgaatatgtaacaacacaggtggttacatatggtttccttggctagcccctctgataaagggaacattgagtagagacctgtagagcccagagagtagacaaactcctcaaatagaatgcacatgctcaaccagggagaatgctagggccgagccaggagcaggaatccagaggagggtcctcatcaagtaaggatatctcttgctagctgtccctcgggtgcttgtgtgtctgtctgtgtctgtgggtcaacctcttgccttctcccatgctgatgctccggagtcttgggttgtagtttcaacctgtgttgcaattaaactcttggatctaatggttcccagaagagaatctggagacataatgtatgtcctggcttaagcatcccctcattgtttagaggaggagagtgctatgaagtttctctctgcaagcatgtataattccccaagatcttatcaccgtttaggaagttcatttgccttagggagcaggggctaccttggcaaggtcagctggcctgaccctctgcattccccatctcagtcctgggggggttttgcatgatgcaatgctctgctgcggtgtgtggctgactaacccatgcatggcttttcctttctgcagccagtgaactccccatcaccatgccttccccatgcaggtgcatgcacggaggaagttgctattttgatgagaatgacctccccaaatgcaagtaagtgtgactctcggtcccagctgttgaccttgatctttaagggaacctgagatctcagtatagctgggaaaaacaagtactagaggctcatccaattccccatttcccatctaaccagcttctcctcctttgggggaatctgcgggaggcgaggcatcacttcccaaatcataactggcataaccctcacctgaagatctggctcaaatgcctatgtgcattctcaggggtactgcatttctaacaactcttgggaatgctgtggtcatgttgaagagtgaggagttagagagaggacagcagtatgtctccacatgccaccacccacctcgcctgggaggatggcttaggatatgagagagcaactgacaggagagatgctttaatacaaagatcatgactagtctggggtgaagaagcctgagggaaaccatcattgcagagcaagatgaattgtctcttcctccttgaaagtggttggaggatggcacactgccaccgtgtctgcactccctttctaaggaagaaatgcatggagcagaggagccagtaggcttatgccatgagactgacctaagtactacaccactgctagtggctttctagaatgagtgcagaataagcagatgtggagcagtctgcactgcctgctcctcatgcatcagggctgcattgcctgctccttatgcagcactggatcagggctctctctgcctccaaagataaccacgtctccttctgattccaggtgttctagcggctacagtggagagtactgtgagattgggctctcgagaggcatccctccagggacgagtaagtgtcagaaatatggtgacctgcaccagtcgcagccccccatcttccttttcaccccatctttgaagggccactggtgagcccctctagcgcttccttgtttgtcaaggtgctgatgctggctttccgcttcttccctctgcagcaatggctcttctgttgacattcgcgatggtcatcattgttggggctctggtactcgttggattctttcactacaggaaaactggctcccttttaccctctctgcccaagctgccaaggtcagtttcattagaaggcatgtaataagcctgtgtacgatgaatttttttagaagattgatagctcacctgttctcatgatctcagggtagtcttcatttctttgctcattttctttctttattttatatatgtgatgagtacactgtagctgtcttcagacacaccagaagagggcatcagatcccattacaggtggttgtgagcagttgccatgcagttgctgggaattgaactcaagacctctggaagagcagtcagtgcttttaactgctgagccatctctacagcccctttttgcttacttttatgaggcaagatttatttttcatgtgtcctccaccttgctctgggaccacacgtatgagccaccatgtccctcagttgtgagaactgagagcattcactgtcaatcacttcttcatggagtttcccctgaagcttgtgctgcagaccgtattttatcacgtagggcaggagagggcagagctagctgtgggttgcttggctttcttctagtgacccctagttcttgttccgatcttgtttgggcatgtgctttcatgtgcacttggggagagaattgcacatagaagactcagtaatatggaaggaaagtaatcactacaaaaacaaaacaaaacaaaacaaaacaaaaagaaacaaaaaaaaccgtaataacaacacaacacatggctttgtttcatttcagcttaagcagccttgccaaaccctctgaaaatggaaacggggtgactttcagatcaggggctgatgtgaacatggacatcggtgtgtctccttttggccctgagacaattattgacagatccatggcaatggtgagcacagcctccgtgggatcagttgaaggctttcacttacgctaattgatggaagaaactcttcttacaagaaataaagctgaccttggggacactagcatggatacagtctgtgctctgtaggcctttgaaggaaaatggctctaccatgtaacagttattcaaggataggcaaggagctgactttttctcgctccgtgtatagaacagggacttgtctacctcttatgagagccaggtggcacagtctgggatgggtctaggacagctttgacctcatgggggctttctgtaatctagaaacctatttccagtgctttgtctccacctccagtcacctctgcctggaagaacagtgttctccatgctgccttatttccctgtatcttcttccactacctccctcttcttcagtattccagcccaagtgcattaagtccattaaagggccagagggattcagctataggaagaggatttgtgctttctggagcagatgccttagttcattttttactagaagaaacaatagtttgttacttagatgcccctgggtctctgaggctactttctcccgcctaccctctctaagacctcatattttgggtggctttgtgaaggtgtctggtgtacatccaggtatgagggagatgcctttctgtctgaagtagatcaatgggtatgacctctctctctcctcccgccagaatgaacaattcgtcatggaggtaggcaagcagcctgtgatatttgaaaacccaatgtatgcagccaaagacagtacttccaaagtgggcctggcagtgcaggtgagatgtctgtcccacgatctgtttttagccatcgtggttgctgggtctttctgtgttgcagaatgcaggcctctaacctgccctcctaatgggaggaagcacagtggcctgcatctcagcttcaccatccacagtcacgaagctgcgcccggatacagccctgggaatagtcagagccctgtgtcgtggcagagatgtgaggcttagcagccatgctggggggtgttcactgttctcagtcattcctagtcacccgtgccagagcaaggggtatgagtctattagagatcctggagacatagggccctatgacagaaacagggaactatgtcataaatgaatggctgagagacggtattatgaggctgcttatctgagagggctaaagtgagagggacggcctgttctgaagagtatagaggtctgaagttaagatttgctccgaaggcttattactctgtacctgtaagagaagctggaaggagaggcaggtgctttccattagcctggactaatggctcagcgctggttcccgatccatcagcttttggcctgtccttcctttgtctatgcagctacaggaaagagctatcagtgtttgctagtgatttccgattcaacatatagtatattttaatatgaagtgatagaaatatttttcaaaatgagctctttcttaagagcaaaaagatttgaatcttgaaagagtctcgtctgctctttgataatgtatcgtgggatagagatgacatcttgtctggtatttttcacatgaaataaagtgaggccatgcatacaaacaaaatggagaatgtaaaatacaaggagtatactgacttccttgtaatatctattcagggtgatatgggtttaaagaatagctgcgtaattatgtgaatttgacaaaaaatagaaaagtattaaggctgtttgcttactgttttttaaaattcatcctcttttaggtagtcctcaaatttgctcattttattccttttgctatttatttatttatttatttatctttggagacatagtctcactgtgtaccccaggctggcctcaaacttacagatatttgtttgcctctgccactgcttggattagtgttgtagctacacacctgaccacactcatttttttccttaatattcaaagaggattctgtgcactgcgtctgtgtggctgttacttggtgttgttacttagctagcacttggttgccagtatgcaactggaacacctgttattacaaattatggtcaaggtgggaatgaagggtgtagacaatgtagcaggggttacatcaatgagtgtgtggcaatgaggggtgtcctcgcctaccacatttgatatcttaggtgacttagtggttgttgcacttatttggggaaggtggaagtggcatttagtttacagctgctagtgtcacttatcagattgaaaaggtacgtgactgtgtctgtgggggataaggtggcaaacagaacccagatctacttattcacatattcatttcttctttcaaaaccgtgtagggaccgtcagtaagctcacaggtgactgtaccagaaaatgtggaaaaccagaactatggaaggtccatagatccttctgagatagttccagagccaaagccagcctcccctggagctgatgaaactcaggtaatgataattgactcatgaaaagaaatttgcaaagaacttggacatttctgagttgatgctaatccacggaagactacgtacatacaaatgaaaacaaaattgtagatttagtatgtcttcatgaaaaggacatagaatctgggacattcacacaacatgcacagtaatgtgctgaggatacatataaaagagaatgcacctttccaagttgctcttagtgccttactaccattaccaatgccgaccaccaggtggcacaattttattaccttgtcctctgtgtccagctacacctaattgtccatccaaccatcccacaagcattgctgtattaccgtgccaaggaaactagtccaggagacaaaagtcctgcttgatgaatctttctttatcatatatgctatatcttcacatatcctagaatatttgggatgcagtttaacaagcacctttgaaatgaaattgtataaaatggacagtgtgctgctagctttaaagaacgtgcgtttagctatcccagatctacatgctggattctagacactcattttacccctgagaactgtagtccttaccagttcccttcacaaggggatccatgggcaaattggaaatgatagcacttccggataaaaaacactgtgagacatttaaatgttcctggtccttgtgcagagaaactcagtggtgtgttctttaattcagtgtggctgagagaaaaaaaaatcacctcttacatgtacacatgcatagacatgcaaacacacacacacacacacacacacatacatacacaaacacacacacacacacacacacacatacacaaacacaaacacacacacatacacaaacacacacacacaaacacacacaccatagagaggaagattttggttcactgtttttctagggactttttttctccttaagctacatttaaaagtggacattgaagatttgttttccacagccaccagaatacttgaaatatcaaatgttcagtccctaggtctggctgtactccaaggcagtgtctggtttacttctttattcttaacatttctttccagtcaattctcgatcttagggacctttcttagaggtagcttggtctgtaaggagaggcaatgtggcaagaagctgttccctccccccactccaggtcccagaaacagaacgggcatgggggtttgttgggaatgcgagtcaaccttcgccaattgcagcatagctccatgcctccgtctgtgctgcccactggttcttgcactgatccaggccgagaccttccaagttctgctccccagcgtctgtccagagatcctgtatctgtgacccccggacactaaattgtcacttggctcagcagaatcacttgcttaggtcaccgaggacacgaacttccaaaggagtctctcaagcttagatttcttagtaaatatacagagaatactcagaattcagaccccgtcactcaaacctgtcatttcccacaagttgcatggacacacattggatctcctttagagacgaggacggccatattcctcttgttagcaattacttagttgcatggagctattgcagaccaagacaatgacttaaggtgttggccttctctacttaacttcacatttccaaacatatggctctgacttccttctcctttttcctctgtttggtgacacagagagtggatgtgtgggttgggtgagtggtcttgcctttcttccgtagtcatgtgctcctggtaccaaatttcccacccatcctgcaaaacacatgggttacttgatcttccatagggggaacttgttaaccaggtggccaacactacaaccactccataaggtggggccaactcactggtgtgtgagtgactggggttttctctttgggttcttcagtacataggcctctctgctagtctaccacactttagctatttgtcctgctgtgactcagtgtgtcatacaggaggaacaaaaaaaacctgcatcaaaggattattgagatgaaaacaaccccacaaaccttaaagcaattcccgatgcacagcaaacactcagtaaatgtcagttgttgcagatgatggtgatagtgatggtgatagtggtggtggtggtggtgatgatagaggatgtgtcgaagtgagagggatattctggccaagacatagttttggaaataagagacataatttgggttttccttgagcttctaggctgctctagaagtctgcctctgtcttagtgtcttgtatactctgtatctgactggctagatggcagtcttctagatggcatgagtccagattctccatctgcacattttacattgaggaaagattttgaagttgttacataaaaacacctgagagtcttagctactgtacagggacagttgaataatatactacttaacccacacccttaagttaatatgctttcaatagagtttaaaaacctaggaaaagacacctataaagaaaacaaaatagaaaactccattactgaaaaccgtccatctcctctttctgtttagggcacaaaatggaatatcttcaaacgaaaacccaagcagacaacgaacttcgaaaatccaatctatgcagaggtaacttttaatccctgttctaagtacagacattcattgtttggctaggttgggcacacattgaggttattctggacaaactgaccaaggttagtccttatacagaactgtttatgatcatgccgggaacataaagccatgtcatccatgtcttgttgtggttgcagatggacactgagcaaaaggaagctgtggctgtggctccccctccatctccttctcttcctgctaaagcttcaaaaagaagttcgactccaggctacactgccacagaagacacctttaaagacaccgcaaaccttgtgaaggaagactctgatgtatagccttgccaactctctagggaacatttagacactcacttttgcacatatattttttacagacaaatgaaaaagaagttaacattcaatactttataaaaaaatatatttttctctgtttgcctataattgaaggtgtgtcgtgtgtcttttttactgatgccatttcctatttttacaattatcatgaggtactgtgtatatcttgcactgatgttgtcaggaggtgatgctgtgaatatattgtacttgtgtaaatttcagaaggattataacatctctgcctctgctaatgagagtgcctgctgagtggggtcgctgagctgaagaataaatgatctggtgaggaaaggagttggcttagggctttgggtctctctagagaagagatagtactcatgtttcctttgaaacaatctaggaagaaagccctttaagcttcatttgtgggtccgtttttacatgtcagcacttaatcaataatcaatattcaacattacgtgtcaacctgattagtaagtgtaccaataggggccagtgttggcttcatacactgtagacgcttctgaccacacagaaggtacacaaagtgattcagttggacccttccacgtgcctctgtcttctaaccccagctgtgaccctaattgccaagtcaacatctgtatctgccatgtcacgtcccacactgagtttctgtttcattgaatgagctcttgcttgacagaccttaaatcaacccttgcctggcatctcaggtgtcacctcccttagtgactggaattctggagctgactgactaaaaccaaacctacttcataaagtagggtgccaaacagataccagttaatcgaaacctcagctgggtgtttggctctgggtgcaaactgttattgtattgactatttatttcctcagttgacgacgaaaagaaagggaaaacattcttactgagcctttttcacgtctttgcctaaagctgtacgtttgtgtcaggatgtactgtatgtcccggctcttctgagcagttgctgaattctctatcacaggaaccatggcacgagcgtacattttctatagcaagtagcattcccggtttctctgtgctaatattgcacgtgtgttaacgaatgaatggaagggtgggagagtggatgaatgaaatatactactgattattttattctcaagtcctcgaaatattttgttgctcatattttgagtaccgattgtaattactttgattagaaaagaaaaagctactggaaatgatgctgctggaaatttctaataaatgtgtattttatcagatggata

SEQ ID NO: 26 - DNA, 33092 bp, Homo sapiens
agttccgacccacagcctggcacccttcggcgagcgctgtttgtttagggctcggtgagtccaatcaggagcccaggctgcagttttccggcagagcagtaagaggcgcctcctctctcctttttattcaccagcagcgcggcgcagaccccggactcgcgctcgcccgctggcgccctcggcttctctccgcgcctgggagcaccctccgccgcggccgttctccatgcgcagcgcccgcccgaggttcggctgcttcctcctcgcgcgatctccccgctttcctcccctccacccctactcgtcgcgggcccctggcctccggctctccggccctctccaggccgcggtcggctccgacggtgtttccctccttccctccgggcgggctgaggcggctcccaggctcccgggacaccgcggaccaacttctagtctctttttctctcctcgaagcgcttatctgcgcgcagccttatctccgagttatctcggcgcaaaggggcgggagccggtagttaggcaggcagagaaacttctttcttgctatctagccaggtctgtgtgtgggcattaattttagtgtggtaatctccgatgagccgaggcgatttggaagagcagcctggaggaggccagcccggctgcatttcacctccctcccccactcgctccgagtctccctgtcattcttcctgctctcccatttggggtcgcctcggctctggggcggtctcacgctcccccctccccagcccgttgcgttccccctccttttctctgctctccgctccaccccgctacgtccgattccggaacggtccggcgtttctgctgctggagatgaccgcggggtgggccgggtggcccggccggcgtgagcgcgcacgctggtggctgcaggcgcgggccgtgtctaaggtgtgcggcgccgcggggacgccggtggggctggcgattcccgccccacaagctctccgcattgcctctgctgggaaggacccagactgctgcccccgccctggcgtcccactttccctgggccgagttgcatttctctctggggctcgcgttcgggctggtcagcgcagtccgggaagctctgggagagccaatataggagaacgcggcggtttcgttttcggggacaggttgccttccttacgcgaagggttttcccgtggggaaccctcaccccgaggcatttcgggagaggggcatccgcagagaggcgggatgcggcggtgccgacacgcacagctacttaaattcttttgtgtgtcatcagcccgggggagacactttagggcggaaggaaagcctcagccagcttctgcagatcacccctgggatctggcgcgcgcacggagaaaggatgcggccgagggggtgggcggggaggacgcggggaccggagcggtgcctttgagggagggctggtatcccagcccttccagggccctgtggcggctgcgcaggctcccttcccctcccttattgatctccacgcccggggcagaaataggatctttgagaagtctcaaatgggatctttgagaagtcagatcccatttgaactagaaaaaggagtggaggcgaggtagcgtgcagcctacgctcttgttaacccgtcgatctcctaccatacccgtctcccccaccccacctcaggagctagacgtcagcttggagcggcgccggaccgtggatggccttgactgacggcggctggtgcttgccgaagcgcttcggggccgcgggtgcggacgccagcgactccagagcctttccagcgcgggagccctccacgccgccttcccccatctcttcctcgtcctcctcctgctcccggggcggagagcggggccccggcggcgccagcaactgcgggacgcctcagctcgacacggaggcggcggccggacccccggcccgctcgctgctgctcagttcctacgcttcgcatcccttcggggctccccacggaccttcggcgcctggggtcgcgggccccgggggcaacctgtcgagctgggaggacttgctgctgttcactgacctcgaccaagccgcgaccgccagcaagctgctgtggtccagccgcggcgccaagctgagccccttcgcacccgagcagccggaggagatgtaccagaccctcgccgctctctccagccagggtccggccgcctacgacggcgcgcccggcggcttcgtgcactctgcggccgcggcggcagcagccgcggcggcggccagctccccggtctacgtgcccaccacccgcgtgggttccatgctgcccggcctaccgtaccacctgcaggggtcgggcagtgggccagccaaccacgcgggcggcgcgggcgcgcaccccggctggcctcaggcctcggccgacagccctccatacggcagcggaggcggcgcggctggcggcggggccgcggggcctggcggcgctggctcagccgcggcgcacgtctcggcgcgcttcccctactctcccagcccgcccatggccaacggcgccgcgcgggagccgggaggctacgcggcggcgggcagtgggggcgcgggaggcgtgagcggcggcggcagtagcctggcggccatgggcggccgcgagccccagtacagctcgctgtcggccgcgcggccgctgaacgggacgtaccaccaccaccaccaccaccaccaccaccatccgagcccctactcgccctacgtgggggcgccactgacgcctgcctggcccgccggacccttcgagaccccggtgctgcacagcctgcagagccgcgccggagccccgctcccggtgccccggggtcccagtgcaggtaagggtcgcgcctcaggttcggggtgcgggtccaaagcgctggggcgcacgggggacgtggagcagctgctccactcgggccctgttttcaggactttctcgtccgggtgcgcggaggtcggcctggtcccaggaaggatttgcaggcctgtggctgggtaacccagagtccggtagcgctgaggcgagttgtgccaagacttgagtctgttgtgccaagttcctttccacggatgagactaaatgcacatctgtaccttcgtgccttggggaagctcagggccttgatgagtagtgaatggcatctgctattggggaaaaacgaggctgggagggaactaacagcgcttgagccccatcgcagaccctactttgggtgagtggaagaaattccacgatgggagtaagtttgggagagtggcgggcacttgatccacccccaaacagacacacaagcacatgcaggctcacccagtttaactctccaaagggtgcgtgtttgtgttttcctagagaagggtatttagaagagcacaacagaagaacctagatgttcctagggaagctagttggcgtctcctctcccacaagggagagagggaaagaagagagggcacctggagtggtcagacttgtgacttcatggtgaaggagagctggtggataggcccttgggcttggcatcagctgggccttggtctggggctgctgctcacatggccaggctgcaactcagggatcctggagctggggcacctattctcccttcgaagtttagcccgccaatttttcagtttccaatttgactcattttttcctgtatctgggagccattagggggtaaaccgtgaaaacgctattgtcaaaaatacctggaaatacctcgttttgaaaagtgttttgtttactccagcacaggagtgtgggagccctgttaggctgtttttctcagatgcaacattctgcgtccttggtgctttcaactggcttatcttaccttatatttcacctgtttgataatctttctaaggaaacaacatctttttttattgtagtttgtttgaggggaggtgtgggggaggccccttgagtcacagaggtggcagagtggaggaaggcacattactccaaacagtcctaccccggtgtcttgtgtatcccaggtctgtgcttctcgtgggagcctcgacgctacctttaggacagcaagtcagtcctaggggccaggattccttaggataaaatgggacattcccaaccttgtccgcaaaagacacgctggaaatgcaagtggtctgaaagagagggaaccaatttgaacagctctctgatagcctgagttctttctgtcttcttccaagcgctgcaagacttggtctcaaaattccctctttttagttttgctctgtcgcccagtctggagtgcagtggctcactgtaatctctgtctcccgggttcaagcgattctcctgcctcagcctcccgtgtagctgggattacaggcgcgcgccgccacacctagctaatttttgtatttttagtagtttttgccacgttggtcaggctgtttttgaactcttgacttcaggcgatccattcgcctcagcctcccaaagtactgggattataggcgtgagccaccgcgcccagcgaaattccctctttttgcttctgctgcaaagctggccctggagaccatttttcccctgtgtgtggaatgggatcgggggaccctgttgagatttgcactgttggcttgggacttgagagtcagggctctcatccttacctctgcatagggacccgtgtttggctcccaggagcagagagatggagaggctgggaatctctaaggaggtaatggttgggtgtgaagcttattttgtcagtcggggagttccgtagggaatgtgcaagggtgttgtgagttgggtgaggggtagtatctgcagattgagccagcgcctgcagctctgcctatttcttgacacaccttagcctgatctccaggttcctttcctccaatcttccagcatttcatatggctgagagagtcttttgatgtttacagtaactggtcctgtatgagaaatccttttagaggcagtatggggcagttgtgggcaagttaatatgtttctttttgttttaaatttagcctacacttttcctaattttttcatcttctgggcacaccacagttagaggaattttctgtagacccagaagatttgttatttttttaagtatttttttaagtatgtttaaaaaaatgggaagggatttgggaacacccagcttttgcatagagtctgttaggaaatcaggaagtgactgggaccaagccagtattggggtgaagggtggggagcgagtgaccctaactttgcttgtcctcacaggtattctgaggccagcttcctagctagatttcctgtttcttagatttttttttttttttaaacaaaccgtttttggaggcagacactttaaacaccagagctaaaacctgagtgctgaacttgatcaacccgcacaatttggaggcttctggaaacccacactatgcacctctcgctgactgggtagatggggtgagcttactttggggtgagctcagagtcctcacactcctttatttcctgggtcctacaccctcctaagcgcctgcagaactgtgagtccctgtgtcttggtaccacacacagaaagacaggtggtggtgcccttctcccctgaatctatcactccccaagggcaccgcaaacagccatgttaggagagaaatggtgagttgaaaagggggaacttggtgagcaagcccccagcttttatatcttacagcttttataaagacagcatttttttttcctttttagtcacttacaggattatagctgcctggtgggtttgggaaagaggtagggagggaatgagagagattttattcaactaaaaataagcaagcttcctaggttgtatttatccaaagtggacttttaattaaattttgtctttgggttttcagatgactaaatagttctacctggggagttcacactgtcttctaataggattcttattgttcccagtcataggactgggttttccagggaatgccccactcctctatccagaggggctctgataggtaacattttaaagtcaacaacaaagacaaataccttgtttaacttcagtgtccttgaagacctgagcattttactgattaccgtagtcaatagtggcttttagggcggagaagaataaacctttgtgatgtgttgtaagttgcagtatccccatgacaactttgaactcgggttgtgtaggatgccagtttctttaaaacttaataagaaatgagaaaagagacttgttttgtaaatagtattaatggaattaaagtttttatgctaaagtcatatttaaatatcgttaccacacagttgatagtagacacaagcaataaactgcaaggggatgagaaagaaccaaaaggttcaccagcacataatcttaagctaaaactctgaagtgtaatgtttatttactttaaaaagtgattcaggaatgcttcttcaataatgcagaactaggacatttaaaccttctataatctaaagaaccttaaatggcggtctatacttttttttggtctatacttacaataagtacctttctcatttttagagacatttattcttccatatttaaccttcttgagaagtaataaatgttacatttactcttaattaggatttgtttttattagcaggtttaggttattgtgaattctgaaaactaaccaaagaataataataataaaattatgtaaaataaacacattttaaatcgattgctaactcaaaatgatcactgggaaggtcttggtaattttctcaatcagtaaggtatcaaccttttataaaaattttgcagatagaagcagttggacccacttctaaatcgggattttagcatttgatctttgtggcatgaaaataaaactctgtgcttaacgttagtgcatttttcccctgaaaagatgagagtaatcttctcatttctagtttctaactaacgtaggtgcctaagaatagtacttttaatttcacttgtgtatctttaattggagaagaggcacatatggacgggtggcagatgtagaaaatactttttaaaattacttgagataaaagttaatgaggcagcctcgctgtgtccccggatatttgtgggttgcagcggggctcagtggtcagtatttctgtgtggcttgctcgggtttggcaacgacgtactgtaatgatgatggatttcagtctttaaaagctccgggacagcctgagagtaggggtcaggggactcaagccgacctccccaccgctcatctcggactctgacgtcctctgcttccagcactgtctctttcccggagtctctactggggcgctccgggtgtgcagaagtattggacaaatggtcagtggagcaatagtgacgaaataaccctgctcctggctttgcggccaaggagaaaagctcagccgggaagggcacgggcagggaagccgggcaccggggctgggggccggggtccccggggtgacgcggggagggacgggtccggcgcgcccactcccgccctcacgcaccgctgtcgccgcagacctgctggaggacctgtccgagagccgcgagtgcgtgaactgcggctccatccagacgccgctgtggcggcgggacggcaccggccactacctgtgcaacgcctgcgggctctacagcaagatgaacggcctcagccggcccctcatcaagccgcagaagcgcgtggtgagtgtgacccgccctgcccctggctcgcggccggccccgggctctcctggcccggccggccccgccctggctcggcctgccttgggcgtccccctcccaggggacaggtgcggccgctgcggtcccaccctagcggggacccagcggtaccatcctgtcccggctgttccaacgcccacccgctggcgcccaagtagaagttaccccgaaactggcctctgggaagccaagatagcctttccccatgtttacgcgcaggggatgacgtccgtaaatgacaaaaacaaaaacaaacaaaaaaggaaggtgcaaaatgttaccatgttttaagcaaaaaaagaaaaaataatctatatatctctaggtgtacttgccaaagcaccgtaataattctggtaagataggcaagaaattggtgatggtaacccgaggagaaaaacagtagacctaccgaggccgggcgaaggaagacttttttcactgtgtatggtttagattttatgcttgaaaaaccatgctcacttataccattcgtcccccaaatagaatatgccagaaatccacccactcacgcctcctcacagccacattcttttgggtgccgtttactttgtcctttccaccttcttggtcacttctacctcttatcctcaggtgtatccccaaataccatatcttggattgcccttgagcctggtgaaaatttatttgctctaacttttgttatttcaaaatcagagaactttgtagaacttgagtaaaagtgtggtttgtatgttcttaagttgagcattttccccaattcgcacacgttttactgtttttttgttttttttttttttttttttttttttgagacggagtttcactcttgttgcccaggctggagtgcaatggcgcgatctcggctcaccgcagcctccgcctccagggttcaagcgattctcctgcctcagcctcccgagtagctgggattacaggcatgtgccaccacgcccggctcatttttttgtatttttagtagagacagggtttctccatgtaggtcaggctggtctcgaactcccgatctcatgtgatcccgcccgcctcggcctcccgaagtgctaggattacaggcgtgagccaccgcgcccggccaccatgttttaaagtaagggaatcctgatttcagggattaatctcgtattgtcattgttatgtgtgcttcctagccggagagagtatttaccgctgtaatagagaaaataaaggaaagctttcaccagtcccactctaaggttaacatttgtttagcgaagtactcataatctaataaccctttaaagctaaatatgttacagttagatgccagacgtcttaagtatcccagtaatttatttgttatactctaattagcaggaacaaatgctacacatgttgtttgtgttaaatagattagagtgaaattgcatcacaatgtaagtctgacaccttaaagagaagcaattagttttatggttggttttgttttaatgcatttaaaataaagtggccgaggttaatttaatgagtgtatgtgccttaaactcgttacaacctcccacagcttaaaattttctttaaagggtacccttaactgcagtgtgtgactgtgggtttcatgttttcttaaatgcatcatattaaagaagaaaaagtagtaactggaaaatatcccacagaagttccttgttttcatataatagacaacacatgaacaatgaaaccgatttatttttctggaaaggcacattgagctgagtactaactgaactttcaaaggtaacattttctagagattgagcaaaaatttggtggaatagtagtcatttaggttccagttgcattataaatttgatctagtaacatttagatagtgccatttgttttgtgcatgtaccagtaaaaataacttagaaggaaaaaaaagaacagtttttagcatttctgaatcgttagctttctttgtgcttagcaggtgtcttggccataaccaaggtcagcaaatatgctttgtaaatgggttataaatgataccaattgaagggtgtgtcactatcaattaggtctccttgtgggcttcttatttatggttttgatggatctggcttagttctcagaagcagaatgttgaactcaagtttgtttagccagcactatagaaccaatcactgtgaatttgaacttgcaatacattgcaaaataagagatttatggtgtaacttgaattccttgtcagtgaggaatatgactgagatcacttgttacaaggaacttttataacccattcacctgcatttcacatgtttatgaggactggcttcacttatgatctgcagttgacagtcataaagtcctttgttataatggcaaattctgataacaagtttgcttcacattggctccaaattccactggaaactgtcataaatggctggtttataaagtgaaccttcctgtcccttgtttactgatttcacatttatgaagagaaaggaatcctttcctaaaaaattattttcttttaaccacaaagaaagaaaaaagaaaagcctggatgtgtaaagttttgttaatatgttgtcatcattttagcaaagcagtttcccaggtagctctcctgtgagccaagcatactcatttcaactaaaggcaaattgattcttagcactgacttcctagaaatgttgtagtgctaaaaggtttgccagtgtctctgtttataacttctctgtagagtgatgctaagtaatgcaacaggatgtaaaccataaatgcagattttaatttcatcttttaaatttcccagcaaaggttttggaagtctctgtcctgtaatctgtgaatattcgatacatactcaatttacatttctctcttcttcattctttacaattgatcttaacttcccaaattttgtaattttcaacttggtttggtcctgaatctttctctgatttttttttttaactatggaaggcttcacgaatttgggtgtcattcttgcgctggggccatgctaatcttctctgtatccttccaattttagtatatgtgttgctgaagcaagcatccattttttttttaactgaagctatgtcacaatttttaaagtaatttacagcatttgaaaggaaatttaagcttggcaacttaaaaacgagttttatattttgccattctgggtaagaagttatgttagcttattataattaacatgtagtaatctagaggtaataaattccctttaaggctgttatgggcataaagaaaacatggaaatgggagtgacagtggcagacaggtggccttttacctttcctggtaataccaattaaccctttgcatgaacgaaagttgagaataatactgatagggcaaatactgatattagtatcactgcatctaagacagtggcagcattaagattatgccataaaatttgctcgtatcctttgtaaaatagataaaacaaaaatgcaggcagcaggcaatcatgatggtaattatggaatgtattcaaatatatttcttttttttttttaaaaaaaacttttacccctcttctgaaagccatttctaataatgtactttcaaagtttccattaacgtactttcaaagtttctggtttactcctttacatatatctgagaaatagacctggtgatctccggttttcaggggaagtggagactgcccagagccatttagcacattagcaagtggcttgtgattgcatttcacgacctaaatcttagacctgtgactatagtgcacggccaattgctgtccacggtggggggtgggcggcagggaggtggggcactttcatgttaatgtctacttgtgttgttacttctggtgtgttttgagtataactctatttggccaacttttagaaaatcttttaattcccctaaaaaagataccagtagtatctgggaaactctaaattggagaagaaaccagggatgaaactctccttgatatgatgctggtaaaagctttgcatgaagttattggccaactatatgactgctcccgggtattcttgaattcacggagacaggctagctggagaagtaaatcaaatctatagggtccagcatactatgcaaacctcaaatttcttggcccagaaaagtcagtataagtacactgcaattttttttctcaaggaccatttcatttataataaaacagatacatacttgttgatgacagggacaaaataccttaatgtatgtatgtaatatatatatatgtcacttatatttttccacttatgttcttgtactgtttctagccttcatcacggcggcttggattgtcctgtgccaactgtcacaccacaactaccaccttatggcgcagaaacgccgagggtgaacccgtgtgcaatgcttgtggactctacatgaaactccatggggtatgccatgtattctgctcacttgtatatacatttagtatctggtttgtatgtgatatcagttacaaagaatcagcaaatgaaagatactcaagtgaaaaatttgaatgcatataatttattactgaatatgtttaatatattcagtgtacatactgaatatatttattgaattgaaggtgcttttaattataatatgaaatattaccttatgcaccagtaggaaacaaaaaatgctaccagttgaactattgcaaacgttcatttaagacacattccagttttagaaatgtgaaaatgtgaaaagtgtgtattttagaattggtaatatggtagtaactgtttttaaaaatgcacaattaaggaaatcaataaaaaatgcacaatcactagtctatatctcttaaaaattttgaatgtaatcagacatttgtgcaaaagagtaatgcatttaatagttatagtttgaaatatttcatagttcattttaaaggattgcacaaaatataataaacaactcaatcttaaaaagaaaaataaccttgcatctgtaggaggaaggaaatacatgatctctttgaaataatacttcttcaatgaatagctactcatttcaaacaataaacgttaagttgaaggaattaaattctccttggcaaatcatctcattctttctgaaggaatctctgcatttgatgaggaaagtgtagtctttgtgcacttgggatcttgagtgtgtataaaaattggattgaaatttatgccaagttctttttttttttttttttcttgttttgagatggagtctaactcttgttgcccaggctggagtgcagtggtgctatctcggctcactgcaacctccacctcctgggttcaagcgattctcctgccttagcctcccaagtagctgggattacaggcatgcgccaacaagtctggctaatttttgtatatttagtagagacggggtttcgtcatgttggccaggctggtttcgaactcctgacctcaggtgatctgcctgcctcggcctctgaaagtgctgggattagaggcgtgagccactgcactcggccgccaaattcttttaaatgagagcttttagtgccaatgttgggtctttggtttttcttcaatataatattaaatttatggcctatgtgaaaattttttaggtgcccagaccacttgctatgaaaaaagagggaattcaaaccaggaaacgaaaacctaagaacataaataaatcaaagacttgctctggtaaatatactaaaatgacgtttgactgtaaagtatttgccaaccttaacagtagagcatatgtatatttataaggtttattttgactgttgcaggtaatagcaataattccattcccatgactccaacttccacctcttctaactcagatgattgcagcaaaaatacttcccccacaacacaacctacagcctcaggggtaagtattaaaacagcatagactcctaaattactgggctgctctctagtaaattatctcaaattttatcttatctggtagtacaataatctaaaccaacagttcagtttagttagttgatacctaagaatagtttttagaggaaattacatttaaatgtcaacaaaatgacaaacttaagtactttacaaacctcttaattaagatcggtatcatttttttatggttaaattaacccaagtaaaagcaagaagttttggtttaaagtgttttaaattgttttatttccaggtttttatcagagttgctatatatattatatgtgtatatttatgtatttccgatgtagatcataagaactatgaggccagtggtttcatagattacagtgcccataacagttaagtagcttttgtttatcctatcaattccagcctttttttctttttttatcatccacccaaagcaaagctcatcataaagtgttatatgctgctgtattcactatttcctttgcccaattgtgttcttgctgggagagcttgccttcttctaatgtaccttaattgtactggcgtttatttcagctatgacaaaacctaggagtgatttgtgccactgtggacaggagatgcctgggtcttcgtgaggatcacagacttagtttcttataaagctgtgaccaaaactcagtttgcctctagtagagagcattttcccaccctaatgtttcccaaatttacctggaatgcccttctaaaaaatactgggccttccctcagacgtcagtgagctccaaggcagggcctgcggcaagcaggactttaaaatgtgtccttgtgacccttgggactacactgagacaagattaggactaaacaccagcatttaaatgcctatttacttagtaattgttttctacatttagttttctcctgaaattatttggggtactttaaaatactacagattcctgggccccaccctggattttccaagtcagagtctctgggtgtgggacttggatatctatctgttgttgaacaagtgccccaggtgaaattggaactactgccccggaggtgtttgggaaccacagacctggtttctttccactgtatttttactggctttaacaaacaaaaattaaatatttaaaacaaaatgtttaaactgtgcttaaaattatatttgatatttttctttgtcctcctacccaaattcttttgagccttttctgtaaggaaacaaaacgtctttttagagtttcacaagggaagaagccttttagttgtttttttttttgcagactcatggtaaagaatgtttctaggctttataaaggtggactccatgctatggtgttgtgttttacaggcaggttagatgtaactgaggattgaaagtggtaaatagaacatgtttcttgggaaatgaaaagattatttaataataattattttttttttgaggctgagtcttgctgtcaccgaggctggagtgtgcagtggcgcaatctcggctcactgcaacctccacttcccggattcaagcaatcctcccacttcagcctcccgagaagctagaattacaggcatacaccaactcacctggctaatttttttttgtatagttagtagagacggggtttcaccatgttggccagggtggtctcgaactcctgtcctcaagtgatccacctacctcagcctcccaaagtgctaggattacaggcatgagtcaccgcgcctggcctaaaaatatcctttattatgccgtagtcctcaggagcaattatgtagctagaggcaaaacaatttggttttctaaagcagggagggagccgcctctctcctagctgaaatgaggactgctgccagctccaagtcacttttgttggtggtacagtccagcttaaatgtggcaaaaagactaatttgaatgataaattgcactgaggtcgatatatacccaacaatgggcttcggggacttggaaccattgtgggtggagtcttgtgattttgtgacgtaaaatttcaaaatttgctattagcaagtcctatcggttgctgtccagcgaaaggagtgaaaagccagtgaaaagggccatggtctggctagaagaagggccttgggagttccatctctggtcctaggcttattgtcccaggaactctcaccagggacagagcagatggaggtggcttgctggtcaatgcccttcagaggaaagatcagttccccaccagaggccaggaggcaaagcaacaaggatgttaaggatggggttggagagtactagtttcacaccaggtcttcagctgcaagcttccatccctgcggtagtctaggcagcctccacggggactgagaagctgggagtggctggtgtgagctgcagccagggggcatctctccgagctctccagcctctgggctgcgcagcagaaacactgactgccattaccagggcagggggtagggttgctggcctgcctaccaacctccccagttccccagggactgactcttggccttgttccgagggcacacacggctggtgcctgggcttgcagggttttatttcatggatgtctccaaaagcctctacctgctgtggccattgtggggaaacagctactcgtctgctggctgcctttggaagctgtccccctgtaagaatacctgtagtaggcttgagtggtgtccccaggttgttttcatggcgtgcctgcgtataactgtggatcccttcgcactttttgatgtcctctctgggtgggctgagccttcatgtgtatggcatggcccatgtggctgccgagtagctgtgaagagtctgctggaggagccatctgtgagcagctggtagaagcatttctaaaaggtgcctgtgttgacaaaggtgtgtcattttcccattttggtcacagtgcataatgttagagggcagctggctttgtgactgattgcctgtaggattttgtgaaatgctgtgggtgaagaaaatatcagatccacatagcaaggttgtatctggtgtttacaaagtatatgtattacatacacagcaccgaggttggcttggagtttaagcctcctaaggtaatgcgtccaccccacggatctccagtgctccctgtgactgactggtagaaattagtagtgcagggtgaccctcgtttgatggggccacggaactacaaagcaaagggcgatcttaggcaccctcccagcagaaggtggaactgggggccacatatccctccatttagagatgtaagtagcagtatcactgcctttctttaatgactgtgagttatagcaaggaagtaaaaaactgttccagaggcccacatgaaacatgctgtttactttaattccccactgaaaaatcagttgtaggagatcaccggtaggcattcccagcaggcttattgtaagtcctgggacatgacaggaacagggttctgacctgcctttcacgtggccatttaagtgatggcaccaggaccttagcatgacacagagtcctgagctctcttggccaggacgaaaggagccacaggagctgagtattgtggaaggggtctatcgtggttgtctgcttctgggagagggggctccagggctcccctcccctagcaggaatgaaggtgtgggcataattcctagtgcacggcattcttccaggataagttgtcctaatgccacgaaaatttttgtgctgctctgaagcctcatgtcttagctttatatacttgttaatctgtgccttcatgagacctgtgtctgggcaaaaaggagacattccttcagataagagtcagcaagtcgatgaccttgccaccttatgactcagtttctcttggttataggctgtgcatgtgctggaggcacagggagggcagtgtgtttctgtctgaaatcaggaggactcacggtcatacagccctgcttaaaatattgcctatttttttcttttgaaattatttttgtttattaaaaatgtatgttaaacttaaatttttgataaatggttgctttctgtggcaaaaatagtctttctttctggctaagaattttcttatccatgcagatttactaaaaaatgtatatttagttgatctaaatagatatcagtttttctttgggctgggtgcggtggctcacccctttaatcccagcactttgggaggctgaggtgggttgatcacctgaggtcaggagtttgagaccagcctgaccaacatggagaaaccccgtctctactaaaaatacaaacttagccaggcacggtggcgcatgcctgtaatcccagctactctggaggctgaggcaagagaatctcttgaacctgggagttgcaggttgcagtgagctgagattgcaccattgcaccccagcctgggcaacaagagcaaaactctgtctcagaaaaaaaaaaaaattttttttctttggcttttattctctatggattgtaagaatactaaaatcttttttttcttgaattccgtttattgactgaattgtattttatagttttttttggttgttatttaggagagaaacatggtaatgttctgtttctgcaataagatttaataagtagtccacaaatggtcctactcctcctatttctcctcctataactcaaaatttgtaaaactggaggatactttatagctcaatccccaaattttatagataaaaagtttttttcttaatttcttttgtaataggagggattaacttggagatgaaattagcaataatatctgaaaatggcagctacagaaaaaaagaaaaaaaaattagcaataagacaatgtctgagaacaaggagtcactgaacatattttgcctgcctaaaaatagtttctataaataattactttaaaaattaggccaggtgcagtggctcacgcctgtaatcccagttctttgggagactgaggctggaggatcacttgagactaggagtttgagatcagcctgggcaacatagcaagatttctgtctctatttctagtttaaaaaaaaaatgaaaaaaaagtaaaccctatttaagttaatattaaaactaccaatataatattgaaatcatcattaaacataaagtgttgaagttaaatggagagagaaatatatatgaccagcccttgctttactggtctttgttccatttgagtaaaacaaagtgccacatctggaattgtttaaaacatggaggtggtaggggtgggtagagagagacaggtatagatgtagatcttactactggtcagatttggacgtgctttaaaggagtgataactagagttggagatggctccgcagagtagaggaaattaaaattagttaggatttttgcaggggaaaaattgggatagaggtatccaggaaagaagaaggcataggaatctttggagctgaagggaaatagttagttcattgtgactggagtgtagggggtaagaagccaaaggcaggaagtgaggctggtagaacgggtggaaagtagatacttgaaaatatttcaaatcaacgatggactttatttaaatcctgcttcggtgacaaatgtgttttctgtctgtacactggagtccaacaattaggaccttcttactggagcgttctgtattttgataattgatgtaaacaaatgtagcatgctcctgcttgtcaagtttacaagcagagtttcctcctcacaattagggaggaaaaacatctgccagctgattctatgcgctgaccttctttaggcctgtactgtaatttctctgcctccagggatcctgggggcaggatggttggagtggctgcctggctacctcttctaatggaaacatattagacatggtgtattagggataggaaatgtgtttcctcacctttgtggggcattgctggtgatatataacttccacaaagagaggtggacaataggctgagagatagagacttaggttcctcgccagctgcatctgggcctggatgggtgggccttaaccactcttttggtctgtttcttgctagtaaataggcgtcatcgttcccgtcccctgtgtgcttctgggacactgtgtgcttagctagacctatttccctactgtagtcactcctgagctgcgtggtcgtttgaaggagttaagcacccataagtgcttgtggccaacagcagtgatctagagactgactcaagttaagattatttgatgtgctctataaggcctctgaagaaagcttaggcaggtaaatattttaaattgttttcatggattttatttcatatataatatttgcatcctgtggtggaaatagaaaaacaccttagtaggtcctgtagcttactatgcattttccagtgcaggggggttctttattagcagatttacactccactgtctttttcttcaagtaatggaatttttttttgatttactgtgcactatggttggtcacaaaattatagttcctgtgaaagagctgaaaggaacatttgtgaaggacttatgctgtgcttatactgttaagttgctcagaggaaagtatgaaggcgagctctgatgcaagagcctgctggggctggagcagaaaattagtgcttcatttttaacttgaatatgccacagagcttctagaggactcgagagccaaacagtggtggattggtcttcgattttctcatagtgatcttgctttgaggaagtttttccctttcctaatactcactcacttataagatagtgaacatagggaggcaggaaattagtttctatcaggtaccttttatgtgccaggtgttttagatacattttattttttactcctccttctaagtgagatgcagaaggtaaagaacagttccaaggtcacgtgtcaaattgagacgcgtggtttcacgttggccgcaggtctggctgatgcggtcagtgttgttgccactacagcgtgttagattaatatgcgatattagttcatttctttgaaatcttcagagagaagaaagaatgttttcttaaagaaattggactagtttgattaataattttagcatcacatatcctcccactgaaacaggtgggaaaactgtgagaagttatttgctcttgaccaagaatgtatttaagacagttaatgcaaattttcttatcaatgttatacttagaaatcaaatgtgtaatggtactaagaatatggcagttgggtaacattaagttaaaaaaaaagtagtaaaaattacttttgttgacatacctaatgtggttataacaaggttcttttaagagaaacacaagattgccatactgaaatccttctaatgctgcgatttaaatccatacacaaacaaatgctgttttggaacttttcagaatgttaaaattgtcttcaatgaatgtttatgaagaaattactgaaaaagcatttcttaatagtgaagtgcctgttttttttttcagtctatcgtccaaaacactcttttctaaatgagtagcaaaggggttaaaaaatcattaatctcccaaagggtctgtgagagagttatgtggttaggtattattattgcctcatttataaaccaagatccggagtgactccttaaggtcacaaaacaagccagtattgaagccgggactggaaccgacgtctcctgcctcccagtccagggctgttaccactcccagggagttgaccaatcatcacagttattaatatcccacttgccacatgctacaagccatgaacataaatattttgttggcattttatcttcatgctccctatgtgccaggctccctttctttctatgttcacagccccttctaataactcacgttcttgtctgaccacattggcctttgcgtgaaagtcacacgtcaccccggcagggaatgttcaagcatgcggatttgcatactttcattctgatctcaaggctttttctagacttcctttttttttttttttaaatctcgtgtgtgtgtgtgtgtgtgtgtgtgtgtgtgtgtgtgtgtgacagggaggatggtaagaagtagtttaaaaatgcattgtgtgctacatcaatatccaatggctttgtacattaggaaacagtaaagctttaaatagtttgtaacatatgtccacataatttatcacagaattgtggtttatttaataagtgactcattatcactatctgatagccagaatactggataaagaataagtgtgggcagaagttattcaccatttcttatagcctcatcccagaatacagctcttctttgcaaattacagattctttgcagttttctcccacccgcccccccaacgcctctataagaatatacaaaattgtcagaaaacatgaaataatgttacgggaaaacatggccaaatttaagaaatctggcttagattgctctgaaaggttattgctaaatgaatcttcgaagaaaacgaattcctttactggaacaaaagtaatttattatgcatttcatgggtgtctgccagaagagttactagcagtatgaagatccagtggatatgaattaagtacaatctgttagttctgttcatgtttagacctacctgttaattttctctgaaattttaataatttaaaaaagcatctccatagacaggtgttggcaatgtgacaattcaccactcagctacccatcacatcaggcttttttaaaggcccagtactcagaatttgtgagactgagcacaaagacattattttattgacctcatattttaagaatgatttggacaaatacataactaggcattgattctaatgtcctgttggggtcttacgagtaaacggttccaagtcaacatctgacgatgcttaaatcatgatccgacttgatggtgtgctgcctgttttggttgttggcctggcacggtttcaccagagctgggccacatgctgcagaaccatatttttattttattaaacacaagtattttacatttaaagctctcattaaatttagttgcttgattcgtggtgaagcctgaatatggtcaaaagtttattctgggggttcacggattagcagctgggaggaaacagattccagcagccaggcgctagctccagctctgtctgtgtgagtatagcaagctgccaaggttctgtaaagcctctgttttcctccttctactaaaggggaaaagtaattcctaccatctggtccttaggagtattgtgtagagtgagtgggagatgcctggagacctctttgaagtttaagaagaatagcactacttaaatacgggtcttggaagttaatagtaatcagctttatttgcgtggcattttttttcatcccaagatattagaataagatcctcactttcttaatggggaaatttagagacgtagagttattgtgttaagaaagtaaccacattttagagatttgtatttcactgatagcaaattttttattccttctgatacttagtactttcctaatgctttttgtggtttaagtgcattgtaaatgcttcttggtatgttttctgtaattaagatggagagattaagatgctcatccatctcctgaaaagtcagttttgttataaaaattaagatcataattcaccaggttttaaatcttgcctcaggattctgtcccacttaatttgaagattagaatagtgtaattcattctgattcatttagaagataagctttttctttagggtcctcattgacttcaagttgtgggacaaaccctctcccttgcaatttatatttgtacatgagtattttggtgataatcccagagtacttataaagtttggcgcctttcttcaccacaacatgcttgctgttgagtgtgcacagatacataaagcaatttgctcttttgtccagaatagattatgtgcatagaattgctttcgtcttcttgaaaagggcagcatcccttggtgtggctataaccttgcctactcaggcctagaaggggcgagaggggtatgggttggggcagagtgggggagcagccggtgaaatttccagtaaggaatttgtttgccgaattaaatatacaaaactattctgctgaatagttaggtcatcagttgaggtgacggtgactctctctctagagaaaaggtgtccatgttcctttgttttattaagctgttaagaattcgagagtttcattgtgattggttttcacatgtcctggtggagacagaatttgtgtgtgttcatgtgtctttcatgtgtcaccttctaaactattactgtcactttgtatctggtcctctgttacctccagccaaactgaaatgatcgtagtttatatagtggaagttacgatttgcaggaaagcatttcccctttgttggaatttatacaaagtttttaattcctctttggaggaaggcagctataaagcaccacaggagtctaacctagaggttacaaaagcagagaagagctttggcagtgagggacggctggcttcccctcacacaagaaaaagccgtaagcacagtctcactcagatgtgtaggaaggacggatcagaggctgggggagccgacagtctgccttgcagtgaaggaggcatgtgatcaccatcaaagtcttctgctctgggaaggatcacacagtcgtccttcagcctgcctggggcgcagtgttttctttcctcagaccgaaactgcatgaagagagattccagcaaggaagatagagcatgccccgtacactcctctctggttttcttcctcaaaggaaatttatgcatgtaatccacaagccgaagaacccatgtttttctttggaaaaggctacgccctttcagggtttccttttctcggctgtgttgccttcccatcagaagctgtctcttgccctccccattatgggatgtgcgaaatgaaggaaaacagagacactgctgggcatttgtctccatgagttgatccaatcagaaatctttgacttttcagatatgtgtccaaaaatgagtgaaggctcctcacaggaaaaaaaaaaaaaaattctaggtgatctaaagatgaactgtggctacttctcaggctagcggatattttccatgtcccaatctgtagcagcccaagctctccctgaagtcatttactcctttaagagggagttttccagcccagctgctctgcctgtctcccacctaacccggccagctttcagtgctaagcccaggctgggtctggccctgataacacattctttcaacaggaagtgcctccattttcagttgtctgtgggagggtggagggcagataagccttgaatggaaacacagagccgatttctgctccaccctccttgcactttgatcagggagagagcagggacctccgcctggcctgtgctgcctgccgaaaggagggaggatggttgagctgtgggcattccggagctctccctcccttttgttcaggaacgtttgtttaggttggtctaggttagtgaagtgcctgcttttgcagggttgtgatgtctgcgatctgaactaaagtcctttgaagggttgaattatttgtgggaaaatatatcaaccaattgaaatttatacgtgtgtttgtatgtgtgtgtattaggtccaggatcatagtatatttttctctgatttcccccctccgcccccccctcccaacacacacacatcgtgttgattctcagtaggcatctcttgactatcatcagtgagggaaagggacttaaaagatgaacaataacaggacaaagccaggcttcttaagaagagtagctgtgccaactctgaacgccttctacttttagaatattggtttagaggccaggcacggtggctcatgcctgtaatcccagtactttgggaggtcgaggcaggcggatcacttgaggtcaggagttcgagatcagcctggccaatatggtgaaaccctaactctactaaaaatacaaaaattagccgagtgtagtggtgggcgcctgtaatcccagctactctggagactgaggcaggagactcacttgaactcgggaggcggaggttgtagtgagccgagataccaccactgcactccagcctgggcgacagagtgagagaatatcggttttgagagctgaagttacgctgatgcatggagctgacgtgttgattgttttaacttgtatagaactgtgagattcacatgtgcgtggctggccaggccctggcctgtgccaggtggcagggagatgatttcaggggcggatgggggcccttctgacccgccctcctgttagtgcctcgactctggttccctcctattttttcaagccactttctgatcccatgaaggttggcttgtccctcaagtgccttgtgtttctggtactcatgtcttctattcatccccaaagttattaggttggtgcaaaagtaattgtgggttttgtcattactttcaatgccaaaaactgcaattactttggcaacaacctaaatagatttactatgcaattcaatttaagtattcaaagaaaaatattcaaagaaaggtatagatggctaatagacttggccctctcagctagtcccctgtttctcccctcctcccaggggacctttgtaatacttacacatgtgcatggataaattgcagttatgacgtgtaattcatatcttgctgtttttcacttaacatggtattacaggattttttccattttgctccatgatcttattatttttaataattgcataatagttcattgagcggatgtgccctgcttttctaaaccgttcccatattattagacattagattgtttctatagtttctactattagaagtaaccttgcaacggttggcttcctttgcggagcctttcccttcttttgaattatttccttataatacatttccagaagtgaaattatagggcgaagtagggtctaaacttctggatggctcttgacattgcagctaactgccttctgtaaggtgggtgtaccagaatttagctccgccagccatgagtgaggggactggtgttaccatgtaagtaacatcagcctttctttgcagtatttcatgtttaaatattattatatgtacacataaaataaggctaccaagcattgggcacaaatacttgccccattttttttctgacaggctcagctattgcttttaattgcaaatgagcagatttatttctaggagtgcatcactcatggaatttgaggtctgtctgccctttgatagcaggactcttggcctgccaaatagcttaacattttgtctgaaaaaaagacaggttattttcgccaattgcttttgggattgttattcaggtgtaagaataacattcagggtgttaacgtttctttaatgtgggttgttgaaaaagagtcagtgagtcaccaggtgtggtagctcgtgcctgtgatcccagcactttgggaggctgaggcaggtggatcccttgagctcaggagtttgagaacagcctaggcaacatggtgaaaccccatctttacaaaaaatacaaaaattagctgggcatggtggcacatgcttgtggtcccagttattcgagaggctgagatgggaggatctcttcagcccaggaggtggaggttgcagtgagccaagatcacacccagtgcactccagcctggatgacagagcaagaccctgtctcaaaaataaaaaataaaataaaaaagagaaagagtcatgagacttttgaatggctacagaacactttgatttatttttgcgaagaactgtcagtgacagtttgaatagggtcattctggaggtggttctctttgagctccaactgtgttccgactgcttctgcccctgcctggtgatggggtaacttgcttgggctgaaggatagaatgaggagaataaattagatccaagcctcttaaccttaacaataataattagataacaagagtagcttatactgacataatctttactgttctcagacactgttacaagggctttacatatattagccaattctttttttttttttttttgagatggagtttcacttttgttgcccagactggagtgcaatggtgcaatctcggctcactgcaacctgcctcagccttctgagtagctgggattacaagcatgctccaccttgctcggctaatttttttgtgtcagtagagatgaggtttcaccatgttggtcaggctggtctcaaactcctgacctaaggtgatccacctgcctcggcctctctaaagtgcagggattgcaggcgtgggccaccgcgcctggcctagccaatttaattcttgcaataatcttatggcataggtgcctctttttatcccactttataggtgtggaaactgaggcacacaaagctgtatgtcaggcttctggtttacctctcccacatggtctgttcactcttttgcttcatccttctgtttttcagctggcttttcttctgaacaggccaggtgaccacctctcttcatccgccctgcctcccattttgaacatccttctctcgccaataacaatagcttccctttacggaatgtttaacatggcaaggcaccttgccttcgcttttacaaacgttagctcatttaattgtcgcaaccatccctgaggtgggaaatgtgaggacccaggcacagaggaggctcaggggggactgcactcagcaggggactgaatcaggacaggacttgagagtccaagctgcttcccctccttctcatactcctgtgtgggctgcctttggttccttgcccaggagtccttgccctctgctattccttttctgactcttggtctaccttcctgtctcagccactcatttgttgttcatgataagcagccaacagtcgactttctaatgtgtatggatcctggctccccacaaagcctgggagctcctggggcagttgactatctttcaggctcctgatctagtgtctggctgtcagttgttgctttgccaatgtttctttttttcttctctttctttctttttttttttttaatttttactttttagagacagggtcttgctctgtcccttaggctggagtgcagtgatgcaatcgtagctcactgcagccttcatcacctagactcaagcaatccttccatctcggctccccaaatagctgggactacatgcccagctaacttttgtattttttgtagagacggggtctcccaatgttgcccaggctggtctcaaattcctgggcttaagtaatcctccctcctcggcttcccaaagtgttgggattaaaggcacgagccaccgtgcccagcctgcttatgcttcttgttgctggctgtggtggtggtgacagatccctctgctgtcttggcacttccctgccatttgagatgggctatttcctgggccagttcaggaaccctctccatttcagaaaataacacttgttgcggtgaagtcagatttagtcagaggcatatgctgatgtgcctgttttcgaataagaaaatcaatgcaaagttggacgtgagatgtatcattataaggaagctcactctaatagttcctttctaaataaataattcttttgtaattgaatatcatccttttgcttatttctttgagggttaaatctggatccacactggatttgcttctggtggagtctctggaattaagggctaaagttaatcactatgtttataagtataaccaagtttatggcattcagtttgttggacaggattattttagctttttcagaattgccacaagaatccatctgaagctttagacatctcactgatttttgtgaaatttgctttttaatgcacctaaaaccctcagtttaagtctttacatttgtgttatataaacaaaagtttgggtgtggggccagtgttgttgctggattttcataaaacctcatttctgctgggaaagggaaggagtggttacctgtggaggggtcgggtttggtctgtctggttgggaggaaggaagtttgggtgcttagactcagagggcttgctcgcctgaagtcctgcctcccagcctcatgcccttatggtgagggttgagagcaaaccagatcttgttggaaaacgagtagagttggacctcattcacttgcaggccgtggaggctcggcacacttcctttctgttccgcctgtgtctggtgccagagaaatgctgttttaaggatttaatgggattatgtatgtaaaaaagaaattctgtgaaaagtacacaatgtcctacctctgtcaaataacaagtatctggtaatttatagaatggagccctgaaagcttggaaggaataagagctcctgaacttttagaaggaaaaaggtgattttaaaaagtacatgattatggcgaaatttttcaaaaagcttctcaaaagcaactttattcaaactgttgtctaaacagattttagttattttggtttgattttactaaattatatgatgtttcctatttggcctttttcatgtgaatgggaggaatgggtggaacagggcaaaggtgaacttgtgcttcaagaaatcattgtggccaggcacagtggctcacgcctgtaatcccagcactctgggaggcccaggcaagcagatcacctgaggtcaggagtttgagaccagcctggccaacatggtgaaaccccgtctctactaaaaatacaaaaattagccaggtgtggtggtgcatgcctgtaatcccagctactcgggaggctgaggcaggagaatcacttgaactcaggagatggaggttgcactgagctgagatcgtgccactgtactccagcctgggagacagtgagactctgtttcaaaaaaaaaaaaaaaaaaaaaaagaaagaaatcattgccatgatcatggcagatagaggatgttagcattttctttataacgtggtctgcttcagacatggactgttcttgtaaagaattaaggtaaatgaggtagattttaaagcctgtatatgcataggtttattttccatgaagtcaatgttcaaaaatttcactgatcagggaatgttgaactgtgcagcttttctaaaaagtctaaaaagactttgccatcactggataagccttgttagagtgtgtgtgtgtgtgtgtgtgtgtgcgcgcgcacgcatgcgtgcgctctgcattttctctttggaaatgatcaggttgtgtgtgcatcattaatgcctattcacccacacagtgaggtttgtttcacagtcagagatcttagagcttggcactttttacaaataggatttcttcagttccccttccttttgtccagctttgcatcttgccagtggctcctgccctgagttctaaagtttcgaaggcttaagtggccagggtcaggtcagtggcactgtgtgcaatgcagggaaaggcccccacttgctgggggcaggggatagtaacgccggcttcatttctcctgccctgggtctgcccaggagcagctctggccctggctgcacagacccgttcattagctcccatgtatttcactaccaggattgtaaccgcttctcaccttctcgtctctcctctgtgtccccctcttctgccaggcgggtgccccggtgatgactggtgcgggagagagcaccaatcccgagaacagcgagctcaagtattcgggtcaagatgggctctacataggcgtcagtctcgcctcgccggccgaagtcacgtcctccgtgcgaccggattcctggtgcgccctggccctggcctgagcccacgccgccaggaggcagggagggctccgccgcgggcctcactccactcgtgtctgcttttgtgcagcggtccagacagtggcgactgcgctgacagaacgtgattctcgtgcctttattttgaaagagatgtttttcccaagaggcttgctgaaagagtgagagaagatggaagggaagggccagtgcaactgggcgcttgggccactccagccagcccgcctccggggcggaccctgctccacttccagaagccaggactaggacctgggccttgcctgctatggaatattgagagagattttttaaaaaagattttgcattttgtccaaaatcatgtgcttcttctgatcaattttggttgttccagaatttcttcataccttttccacatccagatttcatgtgcgttcatggagaagatcacttgaggccatttggtacacatctctggaggctgagtcggttcatgaggtctcttatcaaaaatattactcagtttgcaagactgcattgtaactttaacatacactgtgactgacgtttctcaaagttcatattgtgtggctgatctgaagtcagtcggaatttgtaaacagggtagcaaacaagatatttttcttccatgtatacaataatttttttaaaaagtgcaatttgcgttgcagcaatcagtgttaaatcatttgcataagatttaacagcattttttataatgaatgtaaacattttaacttaatggtacttaaaataatttaaaagaaaaatgttaacttagacattcttatgcttcttttacaactacatcccattttatatttccaattgttaaagaaaaatatttcaagaacaaatcttctctcaggaaaattgcctttctctatttgttaagaatttttatacaagaacaccaatataccccctttattttactgtggaatatgtgctggaaaaattgcaacaacactttactacctaacggatagcatttgtaaatactctaggtatctgtaaacactctgatgaagtctgtatagtgtgactaacccacaggcaggttggtttacattaatttttttttttgaatgggatgtcctatggaaacctatttcaccagagttttaaaaataaaaagggtattgttttgtcttctgtacagtgagttccttcccttttcaaagctttctttttatgctgtatgtgactatagatattcatataaaacaagtgcacgtgaagtttgcaaaatgctttaaggccttcctttcaaagcatagtccttttggagccgttttgtaccttttataccttggcttatttgaagttgacacatggggttagttactactctccatgtgcattggggacagtttttataagtgggaaggactcagtattattatatttgagatgataagcattttgtttgggaacaatgcttaaaaatattccagaaagttcagattttttttctttgtgaatgaaatatattctggcccacgaacagggcgatttcctttcagttttttccttttgcaacgtgccttgaagtctcaaagctcacctgaggttgcagacgttacccccaacagaagataggtagaaatgattccagtggcctctttgtattttcttcattgttgagtagatttcaggaaatcaggaggtgtttcacaatacagaatgatggcctttaactgtg

SEQ ID NO: 27 - DNA, 32850 bp, Pan troglodytes
  misc_feature (2214)..(2597): n is a, c, g, or t
ctccagcgcccagctgctcgctgagcgcagttccgacccacagcctggcacccttcggcgagcgctgtttgtttagggctcggtgagtccaatcaggagcccaggctgcagttttccggcagagcagtaagaggcgcctcctctctcctttttattcaccagcagcgcggcgcagaccccggactcgcgctcgcccgctggcgccctcggcctctctccgcgcctgggagcaccctccgccgcggccgttctccatgcgcagcgcccgcccgaggttcggctgcttcctcctcgcgcgatctccccgctttcctcccctccacccctactcgtcgcgggcccctggcctccggctctccggccctctccaggccgcggtcggctccgacggtgtttccctcctcccctccgggcgggctgaggcggctcccaggctcccgggacaccgcggaccaacttctagtctcttttcctctcctcgaagcgcttatctgcgcgcagccttatctccgagttatctcggcgcaaaggggcgggagccggtagttaggcaggcagagaaacttctttcttgctatctagccaggtctgtgtgtgggcattaattttagtgtggtaatctccgatgagccgaggcgatttggaagagcagcctggaggaggccagcccggctgcatttcacctccctcccccactccctccgagtctccctgtcattcttcctgctctcccatttggggtcgcctcggctctggggcggtctcacgctccccccccagcccgttgcgttccccctccttttctctgctctccgctccaccccgctacgtccgattccggaacggtccggcgtttctgctgctggagatgaccgcggggtgggccgggtggcccggccggcgtgagcgcgcacgctggtggctgcaggcgcgggccgtgtctaaggtgtgcggcgccgcggggacgccggtggggctggcgattcccgccccacaagctctccgcattgcctctgctgggaaggacccagactgctgcccccgccctggcgtcccactttccctgggccgagttgcatttctctctggggctcgcgttcgggctggtcagcgcagtccgggaagctctgggagagccaatataggagaacgcggcggtttcgttttcggggacaggttgccttccttacgcgaagggttttcccgtggggaaccctcaccccgaggcatttcgggagaggggcatccgcagagaggcgggatgcggcggtgccgacacgcacagctacttaaattcttttgtgtgtcatcagcccgggggagacactttagggcggaaggaaagcctcagccagcttctgcagatcactcttgggatctggcgcgcgcacggagaaaggatgcggccgagggagtgggcggggaggacgcggggaccggagcggtgcctttgagggagggctggtatcccagcccttccagggccctgtggcggctgcgcaggctccattcccctcccttgttgatctccacgcccggggcagaaataggatctttgagaagtctcaaatgggatctttgagaagtcagatcccatttgaactagaaaaaggagtggaggcgaggtagtgtgcagcctacgctcttggtaacccgtcgatctcctaccatacccgtctcccccaccccacctcaggagctagacgtcagcttggagcggcgccggaccgtggatggccttgactgacggcggctggtgcttgccgaagcgctttggggccgcgggtgcggacgccagcgactccagagcctttccagcgcgggagccctccacgccgccttcccccatctcttcctcgtcctcctcctgctcccagggcggagagcggggccccggcggcgccagcaactgcgggacgcctcagctcgacacggaggcggcggccggacccccggcccgctcgctgctgcttaaacaaaattaaaggtgaaccatccttatccccccttcttttgatattttgctaattttaaatattttattgttcaataataggctttggaaataattattaaaaatagaatatcaacatttatcaacttagaaacagttaacatgatttattttaaataaaatgtgtggtatttaatatgtcagagagaaagataccaaaatatcagtattatgaataatattaaaactgtagcaaaaannnnnnnnnnnnnnnnnnnnnnnnnnnnnnnnnnnnnnnnnnnnnnnnnnnnnnnnnnnnnnnnnnnnnnnnnnnnnnnnnnnnnnnnnnnnnnnnnnnnnnnnnnnnnnnnnnnnnnnnnnnnnnnnnnnnnnnnnnnnnnnnnnnnnnnnnnnnnnnnnnnnnnnnnnnnnnnnnnnnnnnnnnnnnnnnnnnnnnnnnnnnnnnnnnnnnnnnnnnnnnnnnnnnnnnnnnnnnnnnnnnnnnnnnnnnnnnnnnnnnnnnnnnnnnnnnnnnnnnnnnnnnnnnnnnnnnnnnnnnnnnnnnnnnnnnnnnnnnnnnnnnnnnnnnnnnnnnnnnnnnnnnnnnnnnnnnnnnnnnnnnnnnnnnnnnnnnnnnnnnnnncggcctccgtaccacctgcaggggtcgggcagtgggccacctttcacgcgggcggcgcgggcgcgcaccccggctggcctcatgcctcggccgacagccctccatacggcggcggaggcggcgcggctggcggcggggccgcggggcctggcggcgctggctccgccgcggcgcacgtctcggcgcgcttcccctactctcccagcccgcccatggccaacggcgccgcgcgggagccgggaggctacgcggcggcgggcagtgggggcgcaggaggcgtgagcggcggcggcagtagcctggcggccatgggcggccgcgagccccagtacagctcgctgtcggccgcgcggccgctgaacgggacgtaccaccaccaccaccaccaccaccaccatccgagcccctactcgccctacgtgggggcgccactgacgcctgcctggcccgccggacccttcgagaccccggtgctgcacagcctgcagagccgcgccggagccccgctcccggtgccccggggtcccagtgcaggtaagggtcgcgcctcaggttcggggtgcgggtccaaagcgctggggcgcacgggggacgtggagcagctgctccactcgggccctgttttcaggactttctcgtccgggtgcgcggaggtcggcctggtcccaggaaggatttgcaggcctgtggctgggtaacccagagtccggtagcgctgaggcgagttgtgccaagacttgagtctgttgtgccaagttcctttccacggatgagactaaatgcacatctgtaccttcgtgccttggggaagctcagggccttgatgagtagtgaatggcatctgctattggggaaaaacgaggctgggagggaactaacagcgcttgagccccatcgcagaccctactttgggtgagtggaagaaattccacgatgggagtaagtttgggagaatggcgggcacttgatccacccccaaacagacacacaagcacatgcaggctcacccagtttaactctccaaagggtgcgtgtttgtgttttcctagagaagggtatttagaagagcacaacagaagaacctagatgttcctagggaagctagttggcgtctcctctcccacaagggagagagggaaagaagagagggcacctggagtggtcagacttgtgacttcatggtgaaggagagctggtggataggcccttgggcttggcatcagctgggccttggtctggggctgctgctcacatggccaggctgcaactcagggatcctggagctggggcacctattctcccttcgaagtttagcccgccaatttttcagtttccaatttgactcattttttcctgtgtctgggagccattagggggtaaaccgtgaaaacgctattgtcaaaaatacctggaaatacctcgttttgaaaagtgttttgtttactccagcacaggagtgtgggagccctgttaggctgtttttctcagatgcaacattctgcgtccttggtgattacaactggcttatcttaccttatatttcacctgtttgataatctttctaaggaaacaacatctttttttattgttgtttgtttgaggggaggtgtgggggaggccccttgagtcacagaggtggcagagtggaggaaggcacattactccaaacagtcctaccccggtgtcttgtgtatcccaggtctgtgcttctcgtgggagcctcgacgctacctttaggacagcaagtcagtcctaggggccaggattccttaggataaaatgggacattcccaaccttgtccgcaaaagacacgctggaaatgcaagtggtctgaaagagaggcaaccaatttgaacagctctctgatagcctgagttctttctgtcttcttccaagcgctgcaagacttggtctcaaaattccctctttttagttttgctctgtcgcccagtctggagtgcagtggctcactgtaatttctgtctcccgggttcaagcgattctcctgcctcagcctcccgtgtagctgggattacaggcgcgcgccgccacacctagctaatttttgtatttttagtagtttttgccacgttggtcaggctgtttttgaactcttgacttgaggcgatccattcggctcagcctcccaaagtactgggattataggcgtgagccaccgcgcccagcgaaattccctctttttgcttctgctgcaaagctggtcctggagaccatttttcccgtgtgtgtggaatgggatgggggaccctgttgagatttgcactgttggcttgggacttgagagtcagggctctcatccttacctctgcatagggacccatgtttggctcccaggagcagagagatggagaggctgggaatctctaaggaggtaatggttgggtgtgaagcttcttttgtcagtcggggagttctgtagggaatgtgcaagggtgttgtgagttgggtgaggggtagtatctgcagattgagccagcgcctgcagctctgcctatttcttgacacaccttagcctgatctccaggttcctttcctccaatcttccagcatttcatatggctgagagagtcttttgatgtttacagtaactggtcctgtatgagaaatccttttagaggcagtatggggcagttgtgggcaagttaatatgtttctttttgttttaaatttagcctacacttttcctaattttttcatcttctgggcacaccacagttacaggaattttctgtagacccagaagatttgttattttttaaagtattttttaaagtatgttttaaaaaatgggaagggatttgggaacacccagcttttgcatagagtctgttaggaaatcaggaagtgactgggaccaagccagtattggggtgaagggtggggagtgagtgaccctaactttgcttgtcctcacaggtattctgaggccagcttcctagctagatttcctgtttcttagatttttttttttttttaaacaaaccgtttttggagacagacactttaaacaccagagctaaaacctgagtgctgaacttgatcaacccgcacaatttggaggcttctggaaacccacactatgcacctctcgctgactgggtagatagggtgagcttactctggggtgagctcagagtcctcacactcctttatttcctgggtcctacaccctcctaagcgcctgcagaactgtgagtccctgtgtcttggtaccacacacagaaagacaggtggtggtgcccttctcccctgaatctatcactccccaagggcaccgcaaacagccatgttaggagagaaatggtgagttgaaaaggggaaacttggtgagcaagcccccagcttttatatcttatagcttttataaagacagcattttttttttcctttttagtcacttacaggattatagctgcctggtgggtttgggaaagaggtagggagggaatgagagagattttattcaactaaaaataagcaagcttcctaggttgtatttatccaaagtggacttttaattaaattttgtctttgggttttcagatgactaaatagttctacctggggagttcacactgtcttctaataggattcttattgttcccagtcataggactgggttttccagggaatgccccactcctctatccagaggggctctgataggtaacattttaaagtcaacaacaaagacaaataccttgtttaacttcagtgtccttgaagtcctgagcattttactgattaccgtagtcaatagtggcttttagggcggagaagaataaatctttgtgatgtgttataagttgcagtatccccatgacaactttgaactcgggttgtgtaggatgccagtttctttaaaacttaataagaaatgagaaaagagacttgttttgtaaatagtattaatggaattaaagtttttatgctaaagtcatatttaaatatcgttaccacacagttgatagtagacacaagcaataaactgcaaggggatgagaaagaaccaaaaggttcactagcacataatcttaagcgaaaactctgaagtgtaatgtttatttactttaaaaagtgattcaggaatgcttcttcaataatgcaaaactaggacatttaaaccttctataatctaaagaaccttaaatggtggtctatacttttttttggtctatacttacaataagtacctttctcatttttagagacatttattcttccatatttaaccttcttgagaagtaataaatgttacatttactcttaattaggatttgtttttattagcaggtttaggttattgtgaattctgaaaactaaccaaagaataataataataaaattatgtaaaataaacacattttaaatagattgcataactcaaaatgatcactgggaaggtcttggtaattttctcaatcagtaaggtatcaaccttatataaaaattttgcagatagaagcagttggacccacttctaaatcgggattttagcatttgatctttgtggcatgaaaataaaactctgtgcttaatgttagtgcatttttcccctgaaaagatgagagtaatctcatttctagtttctaactaacgtaggtgcctaagaatagtacttttaatttcacttgtgtatctttaattggagaagaggcacatatggacgggtggcagatgtagaaaatacttttttaaattacttgagataaaagtgaatgaggcagcctcgctgtgtccccggatatttgtgggttgcagcggggctcagtggtcagtatttctgtgtggcttgctcgggtttggcaacgacgtactgtaatgatgatggatttcagtctttaaaagctccgggacagcctgagagtaggggtcaggggactcaagccgacctccccaccgctcatctcggactctgacgtcctctgcttccagcactgtctctttcccggggtctctactggggcgctccgggtgtgcagaagtattggacaaatggtcagtggagcaatagtgacgaaataaccctgctcctggctttgcggccaaggagaaaagcgcagccgggaagggcacgggcagggaagccgggcaccggggctgggggccggggtccccggggtgacgcggggagggacgggtccggcgcgcctctcccgccctcacgcaccgctgtcgccgcagacctgctggaggacctgtccgagagccgcgagtgcgtgaactgcggctccatccagacgccgctgtggcggcgggacggcaccggccactacctgtgcaacgcctgcgggctctacagcaagatgaacggcctcagccgacccctcatcaagccgcagaagcgcgtggtgagtgtgacccgccctgcccctggctcgcggccggccccgggctctcctggcccggccggccccgccctggctcggcctgccttgggcgtccccctcccaggggacaggtgcggccgctgcggtcccaccctagcggggacccagcggtaccatcctgtcccagctgttccaacgcccacccgctggcgcccaagtagaggttaccccgaaactggcgtctgggaagccaagatagcctttccccatgtttacgcgcaggggatgacgttcgtaaatgacaaaaacaaaaacaaacaaaaaaggaaggtgcaaaatgttaccatgttttaagcaaaaaaagaaaaaataatctatatatctctaggtgtacttgccaaagcaccgtaataattctggtaagataggcaagaaattggtgatggtaacccgaggagaaaaacagtagacctaccgaggccgggcgaaggaagacttttttcactgtgtatggtttagattttatgcttgaaaaaccacgctcacttataccattcgtcccccaaatagaatatgccagaaatccacccactcacgcctcctcacagccacattcttttgggtgccgtttactttgtcctttccaccttcttggtcacttctacctcctatcctcaggtgtatccccaaataccatatcttggattgcccttgagcctggtgaaaatttatttgctctaacttttgttatttcaaaatcagagaactttgtagaacttgagtaaaagtgtggtttgtatgttcttaagttgagcattttccccaattcgcacacgttttactgttttttttttttttttgagacggagtttcactcttgttgcccaggctggagtgcaatggcgcgatctcggctcaccgcagcctccgcctccagggttcaagcgattctcctgcctcagcctcccgagtagctgggattacaggcatgcgccaccacgcccggctcatttttttgtatttttagtagagacagggtttctccatgtaggtcaggctggtctcgaactcccgatctcatgtgatcccgcccgcctcggcctcccgaagtgctaggattacaggcgtgagccaccgcgcccggccaccatgttttaaagtaagggaatcctgatttcagggattaatctcgtattgtcattgttatgtgtgcttcctagccagagagagtatttaccgctgtaatggttagagaaaataaaggaaagctttcaccagtcccactctaaggttaacatttgtttagcgaagtactcataatctaataaccctttaaagctaaatatgttacagttagatgccagacgtcttaagtatcccagtaatttatttgttatactctaattagcaggaacaaatgctacacatgttgtttgtgttaaatagattagagtgaaattgcatcacaatgtaagtctgacaccttaaagagaagcaattagttttatggttggttttgttttaatgcatgtaaaataaagtggccgaggttaatttaatgagtgtatgtgccttaaactcgttacaacctcccacagcttaaaattttctttaaagggtacccttaactgcagtgtgtgactgtgagtttcattttttcttaaatgcatcatattaaagaagaaaaagtagtaactggaaaatatcccacagaagttccttgttttcatataatagacaacacatgaacaatgaaaccgatttatttttctggaaaggcacattgagctgagtactaaccgaactttcaaaggtaacattttctagagattgagcaaaaatttggtggaatagtagtcatttaggttccagttgcattataaatttgatctagtaacatttagatagtgccatttgttttgtgcatgtaccagtaaaaataacttagaagaaaaaaaagaacagtttttagcatttctgaatcgttagctttctttgtgcttagcaggtgtcttggccataaccaaggtcagcaaatatgctttgtaaatgggttataaatgataccaattgaagggtgtgtcactatcaattaggtctccttgtgggcttcttatttatggttttgatggatctggcttagttctcagaagcagaatgttgaactcaagtttgtttagccagcactatagaaccaatcactgtgaatttgaacttgcaatacattgcaaaataagagatttatggtgtaacttgaattccttgtcagtgaggaatatgactgagatcacttgttacaaggaacttttataacccattcacctgcatttcacatgtttatgaggactggcttcacttatgatctgcagttgacagtcataaagtcctttgttataatggcaaattctgataaaaagtttgcttcacattggctccaaattccactggaaactgtcataaatggctggtttataaactgaaccttcctgtcccttgtttactgatttcacatttatgaagagaaaggaatcctttcctaaaaaattattttcttttaaccacaaagaaagaaaaaagaaaagcctggatgtgtaaagttttgttaatatgttgtcatcattttagcaaagcagtttcccaggtagctctcctgtgagccaagcatactcatttcaactaaaggcaaattgattcttagcactgacttcctagaaatgttgtagtgctaaaaggtttgccagtgtctctgtttataacttctctgtagagtgatgctaagtaatgcaaccggatgtaaaccataaatgcagattttaatttcatcttttaaatttcccagcaaaggttttggaagtctctgtcctgtaatctgtgaatattcgatacatactcaatttacatttctcttcttcattctttacaattgatcttaacttcccaaattttgtaattttcaacttgatttggtcctgaatctttctctgattttttttttttaactatggaaagcttcacgaatttgggtgtcattcttgcgctggggccatgctaatcttctctgtatccttccaattttagtatatgtgttgctgaagcaagcatccattttttttttaactgaagctatgtcacaatttttaaagtaatttacaacatttgaaaggaaatctaagcttggcaacttaaaaacaagttttatattttgccattctgggtaagaagttatattagcttattataattaacatgtagtaatctagaggtaataaattccctttaaggctgttatgggcataaagaaaacatggaaatgggagtgacagtggcagacaggtggccttttacctttcctggtaataccaattaaccctttgcatgaacgaaattgagaataatactgatagggcaaatatattagtatcactgcatctaagacagtggcagcattaagagtatgccataaaatttgctcgtatcctttgtaaaatagataaaacaaaaatgcaggcagcaggcaatcatgatggtaattatggaatgtattcaaatatatttcttttaaaaaaaaaaaaacttttacccctcttctgaaatccatttctaataatgtactttcaaagtttccattaacgtactttcaaagtttctggtttactcctttacatatatctgagaaatagacctggtgatctccggttttcaggggaagtggagactgcccagagccatttagcacattagcaagtggcttgtgattgcatttcacgacctaaatcttagacctgtgactatagtgcatggccaattgctgtccacggtggggggcgggcggcggggaggtggggcactttcatgttaatgtctacttgtgttgttacttctggtgtgttttgagtataactctatttggcgggcagcggggaggtggggcactttcatgttaatgtctacttgtgttgttacttctggtgtgttttgagtataactctatttggccaacttttagaaaatcttttaattcccctaaaaaagataccagtagtatctgggaaactctaaattggagaagaaaccatgggtgaaactctccttgatatgatgctggtaaaagctttgcatgaagttattggccaactatatgactgctcccgggtattcttgaattcacggagacaggctagctggagaagtaaatcaaatctatagggtccagcacactatgcaaacctcaaatttcttggcccagaaaagtcagtctaagtacactgcaattttttttctcaaggaccatttcatttataataaaacagatacatacttgttgatgacagggacaaaataccttaatgtatgtatgtaatatatatatatgtcacttatatttttccacttatgttcttgtactgtttctagccttcatcacggcggcttggattgtcctgtgccaactgtcacaccacaactaccaccttatggcgcagaaacgccgagggtgaacccgtgtgcaatgcttgtggactctacatgaaactccatggggtatgccatgtattctgctcacttgtatatacatttagtatctggtttgtatgtgatatcagttacaaagaatcagcaaatgaaagatactcaagtgaaaattttgaatgcatataatttattactgaatatgtttaatatattcagtgtacatactgaatatatttattgaattgaaggtgcttttaattataatatgaaatattaccttatgcaccagtaggaaacaaaaaatgccaccagttgaactattgcaaacgttcacttaagacacattccacttttagaaatgtgaaaatgtgaaaagtgtgtattttagaattggtaatatggtagtaaccgtttttaaaaatgcacaattaaggaaatcaatcaaaaatgcacaatcactagtctatatctcttaaaaattttgaatgtaatcagacatttgtgcaaaagagtaatgcatttaatagttatagtttgaaatatttcatagttcattttaaaggattgcacaaaatataataaacaactcaatcttaaaaagaaaaataaccttgcatctgtaggaggaaggaaatacatgatctctttgaaataatacttcttcaatgaatagctactcatttcaaacaataaacgttaagttgaaggaattaaattctccttggcaaatcatctcattctttctgaaggaatctctgcatttgatgaggaaagtgtagtctttgtgcacttgggatcttttgagtgtgtataaaaattgggttgaaatttatgccaagttcttttttttttttttttttctttttcttgttttgagatggagtctaactcttgttgcccaggctggagtgcagtggtgctatctcggctcactgcaacctccacctcctgggttcaagcgattctcctgcctcagcctcccaagtagctgggattacaggcatgcgccaacaagtctggctaatttttgtatatttagtagagacggggtttcgtcatgttggccaggctggtttcgaactcctgacctcaggtgatctgcctgcctcggcctctgaaagtgctgggattagaggcgtgagccactgcacccggccgccaaattcttttaaatgagagcttttagtgccaatgttgggtctttggtttttcttcaatataatattaaatttatggcctatgtgaaaattttttaggtgcccagaccacttgctatgaaaaaagagggaattcaaaccaggaaacgaaaacctaagaacataaataaatcaaagacttgctctggtaaatatactaaaatgacgtttgactgtaaagtatttgccaaccttaacagtagagcatatgtatatttataaggtttattttgattgttgcaggtaatagcaataattccattcccatgactccaacttccacctcttctaactcagatgattgcagcaaaaatacttcccccacaacacaacctacagcctcaggggtaagtgttaaaacagcatagactcctaaattactgggctgctctctagtaaattatctcaaattttatcttatctggtagtacaataatctaaaccaacagttcagtttagttagttgatacctaagaatagtttttagaggaaattacatttaaatgtcaacaaaatgacaaacttaagtactttacaaacctcttaattaagatcggtatcatttttttatggttaaattaacccaagtaaaagcaagaagttttggtttaaagtgttttaaattgttttatttccaggtttttatcagagttgctatatatattatatgtgtatatttatgtatttccgatgtagatcataagaactatgaggccagtggtttcatagattacagtgcccgtaacagttaagtagcttttgtttatcctatcatttccagcctttttttctttttttatcatccacccaaagcaaagctcatcataaagtgttatgtgctgctgtattcactatttcctttgcccaattgtgttcttgctgggagagcttgccttcttctaatgtaccttaattgtactggcgtttatttcagctacgacaaaacctaggagtgatttgtgccactgtggacaggagatgcctgggtcttcgtgaggattacagacttagtttcttgtaaagctgtgaccaaaactcagtttgcctctagtaaagagcattttcccaccctaatgtttcccaaatttatctggaatgcccttctaaaaaatactgggccttccctcagacctcagtgagctccaaggcagggcctgcggcaagcaggactttaaaatgtgtccttgtgacccttgggactacactgagacaagattaggactaaacaccagcatttaaatgcctatttacttagtaattgttttctacatttagttttctcctgaaattatttggggtactttaaaatactacagattcctgggccccaccctggattttccaagtcagagtctctgggtgtgggacttggatatctgtttttgaacaagtgccccaggtgaaattggaactactgccccggaggtgtttgggaaccacagacctggtttctttccactgtatttttactggctttaacaaacaaaaattaaatatttaaaacaaaatgtttaaactgtgcttaaaattatatttgatatttttctttgtcctcctacccaaattcttttgagccttttctgtaatgaaacaaaacgtcttttcagagtttcacaagggaagaagccttttagttgttttttttttgcagactcatggtaaagaatgtttctaggctttataaaggtggactccatgctatggtgttgtgttttacaggcaggttagatgtaactgaggattgaaagtggtaaatagaacatgtttcttgggaaatgaaaagattatttaaaaataatttttttttttgaggctgagtcttgctgtcaccgaggctggagtgtgcagtggcgcaatctcggctcactgcaacctccacttcccggattcaagcaatcctcccacttcagcctcccgagaagctagaattacaggcatacaccaactcacctggctaatttttttttgtattgttagtagagacggggtttcaccatgttggccagggtggtctcgaactcctgtccgcaagtgatccacctacctcagcctcccaaagtgctaggattacaggcatgagtcaccgcgcctggcctaaaaatatcctttattatgcagtagtcctcaggagcaattatgtagctagaggcaaaacaatttggttttctaaagcagggagggagccgcctctctcctagctgaaatgaggactgctgccagctccaagacacttttgttggtggtacagtccagcttaaatgtggcaaaaagactaatttgaatgataaattgcactgaagtcgatatatacccaacaatgggcttcggggacttggaaccattgtgggtggagtcttgtgattttgtgacgtaaaatttcaaaatttgctattagcaagtcctatcagttgccgtccagggaaaggagtgaaaagccagtgaaaagggccatggtctggctagaagaagggccttgggagttccatctctggtcctaggcttattgtcccaggaactctcaccagggacagagcagatggaggtggcttgctggtcaatgcccttcagaggaaagattagttccccaccagaggccaggaggcaaagcaacaaggatgttaaggatggggttggagagtactagtttcacaccaggtcttcagctgcaagcttccatccctgtggtagtctaggcagcctccacggggactgagaagctgggagtggctggtgtgagctgcagccagggggcatctctccagcctctgggctgcgctgcagaaacgctgactgccattaccagggcagggggtagggttgctgacctgcctaccaacctccccagttccccagggactgactcttggccttgttccgagggcacacggctggtgcctgggcttgcagggttttatttcatggatgtctccaaaagcctctacctgctgtggccattgtggggaaacagctactcgtctgctggctgcctttggaagctgtcctcctgtaagaatacctgtagtaggcttgagtggtgtccccaggttgttttcatggcgtgcccgcgtataactgtggatcccttcgcactttttgatgtcctctctgggtgggctgagccttcatgtgtatggcatggcccatgtggcagccgagtagctgtgaagagtctgctggaggagccatctgtgagcagctggtagaagcatttttaaaaggtggctgtgttgacaaaggtgtgtcattttcccattttggtcacagtgcataatgttagagggcagctggctttgtgactgattgcctgtaggattttgtgaaatgctgtgggtgaagaaaatatcagatccatatagcaaggttgtatctggtgtttacaaagtatatgtattacatacacagcaccgaggttggcttggagtttaagtctcctaaggtaatgcgtccaccccacggatctccagtgctccctgtgactgactggtagaaattagtagtgcagggtgaccctcgtttgatggggccacggaactacaaagcaaagggctatcttaggcaccctcccagcagaaggtggaactgggggccacatatccctccatttagagatgtaagtagcagtatcactgcctttctttaatgactgtgagttatagcaaggaagtaaaaaactgttccagaggcccacatgaaacatgctgtttactttaattccccactgaaaaatcagttgtaggagatcaccggtaggcattcccagcaggcttattttaagtcctgggacatgacaggaacagggttctgacctgcctttcacgtggccatttaagtgatggcaccaggaccttagcatgacacagagtcctgagctctcttggccaggacgaaaggagccacaggagctgagtattgtggaaggggtctatcgtggttgtctgcttctgggagagggggctccagggctcccctcccctagcaggaatgaaggtgtgggcataattcctagtgcacggcattcttccaggataagttgtcctaatgccacgaaaatttttgtgctgctctgaagcctcatgtcttagctttatatacttgttaatctgtgctttcatgagacctgtgtctgggcaaaaaggagacattccttcagataagagtcagcaagttgatgactttgccaccttatgactcagtttctcttggttataggctgtgcgtgtgctggaggcacagggagggcagtgtgtttctgtctgagatcaggagtactcacggtcatacagccctgcttaaaatattgcctatttttttcttttgaaattatttttgtttattaaaaatgtatgttaaacttaaatttttgatagatggttactttctgtggcaaaaataatctttctttctggctaagaattttcttatccatgcagatttactaaaaaatgtatatttagttgatctaaatagatatcagattttctttgggctgggtgcggtggctcacccctttaatcccagcactttgggaggctgaggcgggttgatcacctgaggtcaggagtttgagaccagcctgaccaacatggagaaaccccgtctctactaaaagtacaaacttagccaggcacggtggcgcatgcctgtaatcccagctactctggaggctgaggcaagagaatctcttgaacccaggagttgcaggtcgcagtgagctgagattgcaccattgcaccccagcctgggcaacaagagcaaaactctgtctcaggaaaaaaaaaaaaaaaattttttttttctttggcttttattctctatggattttaagaatactaaaatcttttttttcttgaattctgtttattgactgaattgtattttacagtttttttttggttgttatttaggagagaaacatggtaatgttctgtttctgcaataagatttaataagtagtccacaaatggtcctactcctcctatttctcctcctataactcaaaatttgtaaaactggaggatactttatagctcaatccccaaattttatagataaaaagtttttttcttaatttcttttgtaataggagggattaacttggagatgaaattagcaataatatctgaaaatggcagctacagaaaaaaagaaattagcaataagacaatgtctgagaacaaggagtcactgaacatattttgccgcctaaaaatagtttctataaataattactttaaaaattaggccaggtgcagtggctcacgcctgtaatcccagttctttgggagactgaggctggaggatcacttgagaccaggagtttgagatcagcctgggcaacatagcaagattcccatctctatttctatttttttaaaaaaatgaaaaaaaatgtaaaccctatttaagttaatattaaaactaccaatataatattgaaatcatcattaaacataaagtgttgaagttaaatggagagagaaatatatatgaccagcccttgctttactggtctttgttccatttgagtaaaacaaagtgccacatctggaattgtttaaaacatggaggtggtaggggtgggtggagagagacaggtatagatgtagatcttactactggtcagatttggacgtgctttaaaggagtgataactagagttggagatggctccgcagagtagaggaaattacaattagttaggatttttgcaggtgaaaaattggatagaggtatccaggaaagaagaaggcataggaatctttggagctgaagggaaatagttagttcattgtgactggagtgtagggggtaagaagccaaaggcaggaagtgaggctggtagaaccggtggaaagtagatacttgaaaatatttcaaatcaacgatggactttatttaaatcctgcttcggtgacaaatgtgttttctgtctgtacactggagtccaacaattaggaccttcttactggagcattctgtattttggtaattgatgtaaacaaatgtagcatgctcctgcttgtcaagtttacaagcagagtttcctcctcacaattagggaggaaaaacatctgccagctgattctatgcgctgaccttctttaggcctgcgctgtaatttctctgcctccagggattctgggggcaggatggttggagtggctgcctggctacctcttctaatggaaacatattagacatggtgtattagggataggaaatgtgtttcctcacctttgtggggcattgctggcgatatataacttccacaaagagaggtggacaatagactgagagatagagacttaggttcctcgccggctgcatctgggcctggatgggtgggccttaatcactcttttggtctgtttcttgctagtaaataggcgtcatcgttcccgtcccctgtgtgcttctgggacactgtgtgcttagctagacctatttccctactgtagtcactcctgagctgcgtggtcgtttgaaggagttaagcacccataagtgcttgtggccaacagcagtgatctagagactgactcaagttaagattatttgatgtgctctataaggcctctgaagaaagcttaggcaggtaaatattttaaattgttttcatagattttatttcatatataatatttgcatcctgtggtggaaatagaaaaacaccttagtaggtcctgtagcttactatgcattttccagtgcaggggggttctttattagcagatttacactccactgtctttttcttcaagtaatggaatttttttttgatttactgtgcactatggttggtcacaaaattatagttcctgtgaaagagctgaaaggaacatttgtgaaggacttatgctgtgcttatactgttaagttgctcagaggaacgtatgaaggcaagctctgatgcaagagcctgctggggctggagcagaaaattactgcttcatttttaacttgaatatgccacagagcttctagaggactcgagagccaaacagtggtggattggtcttcgattttctcatagtgatcttgctttgaggaagtttttccctttcctaatactcgctcacttataagatagtgaacatagggaggcaggaaattagtttctatcaggtaccttttatgtgccaggtgctttagatacattttattttttactcctccttctaagtgagacgcagaaggtaaagaacagttccaaggtcacgtgtcaaattgagacgcgtggtttcacgttggccgcaggtctggctgacgcggtcagtgttgttgccactacagcgtgttagattaatatgcgatattagttcatttctttgaaatcttcagagagaagaaagaatgttttcttaaagaaatttgactaatttgattaataattttagcatcatatatcctcccactgaaacaggtgggaaaacagtgtgagaagttatttgctcttgaccaagaatgtatttaagacagttaatgcagattttcttatcaatgttatacttagaaattaaatgtgtaatggtactaagaatatggcagttgggtaacattaagttaaaaaaaaagtagtaaaaattacttttgttgacatacctaatgtggttataacaaggttcttttaagagaaacacaagattgccatactgaaatccttctaatgctgcgatttaaatccatacacaaacaaatgctgttttggaatttttcggaatgttaaaattgtcttcaatgaatgtttatgaagaaattactgaaaaagcatttcttaatagtgaagtgcctgttttttttttttcagagtctatcgtccaaaacactcttttctaaatgagtagcaaaggggttaaaaaatcattaatctcccaaagggtctgtgagagagttatgtggttaggtattattattgcctcatttataaaccaagatccggagtgactccttaaggtcacaaaacaagccagtgttgaagccgggactggaaccgacgtctcctgcctcccagtccagggctgttaccactcccagggagttgaccaatcatcacagttattaatatcccacttgccacatgctacaagccatgaacataaatattttgttggcattttatcttcatgctccctatgtgccaggctccctttctttctacgttcacagccccttctaataactcacgttcttgtctgaccacattggccttcgtgtgaaagtcacacgtcaccccggcagggaatgttcaagcatgcggatttgcatactttcattctgatctcaaggctttttctagacttccttttttttttttttttttaaatctctgtgtgtgtgtgtgtgtgtgtatgacagggaggatggtaagaagtagtttaaaaatgcattgtgtgctacatcaatatccaatggctttgtacattaggaaacagtaaagctttaaatagtttgtaacatatgtccacataatttatcacagaattgtggtttatttaataagtgactcattatcactatctgatagccagaatactggataaagaataagtgtgggcagaagttattcaccatttcttatagcctcatcccagaacacagctcttctttgcaaattacagattctttgcagttttctcccacccgccccccaacgcctctataagaatatacaaaattgtcagaaaacatgaaataatgttacgggaaaacatggccaaatttaagaaatctggcttagattgctctgaaaggttattgctaaatgaatcttcgaagaaaacgaattcctttactggaacaaaagtaatttattatgcatttcatgggtgtctgccagaagagttactagcagtatgaagatccagtggatatgaattaagtacaatctgttagttctgttcatgtttagacctacctgttaattttctctgaaattttaataatttaaaaaagcatctccatagataggtgttggcaatgtgacaattcaccactcagctacccatcacatcaggcttttttaaaggcccagtactcagaatttgtgagactgagcacaaagacattattttattgacctcatattttaagaatgatttgaacaaatacataactaggcattgattctaatgtcctgttggggtcttacgagtaaacggttccaagtcaacatctgacgatgcttaaatcatgatccgacttgatggtgtgctgcctgttttggttgttggcctggcacggtttcaccagagctgggccacatgctgcagaaccatatttttattttattaaacacaagtattttacatttaaagctctcattaaatttagttgcttgattcgtggtgaagcctgaatatggtcaaaagtttattctgggggttcacggattagcagctgggaggaaacagattccagcagctaggcgctagctccagctctgtctgtgtgagtatagcaagctgccaaggttctgtaaagcctctgttttcctccttctactaaaggggaaaagtaattcctaccatctggtccttaggagtattgtgtagagtgagtgggagatgcctggagacctctttgaagtttaagaagaatagcactacttaaatacgggtcttggaagttaatagtaatcagctttatttgcgtggcattttttttcatcccaagatattagaataagatcctcactttcttagtggggaaattcagagatgtagagttattgtgttaagaaagtaaccacattttagagatttgtatttcactgatagcaaattttttattccttctgatacttagtactttcctaatgctttttgtggtttaagtgcattgtaaatgcttcttggtatgttttctgtaattaagatggagagattaagatgctcatccatctcctgaaaagtcagttttgttataaaaattaagatcattcaccaggttttaaatcttgcctcaggattctgtcccacttaatttgaagattagaatagtgtaattcattctgattcatttagaagataagctttttctttagggtcctcattgacttcaagttgtgggacaaaccctctcccttgcaatttatatttgtacatcagtattttggtgataatcccagagtacttataaagtttggcacctttcttcaccacaacatgcttgctgttgagtgtgcacagatacataaagcaatttgctcttttgtccagaatagattatgtgcatagaattgcttttgtcttcttgaaaagggcagcatcccttggtgtggctataaccttgcctactcaggcctagaaggggcgagaggggtatgggttggggcagagtaggggagcagccggtgaaatttccagtaaggaatttgtttgccgaattaaatatacaaaactattctgctgaatagttaggtcatcagttgaggtgacggtgactctctctctagagaaaaggtgtccatgttcttttgttttattaagctgttaagaattcgagagtttcattgtgattggttttcacgtgtcctggtggagacagaatttgtgtgtgttcatgtgtctttcatgtgtcaccttctaaactattactgtcactttgtgtctggtcctctgttacctccagccaaactgaaatgatcgtagtttatatagtggaagttacgatttgcaggaaagcatttcccctttgttggaatttatacaaagtttttaattcctctttggaggaaggcagctataaagcaccacaggagtctaacctagaggttacaaaagcagagaagagctttggcagtgagggacggctggcttcccctcacacaagaaaaagccgtaagcacagtctcactcagatgtgtaggaaggacggatcagaggctgggggagccgacagtctgccttgcagtgaaggaggcatgtgatcaccatcaaagtcttctgctctgggaaggatcacacagtcgtccttcagcctgcctggggcgcagtgttttctttcttcagaccgaaactgcatgaagagagattccagcaaggaagatagagcatgccctgtacactcctctctggttttcttcctcaaaggaaatttatgcatgtaatccacaagccgaagaacccatgtttttctttggaaaaggctacgccctttcagggtttccttttctcggctgtgttgccttcccatcagaagctgtctcttgccctccccattatgggatgtgcgaaatgaaggaaaacagagacactgctgggcatttgtctccatgagttgatccaatcagaaatctttgacttttcagatatgtgtccaaaaatgagtgaaggctcctcacaggaaaaaaaaaaaaaaattccaggtgatctaaagatgaactgtggctacttctcaggctagcggatattttccatgtcccaatctgtagcagcccaagctctccctgaagtcatttactcctttaagagggagttttccagcccagctgctctgcctgtctcccacctaacccggccagctttcagtgctaagcccaggctgggtctggccctgataacacattctttcaacaggaagtgcctccattttcagttgtctgtgggagggtggagggcagataagccttgaatggaaacacagagccgatttctgctccaccctccttgcactttgatcagggaggcagcagggacctccgcctggcctgtgctgcctgcccgaaaggagggaggatggttgagctgtgggcattccggcgctctccctcccttttgttcaggaacgtttgtttaggttggtctaggttagtgaagtgcctgcttttgcagggttgtgatgtctgcgatctgaactaaagtcctttgaagggttgaattatttgtgggaaaatatattaaccaattgaaatttatacgtgtgtttgtatgtgtgtgtattaggtccaggatcatagtatatttttctctgatttcccccctccgccccccccctcccaacacacacacatcgtattgattctcagtaggcatctcttgactatcatcagtgagggaaagggacttaaaagatgaacaataacaggacaaagccaggcttcttaagaagagtagctgtgccaactctgaacgccttctacttttagaatattggtttagaggccaggcacggtggctcatgcctgtaatcccagtactttgggaggtcgaggcaggcggatcacttgaggtcaggagttcgagatcagcctggccaatatggtgaaaccctaactctactaaaaatacaaaaattagccgagtgtagtggtgggcgcctgtaatcccagctactctggagactgaggcaggagactcacttgaactcgggaggcggaggttgtagtgagccgagataccaccactgcactccagcctgggcgacagagtgagagaatattggttttgagagctgaagttacgctgatgcatggagctgacgtgttgattgttttaacttgtatagaactgtgagattcacatgtgcgtggctggccaggccctggcctgtgccaggtggcagggagatgatttcaggggcggatgggggcccttctgacccgccctcctgttagtgccccgactctggttccctcctattttttcaagccactttctgattccatgaaggttggcttgtccctcaagtgccttgtgtttctggtactcatgtctcctattcatccccaaagttattaggttggtgcaaaagtaattgtgggttttgtcattactttcaatgccaaaaactgcaattactttggcaacaacctaaatagatttactatgcaattcaatttaagtattcaaagaaaaatattcaaagaaaggtatagatggctaatagacttggccctctcagctagtcccctgtttctcccctcctcccaggggacctttgtaatacttacacatgtgcatggataaattgcagttatgacgtgtaattcatatcttgctgtttttcacttaacatggtattacaggattttttccattttgctccatgatcttattatttttaataattgcataatagttcattgagcggatgtgccctgcttttctaaaccgttcccatattattagacattagattgtttccatagtttctactattagaagtaaccttgcaacggttggcttcctttgcggagcctttcccttcttttgaattatttccttataatacatttccagaagtgaaattacagggcgaagtagggtctaaacttctggatggctcttgacattgcagctaactgccttctgtaaggtgggtgtaccagaatttagctccgccagccttgagtgaggggactggtgttaccatgtaagtaacatcagcctttctttgcagtatttcatgtttaaatattattatatctacacataaaataaggctaccaagcattgggcacaaatacttgccccattttttttctgacaggctcagctattgcttttaattgcaaacgagcagatttatttttaggagtgcatcactcgtggaatttgagatctgtctgccctttgatagcaggactcttggcctgccaaatagcttaacattttgtctgaaaaaaagacaggttattttcgccaattgcttttgggattgttattcaggtgtaagaataacattcagggtgttaacgtttctttaatgtgggttgttgaaaaagagtcaatgagtcaccaggtgtggtagctcatgcctgtgatcccagcactttgagaggctgaggcaggtggatcccttgagctcaggagtttgagaacagcctaggcaacatggtgaaaccccatctttacaaaaaatacaaaaattagctgggcatggtggcacatgcttgtggtcccagttattcgagaggctgagatgggaggatctcttctgcccaggaggtggaggttgcagtgagccgagatcacacccagtgcactccagcctggatgacagagcaagaccctatctcaaaaaaaaaaaaaaaaaaaagtgaaaaagagaaagagtcatgagacttttgaatggctacagaacactttgatttatttttgtgaagaactgtcagtgacagtttgaatagggtcattctggaggtggttctctttgagctccaactgtgttcccactgcttctgcccctgcctggtgatggggtaacttgcttgggctgaaggatagaatgaggagaataaattagatccaagcctcttaaccttaacaataataattagataacaagagtagcttatactgacgtaatctttactgttctcagacactgttacaagggctttacatatattagccaattctttttttttttttttttttttgagatggagtttcacttttgttgcccagactggagtgcaatggtgcaatctcggctcactgcaacctacctcagccttctgagtagctgggattataagcatgctccaccttgctcggctaatttttttgtgtcagtagagatgaggtttcaccatgttggtcaggctggtctcaaacttctgacctaaggtgatccacctgcctcggcctctcaaagtgctgggattgcaggcatgggccaccgcgcctggcctagccaatttaattcttgcaataatcttatgacataggtgcctctttttatcccactttataggtgtggaaactgaggcacacaaagctgtatgtcaggcttctggtttacctctcccacatggtctgttcactcttttgcttcatccttctgtttttcagctggcttttcttctgaacaggccaggtgaccacctctcttcatccgtcctgcctcccattttgaacatccttctctcgccaataacaatagcttccctttacggaatgtttaacatggcaaggcaccttgccttcgcttttacaaacattagctcatttaattgtcgcaaccatccctgaggtgggaaatgtgaggacccaggcacagaggaggctcaggggggactgcactcagcaggagactgaatcaggacaggacttgagagtccaagctgcttcccctccttctcatactcctgtgtgggctgcctttggttcctcgcccaggagtccttgccctctgctattccttttctgactcttggtctaccttcctgtctcagccactcatttgttgttcatgataagcagccaacagtcgactttctaatgtatatggatcctggctccccacaaagcctgggagctcctggggcagttgactatctttcaggctcctgatctagtgtctggctgtcagttgttgctttgccaatatttctttttttcttctctttctttctttctttttttttttttaatgtttactttttagagacagggtcttgctctgtcccttaggctggagtgcagtgatgcaatcgtagctcactgcagccttcatcacctagactcaagcaatccttccatctcggctccccaaatagctgggactacatgcccagctaacttttgtattttttgtagagacagggtctcccaatgttgcccaggctggtctcaaattcctgggcttaagtaatcctccctcctcggcttcccaaagtgttgggattaaaggcacgagccaccgtgcccagcctgcttatgcttcttgttgctggctgtggtggtggtgacagatccctctgctgtcttggcacttccctgccatttgagatgggctatttcctgggccagttcaggaaccctctccatttcataaaataacacttgttgcggtgaagtcagatttagtcagaggcatatgctgatgtgcctgttttcgaataagaaaatcaatgcaaagttggacgtgagatgtatcattataaggaagctcactctaatagttcctttctaaataaataattcttttgtaattgaatatcatccttttgcttatttctttgagggttaaatctggatccacactggatttgcttctggtggagtctctggaattaagggctaaagttaatcactatgtttataagtataaccaagtttatggcattcagtttgttggacaggattattttagctttttcagaattgccacaagaatccatctgaagctttagacatctcactgattttgtgaaatttgctttttaatgcacctaaaaccctcagtttaagtctttacatttgtgttatgtaaacaaaagtttgggtgtggggccagtgttgttgctggattttcataaaacctcatttctgctgggaaagggaaggagtggttacctgtggaggggtcgggtttggtctgtctggttgggaggaaggaagtttgggtgcttagactcagagggcttgctcgcctgaagtcctgcctcccagcctcatgcccttatggtgagggttgagagcaaaccagatcttgttggaaaacgagtagagttggacctcattcacttgcaggccgtggaggctcggcacacttcctttctgttccgcctgtgtctggtgccagagaaatgctgttttaaggatttaatgggattatgtatgtaaaaaagaaattctttgaaaagtacacaatgtcctacctctgtcaaacaacaagtatctggtaatttatagaatggagccctgaaagcttggaaggaataagagctcctgaacttttagaaggaaaaaggtgattttaaaaagtacatgattatggcgaaatttttcaaaaagcttctcaaaagcaactttattcaaactgttgtctaaacagattttagttattttggtttgattttactaaattatatgatgtttcctatttggcctttttcatgtgaatgggaggaatgggtggaacagggcaaaggtgaacttgtgcttcaagaaatcattgtggccaggcacagtggctcacgcccgtaatcccagcactctgggaggcccaggcaggcagatcacctgaggtcaggagttcgagaccagcctggccaacatggtgaaaccctgtctctactaaaaatacaaaaattagccaggtgtggtggtgcatgcctgtaattccagctactcaggaggctgaggcaggagaatcacttgaacccaggagatggaggttgcactgagctgagatcgtgccactgtactccagcctgggagacagtgagactctgtttcaaaaaaaaaaaagaaagaaagaaatcattgccatgatcatggcagatagaggatgttagcattttctttataacgtggtctgcttcagacatggactgttcttgtaaagaattaaggtaaatgaggtagattttaaaacctgtatatgcataggtttattttccatgaagtcaatgttcaaaaatttcactgatcagggaatgttgaactgtgcagcttttctaaaaagtctaaaaagactttgccatcactggataagccttgttagaggtgtgtgtgtgtgtgcgcgctctgcatcttctctttggaaatgatcaggttgtgtgtgcatcattaatgcctattcacccacacagtgaggtttgtttcacagtcagagatcttagagcttggcactttttacaaataggatttcttcagttccccttccttttgtccagctttgcatcttgccagtggctcctgccctgagttctaaagtttcgaaggcttaagtggccagggtcaggtcagtggcactgtgtgcaatgcagggaaaggcccccacttgctgggggcaggggatagtaacgccggcttcatttctcctgccctgggtctgcccaggagcagctctggccctggctgcacagacccgttcattagctcccatgtatttcactaccaggattgtaaccgcttctcgccttctcgtctctcctctgtgtccccctcttctgccaggcgggtgccccggtgatgactggtgcgggagagagcaccaatcccgagaacagcgagctcaagtattcgggtcaagatgggctctacataggcgtcagtctggcctcgccggccgaagtcacgtcctccgtgcgacaggattcctggtgcgccctggccctggcctgagcccacgccgccaggaggcagggagggctccgccgcgggcctcactccactcgtgtctgcttttgtgcagcagtccagacagtggcgactgcgctgacagaacgtgattctcgtgcctttattttgaaagagatgtttttcccaagaggcttgctgaaagagtgagagaagatggaagggaagggccagtgcaactgggcgcttgggccactccagccagcccgcctccggcggggaccctgctccacttccagaagccaggactaggacctgggccttgcctgctaaggaatattgagagagatttttttaaaaagattttgcattttgtccaaaatcatgtgcttcttctgatcaattttggttgttccagaatttcttcataccttttccacatccagatttcatgtgcgttcatggagaagatcacttgaggccatttggtacacatctctggaggctgagtcggttcatgaggtctcttatcaaaaatattactcagtttgcaagactgcattgtaactttaacatacactgtgactgacgtttctcaaagttcatattgtgtggctgatctgaagtcagtcggaatttgtaaacagggtagcaaacaagatatttttcttccatgtatacaataatttttttaaaaagtgcaatttgcgttgcagcaatcagtgttaaatcatttgcataagatttaacagcattttttataatgaatgtaaacattttaacttaatggtacttaaaataatttaaaagaaaaatgttaacttagacattcttatgcttcttttacaactacatcccattttatatttccaattgttaaagaaaaatatttcaagaacaaatcttctctcaggaaaattgcctttctctatttgttaagaatttttatacaagaacaccaatataccccctttattttactgtggaatatgtgctggaaaaattgcaacaacactttactacctaacggatagcatttgtaaatactctaggtatctgtaaacactctgatgaagtctgtatagtgtgactaacccacagggaggttggtttacgttaattttttttttgaatgggatgtcctatggaaacctatttcaccagagttttaaaaataaaaagggtattgttttgtcttctgta

SEQ ID NO: 28 - DNA, 33162 bp, Mus musculus
ctccgcacccagcagcttgtagagagcagttccgacccacagcctggcacccttcggctagcgctgtttgtttagggctcggtgagtccaatcaggagcgcaggctgcagttttccggcagagcagtaagaggcgcctcctctctcctttttattcaccagcagcgactagcagaccccggactctcgctctcccgccggcgccctccgcctctctccgcgccccggagcaccctcggtcgcggccgttcttctcgcacatcgctcgaggttcggttgtttcctcctttgtttgccccctcctctcccttctcccttcgcgggcccttgggcctccagctctccagcctttcccgggctgtgatcggttccgagggtgtccggtccttcgctttagaagattgtagggactccgaggttcccgggatactccggaccagcctccacccgccccccagtgcttatctgcccacagcttatctccgagttatcacagcgccaaggggcgggagcccgtagtccagtgggcagagaaacttctttcttgctatcttgcctgggtctgtgtgtgggcattaattttagtgtggttatctccgatgagcctaagcgatttggaaaagcagcccggtggaggcctgcctggttccccaccccctccaagtctccctgtcattcttcctgctctcccctttggggtggcctcggctctggggcggtctcacccccctcccctcctgcgttttcccctccttttctctgcgctctgctccaccctactatgaccaattccagaacgatctggcctttcccctgctggggttgaccatggggtgggccaggggtggcccggcccgcctgagtacgcacgctggtggttgtaaggcggtttgtgtttaaggtgtgcggttggcctggacgtggttggacgtgaggttttgcccattggtttccggcactatttcctagatccttatgcctttcctggcatctcactttctctgggctaggtaactttttctggagctcgcgttggatatgatcagcgaggtccagggagctctgagaaaaagcggcggtttcgttttcggggacaggttgccttttctagctatttccacgtgcggaactctcttcaccgaggcatcccaagaaaggggcacctttcttaggaggcagggtgagacagcattaacacacattaaattctttcttgtcaccggctcagagttagccagtctgcggccggtttcgagatcaatcttgggatctggcgcgctttgcagaggatggatgctatggaggggtgggataggaggctcaggaacacttgtcctgggtgacggaggagggcaccctagttgtccgggatcccttggctgctgctgcacagatttcaattgctgttttgtaacccctcaagtacggggcagaagcgggatatttaaggaatgccctaaactaggagaggggtgggcgagggagtgaaacatgtagacagtctacccttttagtaagtccactttatctatcttccgtcttgttcctcactcccaccttaggaatcaaaagtcaggttggagtagcgccggacagtggatggccttgactgacggcggctggtgcctgccaaagcgtttcggggctgctgctgcggacgccggcgactccgggccctttccagcgcgggagccctcctcgccgctttcccccatctcgtcttcgtcctcctcctgctcccggggcggggatcgcggtccctgcggcgccagcaactgcaggacgccgcagctcgacgccgaggcggtggcgggacctccgggccgctcgctcttgctcagcccctacgcctcgcatcccttcgccgctgcccacggagccgcggcgcccggggtcgcaggccccgggagcgccctgtcgacttgggaggacctgttgctcttcactgacctcgatcaggccgcgaccgccagcaagctgttgtggtccagccggggcgccaaactgagccccttcgcggccgagcagccggaggaaatgtaccagaccctcgccgccctgtccagccaggggcccgccgcttacgacggcgcgcccggcggcttcgtgcactccgcagcggcggcggccgctgccgccgcggcagccagctccccggtctacgtgcccaccacgcgcgtgggctccatgctgtccggcctgccctaccttcaaggggcgggcagcgggcccagcaatcacgcgggcggagcgggtgcccacccaggctggtcccaggcctccgccgacagccccccgtatggcgggggtggcgcagccggcggcggcgcggccggacctggaggtgcgggatcggctacggcccacgcctctgcacgctttccctactcgcccagcccgcccatggccaacggcgccgcgcgagaccccgggggctacgtggctgcgggcggcacgggcgcaggcagtgtgagtggaggtggcggcagcctggcggccatgggtggccgggagcaccagtacagctcgctgtccgcagctcggccgctgaacggaacgtaccaccaccaccatcaccatcacccgacctactcgccctacatggccgcaccgctgactcctgcctggccagcaggacccttcgaaacgccggtgctccacagcttacagggccgcgcgggagctccactcccggtgccacggggccccagcacaggtaaagatcagatcgcgccgcggtgtgggggtgcgggccgggaaccctgggatgcaagccggtgtggaacagctatttacttgaggtccatctgggccagcaaagacttcttagaacaagactttctacgtggcaggctcagaggctagcagcgatgctgtgggggatattcttgtccaggaaagagggtgaatgcatatctatgacctcaggggtgaggggaggggatgtgcacgaagtgggatagggaggtccggggcgcttcgtgagtagttaagaaccaggcaattgagcaaatgtgcatttcagcttgagagatatgtggggccggctctctgcttgtatcctggtttgggtgagtggtgagtgagattccaggactgggtgcatttggaatgtcgggcgcttaatcaggtagacacgtggacatagtcagtctcttctcattcagtctgctaagttgaggagctctgtccctttctttggtatttaaataggacacccaaagccctgagacccaggcatctacaagcatccctgttcccccaagcagtgggagcaaaggggacatggtcatctgtgacatctgtggtcgataggccttcaggctatctgctgggtgggattcagggatatggcttctacttgaccaggccaggcccctcagagtttagctcacaaagttaccctccgtgccagaggctattgaagtgtaaagtgggaaagcacaaccagctaccttggaaagaccttaatttggaaagtggctctgctcttagcagaggaaggtatggtcagagcatggtttctttctctagccatcctgttttgggcctagggttcatccatatgtctctccttctcagggtttcacccatttgacaactgttcctataaggaaaaatgtagctgtctatttgagggcagtagttagtcttgaatggaggcacattgtccaaactgtccttcccatgaatctttgtgtcttattctgggagcccctccccgattaggtttagggatgtcctttcagggcccctgacctgttaccctaaatgggactgttgtttagtttgtatttagaaaacccagtggcttaaagagaagaacctgatttgatcttctcctcactagtgacacagataggtcaagagacttggtaaagaagtcagttttcccctgatgttctcaggcacctcccttccttttgtacctttactgtcagcctggaagacaggcacagcaaagaccctgttgagaacatctgatagcttgggacttgatagagccttggtaggctgtcaccctttctaccactgaaaaaccatgtttggctcccaagtgtagagaacaagagactaaaaatcttcaaggaactagaaagggtggctgggctgtgaagcttttagatatgagtaggaaaacccaaagagggtgggacagggtgcttgctgtttgagtctaccccatttctgcctgtttcttgacatcccttcgaatttcctctaattttttttctctagccttgaaccatcttatttgactgagaagatagcttgtgcagagacaattccatctttagacattgacaataatggatttgtttgagaaaggctgtcataggcaccatagaagattcttttggctttgaatttagcctatattttacttgattttttttcccccttccagtctttgggcattgcaaagttggaaaattcttctgtagactcaagcagatttttaaaccggggggttggagtgaagggatttgggaatatattttgcaggctgctaagaaaagaatcaactaaggcagaattggctaggagtgtagacccaggtttgatcacacagacatacctatttctttatcttgatttttcccttcctcatctctgccaaggtctccttgtttcccttgctaatcttgaatttgcagccatcttcctgcctctgcaattataattataatattaataatagttattatttaaaaccacatttggagcaagtggtttgagcaaacactaaggctaaaacttgagtgctgtgcacagtaagcaaccttcacagtaagaaacctgctctctgccctttccaggactgcagagtggatttgaagttgttcacactgagatgagccttggtccccctaagccttgattccctggctggcttccttttctcccactgagcagagctccactcagggaaccacacctgactggagtctctcacttcccaggaacaccacttaggacagaggtgccaacctcccagcacaaccagattttataattaaaatctattttcttttgacaatttagaattattgctgtctgactcttcttgcagggagacagaaaggaactaaagagtttttatttaattaaaaaaaaaaaaaacaacttcctagaatttcaatttttgtctctgggactccagaggactaaattctacctggggcattcacacagtcttctccagggagtctttttattgttcctatggccagggcttccagggaatgccccactctggtagaggagctctctgataggtaacattttaaagtcaacaacaaaggcaaaagcccttgtttaacttcagtgtccttgaagtcctgagtattttactgattactgtggtcaatagtggcttttagggcagagaagaataaatctttgtgatgtgttgtaagttccagtgtccccaggataactttgaactcatttgtgtggtgtgttagtttcctttatatctcaaggcataactctagaaatgaaggggactttttttttttggtaaggtaaaaattaatggtataagcattttaatgctaaaaccatatttaaatatttttaccagattactgactgtcaacacaaaggtggtgctgtctgctggcagtgtagtcttcaaataaaatgctatgcaaagtgactttaaaagtgactcaactatttcttgaagaatgtcaaattagaacattcaaactctttgtaacagaaagggttctcattttacgaagtccatatgtgatttagtctcagtttagagaatccatgtgcttttatacttaacctcctttcagagaaacaacaaatgctattatttttgttaattattttggatttttttaaaaattaagctttaggttactttcaaatcccaaatgctaaccacatgatctgaaagacggggacaaacatttaaaatagaatttagatagaaaccagaatatttctgtgttagatcctcatgacatgaaaagtaaaatgcagtcttcatgattagtaatgagcctttccctcccatagaaaatctttttcttatttattattaattgatataagtgccaagaacagcattttaatttgggttgtctttttttaattgaagaaaaggcatgtaagaaggaaatgttatgagcacagaaaatactttaaattacttgataacaaggaacgggcagcgagtcctgggaatttgagggcagcaatcagtggatattatgcgacgcctttgcgtttggcgtgttgcattttataattacgatgggcccgggttgtaaaaaccacagagaccagaggagcggtaaggggaccagagttgattccccccccccccccacctcccgcccgatcctggatcctgtcattttttaggacctctgacttccctggggtttctactagaccccccgggagacaccagagtgtgggacagtggccagcggatctagggcaaccaagcctgggggtgcgcctccagtttctgatcacctgactgggacattcgagtgtggtgtgcgcggggctggcgttctcacaggcctctggcccatctctccccacagacctgttggaggacctgtcggagagccgcgagtgcgtgaactgcggctccatccagacgccactgtggagacgagacggcaccggtcattacctgtgcaatgcatgcggtctctacagcaagatgaatggcctcagcaggcccctcatcaagccacagaagcgcgtggtaagtgtcgctgcagggtgcggactcgcagcaacaccgtcccccacccccacctcctttagcgcgtgtcagaatcccggtgagaaccaaaggccttcccaaaagacaaaaaaaaaaaaaaaaaaaaaaaaaaaagtaagaaaaaaagaaaaggaaaggaaaggaaaggaaaggaaagaaaaggaaagaaaaggaaagacgcagctgctagcagtctctcttccacttcctatacggggatcgaatggataccaggcaagccagtgctctgctcttgaactgcaccatcagcccaggtgctgcttcttaattttttaaaagcacacgcatattttaccttaaagagatattcttggccagtatacaaatggatacccaagaaattggggttgcaggtaacatctgccaagcaaaagtaggcaaaagaaggtctggccttgtgtcttctttgctggtttggagaaagcaggctccgtttcaatacctgaccagccagtgggatacctcagaaatcgctctgcttcgggtcagctgtcaggggcagcctagttctgtagtgctttgaattgctctacctctttgcgttgtttgcccttccttggagatccaggtttagctccccatccctctgccttttaaattgcgctgagtatgatgaagatttatttgctcaaacattggttattttgaaatctggctgttgcagataggtacagagtcttcccaaattgtgaatgtcactaattcaagcctttgcaatcttttaaataagtatggggaattcttactttttcccatgattaagctaatacagtcatttgttaggagatataaagtttgaaatgaaagaaaagaaaaggagagagagagagagagagagagagagagagagagaggtgtgggtgggggaggcaagttttcatgaattgcaccttaaggctaacatttgtctagccccaactaatagtattctaaatgccatttaaagtagatgctttgcaattagatgccagacatcttaaggacccaggtaatttatttaattgttattctctaattagcagaacaaacgctatacatgttgtttgtgttaaatagattagagcgaaattgcatcacggtgtaagtctgacaccttaaggagaggcaattagttttatgattgttttgtttttaatgcatttaaaataaagtagctgaggttaatttgagtggaatgtgctttaagcttgttacaactttaccccgtttagggttttctttaaagagtttccttaaattcaggatgtgattgactcaggggctttcgagatcctcctgtacttttttttttaattaaaaagaaaatattccaaggaagttcttgctttcatttatcagacaaagcatgaacaatgaaaccttactttttagagggaaagctactttcatgcagagttcaagatgagctctgaaagctaactttttcttttttcaaaactgagcaaaaacttggtgtacatgtggtaggtagtttttaggttcttgttgaattacacatttgattaactaacaaccgtatttaaaaagctcatttatttcatgcactcacaggtaaaaaataactgtcacccataagaaaaccaatttaaacgtttgtaaatcaattagttttctttccgtgtggcaggtgtcttggcagtaagcaaggtcagcccatatgctttgtgaatgggttataaatgatgccaactgtagggcgtgccgctatcaattggttctctttgtgggcttatggtttggtgaatctggcttagttctcagaaacagaatattgagccccagtttgtttagccagcagaacagaaccaatcacggtgaacttgaacttgtattacactgcaaaataagacatttatggtgtaacttgaattccttgtcagtgaggaacagaactgagatctcttgttacaaggcacttttacaacctgctcaccttcatttcacatgtttattgagactgccttcacttacaaactgcagttgacagtcataaagctctttgttataatggcaaattctgataacaattttgctccatatcggctccaaattccactggaaactgtcataaatggctcatttataaaacggatcattttgtccgtccttcactaatttcacatttatggagagaaaggagtgctcatctggaaacttgcttcccatgagtcccaaagaggggaggagggagggaagaagcctctgctgctgctgtgtaaggtttgcatgtacatatacatatacatatacatatacatatacatatacatatacatatacatatacacatacatacacacacatatttgctttagcaaagcaatttcttaagccgttctatctgccaagtgtgtacattttcaccatatcctgagaattattagccccacagagctaaagggctcgtgactgtgtccttgtttttacatcttgattgtaaaggatgctaacctaatagaacagatgtgaactataaatgaaaaatcctgtttaatcacttatatttgtctgcaaagaaattggaacctgaatctctgactcttaaatatccaatatatatgcccaacatatcttttccaattctttataattttctttagcttttggaattttgttatatatatttatatacaaacatatgtatctggtcatagcacaacttgtttttaataattttaaacaatttgtttgagaatctaaataaaaatcatattttttcttcctgggagatgactattttaacacccccaccctcctgtagtgatttagaggaaatttattcttttaagaatgttagggcagcattagatgtggcttgccctggtgatagcagttaactcaactatttatgttgaagaataattgggacaaataaaagtgtgtcgacatcatcatatacaaagcagtttattaaaaaacgttaccaaatgtgtgtgaatcttttgtaaaacagttatagcagaatttaggcaccaggatgacaataccaagagtatttctttattcagatcttgacttttttttttctcctcccctctcttctctcctctcctcccctcccctcctctcccctcccctgccctgccctcccctcccctcccctcccctcccctctcctctcctctcctctcctctcctctcctctccgccccccccccccaccttagtgctgaggttaaggacttgccctctcagacgctcactcatctttttgtggtttctgggtgatttttttccctacatgtgcctgcaaaatagatgtggccatatctaatgaccagagctatttagcacattagtggctttcattgcgcttcaggattcagactgtggtggttggctgattttcttgttaatgttctagaattttggggctgctttaagatctaattccccaacagcaatgtgtggaaacctgacttcttagagaagcagtcactctggacacaggcatgatgctgtgcatgcttagcatggtcaatgtatgattgcttccaggctgttgtgtaccatgcagtaacgggctgggggagagaattccctgtgggagcaagcacactctgcagtcctcaaggtttctagtccaggaagtctgcctaattatatttgagtgatttttttttctctgactagatgttttacgtataattaacaggaaaagtggttttgaagatagaaagttgatgtacatataaagccattaaaatatgtaaaggtcccatttctctacttaccgtcttatgtgctgtctttttagccttcatcacggcggcttggactgtcctgtgccaactgtcacaccacaaccactaccttatggcgtagaaatgctgagggtgagcctgtgtgcaatgcttgcgggctctatatgaaactccatggggtatgttgctcctgtttatccatacatacaactagcacctgaattgtaaatttttagttataagacagaatcagcaaatgaaaaaaggtgtaaaagtgtgtacatatgccttgtagcgaattcaagctgctcttaattgtaatgtgaccagtcagttcagccactaaggagccaggagataaaacccactaccaaccaatccggcactaacattctctgtgaaacatctctacattttagaaatgtgaaaatgagccaagtgtaactgtgaatgcctttaatccaagatagccagggctacacggagaaacctgtagcaagaaaaagaaagaaaagaaatgtgaagtgtatacttcaaaattgatagcaaaaaaagattattataaatcttaagttttaagaatttggcaaaagcatttgtctgaagaagttatatatgataacttctgttagagtctatacttcattaaaagattgtagaacttattgtaaatttcaatatgtttgtctggttctagctaaggtttcattctatagcctaggctaacttgaacacacagcccagagtgcagtggagtacctgtctctgagccttctaagtgctgggattttccacatgagccactggctaataatgatcagttctttaaagtaaataacctgcgttgtagggagaaggtatttgatctcttttaaataaggatattaaaagcaaagattcatacaaaaatatttgctctataattgttatttcagataataaacataaagttgaaaatattaaattgtccatgataaactatattgtttttcctgaaagaatctgtttgttggagaaaggggaaatctttatgcatttataatctctctatatgtatatatatatatatatgtgtgtgtgtatatatatatatatatacatatatatatatacatattgatagcaaaataatgattattataaatcttaagttttaagaaatttagcaaaggcatttgtctgaagaagttatatctgatagcttctgtttccacacacaagtgcatgaaatttttgccaaagtctttaattagtttaaagctagcgacgtagctcagtaatgtttccctagtgtacctgagtccttagtactgaaaagaaaagattacttatttgctgtgggcctggggattgaacctagggccacgtaagccttctgccccttgagctccacttccgggcactttattttttatttttattttggtttggtttttcgagatcccaggtactttaaaaatgagggctttcagagctaaaatcatcttttgtctaaattcccttcagtgtaatcttgcatgtaagatcggtgtgaacattttttaggtgcctcgaccacttgctatgaaaaaagaaggaattcaaaccaggaaacgaaaacctaaaaatataaataagtcaaaagcttgctccggtaagtatgataaaatgcccttttatttggaaagtgttttctctggttttgaccctggaggtaggcgggctcacggctcttctcttgcaggtaacagcagtggctctgtccctatgactcctacttcctcttcttctaattcagatgactgcaccaaaaatacttctccttctacacaagcgaccacctcaggggtaagtgtgaaagcagcttggtactccagaggggttgttctgcattaaattatcttaaattttatcttatcagcagtataataatctgaaccaacaatttagtgaattggcacctaagaatattttttcagaggaaattatatttgattgtcaacaaaaagtcaaaacttaagtactttacaaacctcttaattaaggtccagcttttttagtgcttagattagcccaaaggaaaaaaagaagtgctaaagctttagattggtctgttcgcttttctcttcattctctctctccttccttccctccctccctctctccctccttccttgcttgtttgcttgtgagagtcactatgtattcctaacctagattagtaacatgactaggtgtctatcaactgcagatttactgcctcagattcgatcaaggcaaggccctctgcagttgttcacactgctcttgctgggagacctgcagcttccagcagtcattaatcccaaagggccatttcagcaatgacatgcagtacctgtcagtttctgtcgaacgaactgtgatgggaacccactctaatgtccatccaggtcacctgacctccctcagccttcagccctgtgttccacataagtcctttcaggtccatccccagccctcgggcaggactctagaaatgagtatagcccaaatgcttccctttcagccaggattacactaggaataacacccttgtttatctagaagctgttggttgtatagttgggccatggattgtttagggtacttcaaaatacagcagatttctaagctccaccctagattttttttagtcaaaatttctgggtgtgggccctggaaacttgtgtctttgtacaatagccacagggaaactgaaagcaccacgctagaggggtctgggagcttcgataggctctatctctgctttggtcacacctcagtcacaaatccaaattaacatactaaaaacagtactctatatttgagatgatttcatgttttttttttttgtggaccaaattcctttaatgaaaatagattgaaattattaaacattattctatacatgtatgaaattgtcaaagaattaaaaacattgtagctggtatataatacatttctataaatatttttgaatggccatagtgaaagaataatgtagcagaaattttttacatttttttgagacagggtccttagtcctgtctgacatagaactctgtgtagaccaagtttcctcaaagacgttcatccgcctctgcctctgttgggattaaaggtgtgtgccatgacgctcagtcttccagctggttctgtttgttgcaaatgttaggttaaggagctttcataaatgtgaaggattgtgtgtgtgtgttgggggggtattgcatatgtgtgtgtgattacatatgtgggatattcatgtgcttattatgtatgtgtgccacatatacatatagaaacctggggacagctttgtggagtctgccagccagtacctggacccgttagcccacccctgcctcctgctctcgtggcgtggagggttgactgcagctccagttaccggaagtggtaaagccattttgttacttgttacttactcttaggtcctcagattgtgtaggtaaatggggcaaaatgatgttttattgtctctggtgtattaaggagccactgtctgtgttttgtctgtggttagccccaagttactgttggggaaggtagtgtccagttcatgtggctaaagcttagtttgaatgttaatgccataggcttcctgtgtttgcttggggaatggtgctgttgtgaatgtagtcagatttgctcttgtggttttgtgatgtaaaaattcaaaattgcttttaataaatccagcctgttgggaaaagctaaaagaggaacctaacctgaccgggtgaggaagaacagcatccttctagagaccagtaggcagagcagtaagaatttagtggggactctggagaggcctttacaaggatgcagacccgcaagatcctagctctgaaacctccgtgggacctggagagcctgtggtagctctccaggcagctggggtagagctgggtgacatcacctcccattggctctggatggggttgcttctccactctactccttaccagactcccgcagagaataccaggctgccacagagatgagcagcctttccctgcatggcaaccctaccattgatgtcctcataatctgctcctaactttctgtgaggaactaggctacctttagatattgtcccatgtgaagagtaattgctagcggcttgtcccttctctagcttgttatcgaggaggccctttcatgcctctttctggtgctttatttatctgcccatgatgaacgtctgtggtcctgtggtatggtcagtgtagcagctgcacggctgtggagagaattataaagcctgtgagcagccagcagaagtgcttttataggtggctgcactgacagaagtatgtctttttttcccatctgggtctcagtgtctactggtaagccactagctctgactgatccactgtggaatctgtgtctcactgtaattgaagaaaatatgaggttcccatacaagctggagtctggtgttacactacagtgtcttcattggctcagggcgcaaatctcactcaagaatggttcacagccactgacttccagcattgcctgtgattggtgtagtaagaaattcgaaccatgaggtgcaatgataactggactacagaatcagggaatctcaggcacagatggtggggctggagtcccacatccatccctctgctgagagatgacaaggtgacatgtctacctttccttggtggaaatcaaacactgtttcacacacaggtacagcagcccccatgttgttcttcttctccctttgggaaaccagtggtggctggctgcctggtatcatttctagctggctccttgccttgtggaccattcacactggcaccaggttcttgggttctgagccaggccccagatcccttcccagcagcaatggggtatgggaaggactcctctctgtctctgtgagcgtgtggtggtcagagcacaactttgtgaagtcgcttctctccactatgttccagaggttacactaggtggtcaggcttctgtgacaagtagttttcctgtgggccctcttactgcctattctttatatttttttcctcttattctgcagttctagggtctgagtccaggtccttgtgggtgctaggcaagtgttatacattgagtgatatcctcaacccttttaaaacatggtcagggcctcactgtgtagctctggctctcctggaactcgtgtgtagaccaggctggccttgaactcaaagagatctatccgcctctgcctcccaaatgctaggattaaagatggtcaccaccatgcatagtctttaacatgtagttaaattttggccatttactaagttgctaggttagccttgatctctgtgtgtaccctaggcaagactcctgaatgccaccattcctggctagaccagatcaatcttccttacaagcaagaagcctggaaaatcacttctgctccgaagcgacattgtgcagttttttttagttttttttttttttgttgttgttgttgttgttttttctgtcctagctttctatgctagctctgacttgtgctttaatgaatgctttgtctgggagagtaagaaagacttctggtgagtcatccagtcagaacctggtcacttgtgactcagtttctccttgtgtgaagctgtgctggtgtggggttcacaggctgaagggagaaaagaagtattttcctgcccagtgttggggggggggtgctccctaccttgcagcccgggatcgatgtgaagagaaatgcatgctagcaacagtctgccttaccatggctacgtttgttattgaaaaacacttaattgacctaattgacagcagaatttggtatttattctccatggcatataaaaatagtaaaatatgctggacgtggtggtactagttcttaatttcagtagcattcaggctgatctctgagttcaaggctatgaaacataagagttccaggtgttacggactgcgtcttaattttttttggggggggctgggcataagggaactgcagaggcaggtggatctctgtgcgtttgaggccagcctggtctataaagctagttccaggacagctagggctacacagagaaaccctatatcagaaaacctcaccaatcaacaaccaaccaatcaaaacagaacaaacaaaacaaaacaaaacaaaaaaaaaacacaaatattttttgaattccaggtattgaccaagatataaactttttgttattgttgtttaggagcaaaaggttaactctacagtttcagtcatccttagatacttaatatacatctggccagtagtcttttccctgtgatttcaaaggctaacactgtgtgtgtttctctctctgtgtgtgtatacatttgtgacacttacctgcttagagtggtagcccataactgtaatctcagaactccaaaaattgaggcaggagactctccaggttgaggccagcttgggctatgtacagagaattaatgtgtgagcataaagaatcgaggaacatattttgcctgcctaaaaatagcatcagtaactactttaggaacttgagattatgttatcagtcatcattaagcttgtaccattgcactgtggcgttggtaaatatctagtccacttctgctttgctgggtgttgagaagtgtggatgtatagaggaggaaaacaagatctcctccctggaactgctcataatatggaggtgctggtggagtggcatgcacgcagacacgtggtctttctctgccggtccgacttaagtgccaggataagcaaagcagtagagggcagagggggcttgctgctcaggccgcagctggaaagaacctatggagagcagaatgtgaagcaactcagtaatagttagttttaaaaatattttgttttatgtgtatggatgggtgttttgcctgtgtgtgtgtgtgtgtgtgtgtgtgtgtgtgtgtgctgtgtgtgcccaaggaggcctgggggtcaggaaggtgggatcctctggaagtgcagttatattgtggttcatcatgagggtgctgggactcttgggccatctctttagcccccagtcttttaagtgtcatgtaacttagcctatgaagccagtggtgactccaaactcctgagttcctagccagggagttcctggcacgtgttgggattacaggcgtgttccccttcgcctaaatagttgcctaggattctttttctcataaaaaaattagtcatttaagattttttgcataatgtattttgtgtaccccttcctcaattgagtagggtttttggagagaaaaatggggattgagagctggtgagattgttattttttttgtaaagatgaccatagcctaccctgatagatttgaattcagttccagggcacaggtggtagaggtaagagaaatctccccagagttgtcctgacttccacactaataaagtgtcattcacatgcaagcacccacaatcaataacgtaactaagaattaaaaacaaaacgtaatacaagtatccaggaaggaggaatagcagtccatggaaccaaaggctggatgtttgaatttggtgtagctggaattcagggattgaatgtttagaagccagagggaggaatgaggtttttttttttttttttttataaagaaactccaagttttaaaaaatatttcaaagccctgtcaagtcagcagtaagtaaggcccaaactatgttcatctgtaaataatgaactttagctaaccctggcttccatgacaggtgtgctttctctctgtctgttggactccaacaattaccatatttttgtatggaagtattttgataattgaaataaacaatgccagcatgctcctgcttgcctgtttcctaggcatgttttccctctctcctggaatctcaagatgtatgctgaactcacacccttacatggaggtttgtcagcctcaggcttgagggtggggagcacagggggctgccctgctgtacctaacagaaacaggagttctgctgtggtggggaacaggtttccttacttgttagttaataacacacatagaggcagaagagcatggatcccatattcgatactgtctgggtctcgatggtctaagccctgcttggatctgtttcagaattttaataggtgttgtgtttctgtttctctagcacttgtaggatgctctgtagacactggcctcccttctctgctgcaggcacctctgagctttgtggcgatttgaaagagttagcatacacccttaagtgcttattctcagcagcagtgacttagggacagacattttttaggatagaccaaaataagctttgtgaaaccttcagaagaaagtgcaccaagtgggtaggttaacacttggagttcttttcatagatgtttaagaaaagcttgtttaatttttgtgcatgagtattttacctgcatgtatgtatgtgcctggtgcttgcagaaatcaggcctgggatacccctgaactacagtcagggattgtgatggttgtgagcctccatgtaggtgctgagaatcgaacccccagctctctgcaagagcaacaagtggtcggaagccttggatcatctctctagtctgggacattgtttgcggttttttgtgacatggtcttacgtaggcgtctggactcaaacttatttgagactggccttgaacttctgatcctcctgtctgttttggtcctccaggtgctaaaattctgtatggacatttgcaacctgtggtgaaattagaaagcgtggcttttgtttttttagacgtggtttctctgtataattctggctgtcctgtaactcactctgtagaccatgctggcctcaaacttagacatctgcctgtctcctcagtgtttgggctaccaatgtgaaaatttttattagaagatttttctctattgtgttggaatcagtttgagtttaccaagatgttattgctggccctggggcagaaagttaccacttctcctaccttcttgtcccccgtggtgttggagaccacacccagggcctggaggatgctcaacaagtgcttacaaattgtgcaacaaccccaggcctgctatggttttttaaagattgttttatttatatatatggtacataaatatgttgtgagtgtattacacatatgtgtgtgctgatggaggcctgaagagggtctcggatcctccagagctacaggtggttctgagtaaattgtgggtgctgggagctgggagtcaaactagatgtggaaaagcaggaagtacttatagccactgaaccatttctctagctcgtcttctgtctgtctgtctgtctgtctgtcttcctatgatggtcaagctggccttgaatacctgggtgcagatgattcccctgtttcagtgccctacccttacccctgtagctgggaaacagcacaccatcatcaccattcgaatgttttgcatgcacctcgcagagcacctgaaaactaaacccatatattaatcctgtccttaatttttaaaaagaatggttttattttatgtgtataagagctttgcttgcatatatgtgaatatatgtatgtatgtatgtatgcatgcatgtatgtatatatgtatgcatgtatgtatgtgctggtatggaagtcacaggaatttcctaccttagcctccttaatttcaggcttgaaccactttccccaccttagactcctgctgtttctattgggaagtaatttgttgttttggctttttatgtatatgaatgttttgcctacatatatgtctgtttaccacataatctggtacccagagggcatcaaccccaagaactggatgcttgagaaccaccatatgtgtgggaataaaacatgagtcttctgcaaaagcaacaaatactcttagttactaagccatctggctctgcagcccagccttgttatcacctactttctcacttgtaagttagtgggcacagagacaaggctttaattcccacttgttgcccttgcagagtatcttttatgtgcttttatctgagtgggacacaaaagtaaggaagaggtccaagatcatgtggcaagttttatggtcaaggctttgatttggaccagggctggcttgggcaatcagtgctactactactgcagccaacactgatttcttcagacaaaagaaatgaggttttgttacatttgtctggtcctagtgagtaagttaagaaacaaataccttaccactaaaataggtgggaaactagtgaccatgtgtgttcctgtgtatagccacgtctggcctacacagctctggatgactggaaacttgttatgcagacccatatggtctcaaactcctagagatctgtctgcctctgcctcccctgaaattaagaatatgtgcttagccttaggtgtatgtgtgtatgtctgtgccaggtgtgtacgagcttatgcgtgtgagttcagatatccatggaagtcagaagaagaaagcattatttcctttggaccacaagtcaaacatttttgagcagtccaatctatatctgggaaccaaacttggttctttcagagcagtcagtatgtacctttaaccatcaagccatctctctagccctatttaaaatgtgtattacatatacaggtgtatctgcttgtgtgtatacacaggtgtgcaggtaccagcatgggtgcctgtggaggtcctgcctgggcttagagttgcaggtgtcggggagctttataacgtggtttctgggattgtacccttcatcctaatgatgtagcagcaagactcttagctgagccatctctccagcacatgggtttttaccaatgaacacatcctcttaatctaaattaaatcaatatagaaaataaaatgtattatgggaagggagatattaggcagaaattatcatgttatttgtaacattaaacttaatagtgttattgaatagtaagttgctatttgtaataattactatttcaggtttctatgacaaagtatccataagtgtgtacatatatgtgaccatggctggtgttggagttctgaggacatcttgtgaggtgcattctctctttcttcccaccacgcagatcccgtggataaactcaggtcattaggcttggtagcaagtgccttttcccatcaagcacctcaccaaccctcagttttatgaaatgatcaaacagttcccaggaggctagtgcccatttttagtttcatcgtttatattcccaagctctcttgtctaaaggacgagaaaaagagttaaaaattgttaatctcagtgttaatctcacagtggtctgagcactggggtcaggcactattattgcctcatttataaatcagggcactgagcgactccctaaggtcacagaacatgctggtgttgaatcgggactggaaccagcgtctcctagctcctcagtcagagctgttacccctacccctaccccggggagctggctaatcaactcagttattaatatcccacttgccacatgctgcaaaccatgatcataaatattttgctggcattttatcttcacattccctatgtaccagccaccctctctctttgttcacagcctttctagtaacttgtaattctatctgaaagtcaccgtagcagagaatgtttaaggattttgaatactttcattttgtgtgtgtatgtgtgtgtgtatgtgtgtgtgtgtgtgtgtgtgtgtgtgtgtgtagtaagaaaatccactatctccttaacatctcatggctttgaatacacattaggaaacagtacaatgtatgtgcccacctaagctatgacagacagaggcttacctagtaagtgactcattgctctgcagagttctagaaggcacaattagtcagaaagcaagtgcgccagcagagcttgtttgcctttttgcacagccccaaattaaagatttttttacctgttttttttttttaaatccctgcctctaaaacatgtacaaaattgtcacaaaacatgaaataatcttacgggaaaacaaagttacagacaagaaagctggcttaggatggtctgaaatgttattgctaaatgagtctttgaagaaaatgaattcccttactggaatcacagtaatttattatgtatttcatgggtgtctgccaaaagggttaccagcaaaatgaagacttaattggtccgaattaaactcagtctgacagatagccttgctcgtgtttagggttacctgctaaaaagttaatacttcaaagacaggtgtcaccggacttaacagctcaaatccagctactgtcacatccagctttagaacaatttgtgtgtctgtttgctatagaatctcctatagcccaggctggcctcagatttgctttgtagctgaggctagccaggaactcctgatttttctggtttccacctcctaagggtggtgataggaatctgccaccacacccatgtcatgtgataaacagaattccaagacagtatctggtgtttcaagaggaccaactccatggcctgctgcctgtctggtatattgattggcatggtcagctttcaccagagttataagaattttcaccagagttacaagccatttttattgtatcattttcattgtatcaaactttatttgtttgatgttgtgattaaattgagtggctggtttttagggaagcctgaatatgatcttaagttttattccagggctcacagattagcagccgggaggaaacaggttcaggcagccaagagctagctgaagctccctgtgactatagggagctggcaagacttgtcctcctccaagggaagaataattcctcccatctggtccttcggagtagtgtgtagcgcaaatgggagatgcccacggactgctttgaagctttaagaacacttaaaatagaagctcgaatagcactctgaccccccccccccaccaagagagtggaaataaatctttactttctaaaaggggaatgtgaaggagttcccgtgttatatgaaggagccgtattttcaagcttccccccaaccccccatagcatttttatagtgtgtatttccttagctcccgctgcagtggctgagtatctttctgaccttggctgtgtttttttccactgatgctcacccatctcctgagaagcacgtgaacatggtgacagtttaaaggtttggcatcggggtcctggacagtttcatttaaccactgaatagaacactccatctcaatttcacaaaccttttcttcagaaggtttccagattgactttaagttaccccacagacaagttacgcaggcagttcatgtttgccttgagctatctgccttccctaccagatgcccttcggggagcacaggtgcaagacggcttgcttctttgtccaggatggattgtggctagagaatcacttgctctccatgaaggaatctgaaccaaccctgattaggccagttttggagactagtcactttaggaatggaggagttggtggcatgctgtgatggagagtgagctccaggatggctctgctgtgacggtagtgctcatggactatgtgtaccttccacatgtcaccttcgcagcttactgagtctgagccttgtcctattctgcctccatctggatcaaaataagcctttttaagtgggcatacaggtttccactcgtactttccctttgctgcgattcatgtatgtgtttttgtctttttctttcttgcggaagggagctagagagagccagccccacgggagtctaacctagaggctacagaagcatagcatggccgaggaatgcctggcttcccctcacataggattcgtgagcacagactcactcagatgcatggagaggcagatcagtgtcttgaagctcagacccccacccagagcgtgaccacccaccctataactttcctgggcacagacaacagccccttcctgcagagaggaactgtagaagaaatgcagacactctagcagagttctgtgctgtttctttgatgtaagacccctgtagcccacccatgctggctgctgcttggtgtgtagctgatgtggcgatgaccatctgatccttctgacctccccaggcattgcaccagcaccaccatgcctggtgtatatggtgctcaggattgaacacagggtttcgtgcagcttggcaatgttctaccaactgagctatctcttcaatagcttcaactgggttttcttacaaaattaaaatttatgctatgtatggtagcatgcatcggtgatactagctcctgtgaagtgggaggcaggaggatgcacagcacagccccatttcaaatgtgtgtgtttctacatgtgcacacataatttcataagctagaaaacattatctgttttctttgcttttctttttgagatagggtctcattattagatcagtttggcctgggaactcacagatcctcctgcctttgcctccccaaaggcatgtgtcaccatgtctggtggcattctgttcttttcaaaattagaatagtggtgcgtgtgtgtgagtgtgtgcgtgcgtgcgtgcgtgcgtgtgtgtgtgtgtgtgtgtgtgcgtgcgtgcgtgtgtgtgtgtgtgtgtgtgcgcgctcgcgtgtgtgtgcgtgcatgcgtgcgtgcgtggtgtgtgtgtgtgtgtgtgtgtgtgtaagcacatgtgcagacctcccacatcctgtgaagcagaactttcaggagttgttttctctcttttccctgggtttggaaattgaacaggtttgctcagtgcatggttttacccacggagctgtctttgtgtttcttctgtctgctgtgttccgacattctgttcctagggaggctctccccagttttctatccctgggagatgtgaaggccagggcaggaaagaggagattactgctgggagccagccggtgctagacactgttctgagcacccgactgctcgaatgtatcaaatctgaatcctttaataactttaccagtgacattcagagacagagatggtttattctcaagagaagcagctgggtgatgtgagatgacctgcacgcctcacgggcaaactgggctttcctcatgttcccttctgttgtagcctggaatataccagagttgttcctggaattgcttcttcctttccaggggcattttccctgcctggctgtgctgcagtctcccacctaccctggcttgcatgctatgctaagcccaggctgagtctggtgctgataacacattctttcaacaggaagttcctccattttcagttgtctgtgggagggtggagggcagataagctgtgaatggaaacccagaacagatttctactctgccctcaatgcactttgatctgggagagagagggggtttctgcctgggttgagctgcctgtctgcccggggagggaggaaggatggttagactctcctatccctaagcactcttcttctctgctttctcctagggacatttgtttcggttctagtaagagcctttggctacatcgagaggcccaccagttgataaagtcctttgaaggacttaattagatgtgggaaaatgttaactcatggaaattctttgatttgtttgttttgacttagggtctcactttagtcctggctggcttgtaaccaaggaaacagagcaggctggagtttctaactcagagatccacttgcctcttaaaaactgggttaaaggcatgcaccacagctaaaattcttaccagatcatttttattattgttgttgcttttttgttttggattttgtgtgtgtgtgtgtgtgtgtgtgtgtgtgtgagatagtgtctcgtcatcgtccaggttggcctccaagcctgtatgcaggtgaggagaatggctttgaacccctaccctcctgctactgcagtgctgagattacagatgctcatcactgtgcccaggtctccccctcaccccttaaaaaatcctttaagacaagcccaggctaatctctgcttcagcttcctgagttctgaaattataggtatgagatactatgcctacttgtgtgtgtgtatgtgtgtgtatgtgtgtgagagagatagtcagagagacagagagacagagacagaggcagagacagacacagaaaggtgtggagagagagagagagagagagagagagagagagagagagagagagagagagagagagagaggtgtgtatgttctcagggtggggggaggagactggattttattatacagtccatgcagttttcttccttctgcctccgtttctagaatgttccaatgcttggtgaatgtgtatgtacacactggtttcaagattatgagtgctttctgatatttttctcctcagatgatccatgaataaaacctgaggagaagggatttaagatgaaaaccagtgatgagctagatttcttcaggagagttagtgactctgcaattaaaaacagctgtgggagctactctaagcaggacgcagtgctcggtagttagagtcgagttgtgttcttcccaggcttgggtttatacggggcagcatggagatggtttcagggatgtactgggcccctctggcccctgcctcccctccctctccctcatttcattaaccttatggtcccattcgatcacctgagcctttaacttatgcctctgatttgtgaagccagcagccttgattattccctgttccattagagtattcaaaagaaaacactcagaggagtaagtggcaaggaggcccagcgctctcccacgtccccactcctgacgctcggataggacacggaatccatgccctgctgggtttcacttaccactgtaggacaggatttttcccatcttgctacatgatctgattatttttaataattgcataatagttcatggagcggatgacccaggtttccagaccattccgtattggattgttcccatggtttcaactattttaaggagtccagtaatggatagcttcctttgtgccacctttcctttcttttggattatttccttctaattcatttccagagtggaattactgagttcagtggccttggacactattaattgccttttaaattacttttgtcaaaaccaaagtacagtctcatgggccacggacgaagggccggcatgtttacttgacaccagccttttgtagtgtttgttataaagaccttaaattttatttttccttctgtggtgagagagaaaacccagagtcttagtattatcccaagtatataccactggggacatctgcaggccccaggcttcttgtgttgtatttcatgtttaaataccatgttcttagctcactggcaaaaggtgcttgtattacaagtctggcatcctgagttcaatccttgaaggcatggagttggaaggagggggagaaagatgattccatgaagttattgtctgcccacatacaagctgtggcatatacacacctcattctaatcccccaatctctctctctctctctctctctctctctctctctctctctctctcacacacacacacactcattaaaaggttatgaagtcttggcacacaattctgtgtttcctaagagactcagctgttgctttaagagctgatgtttgtcaggtgcacacctgcactttgggggggttgttggctttctttaggactgtgaagcctaatattcatacagaagagttatttctcagaaacttggaattgtttttcaggtataagaacagcactaaaggcattagcagttccttggggctgaggatataactcagtgtgtggtatgcttgcttgtgtatttgcatgtatggattgtagtgcatgggaaggcctgacccttcctttgtttccatctttctagatcttgagttataggcagcccccttttacttggtgtcttagggttttattgctgggaagaaaccatgaccaaggcaattcttacaaaggaaaacatttaattggggctggcttaccgtttcagaggttcagtccattatcatcatggtaggaagcatggcagcacgcaggcaggcagtgctggagaaggagctgagagttctacacatcttgatttgaaggcagccaaagtgactgtgaccttcacagcttgagcatgagacctcaatcaaagcccacacccacagcgacatacttcttctgccaaggccacacctaatagtgccacttcctatgggctaaacattcaaacacatgagtctatgggagccatacctactcaaatcactatgctcgggttcttgggagagaactctgtgctttctctctctctctctctctctctctctctctctctctctctctctctctctctctgcctctctttgagtaacctaagctggcttctccagcttcagcctcctgagtattgtgaacagatcaaagatttcttttaaaacattttcaaaacagacaggagccaagggtcatttgaaatgattgttgaatgccttgtatttctttttacgaagagctgtcactaaaattaaaatgtatagcttttgggaggcagaggcaggcagctctctgtaaatttgaggccaacataatctaaatagtaaataatcaaccccaaatctaagtcgtcaaccccatctcaaacagacaaataaacaaatgcagagccttacccttggctctcactcacactgcttttgttcctggacaatgattgctgtcctgagctgaggatagaactagggagagaataaacagaagagagcattttaacaatgttaacttaataacagtactttctatgtgtctaatctttacttatggtctagcacttactgtagaaacttgttatacaaacatgatcgttaacaacagtgatgtcccagcaaatcatatccattttattttattttatctttaaattaaattctattttatattcagacaggcttctctgtgtagccctgactgtcctggaactctctgaagaccaggatggcccccagttcagagacccactttcctctgtctcccaagcgctggaattaaaggtgtatgccttcaccacctggcttattattttttttttttgagaaagatcttttcatttatttatttttattttatgtgtattggtgtttgcctgcatgagggtgtcagagaattggagtcacagtggagagctgccttgtgactgccccttcagaatgctcgcatagcaaggcaccattcagacatgattacagacgtgctgagtcaagtctaagccaggtaacttgtatgcagactggaagtgacccgcccagaactttggaattcaacctgtctacaccaagcaggctgatttagatcctaccccagaagcctttggcctctgagactttctgcttatcacttgtcttgtgctgtgagctggctagccttctctcctggagtcccaacaaacccagcagggtctttgttaatgattctggtgctctgggctagctctctgctgttccagctgtctgggtgatcccagaactctctgaatttctcagaagaaaaattcttgtttcagagaaatcagacacagccagagaccagcagattggctgtttctggaatgaatgggttggcaagaagtctggcgtgacagaaatcactatacagagctactgtttttgtatcactcagacttatgtacttgtaatggagtttctgaagtcaagatctaaagtcatttgccagagctccgagtgtcatactgtctgcagtggccagcttgacagcactaatgcagttatttcagtaacttcacaagaatctttatacaattttaaacatctcgacttgggcatggtggtgcacgcctttaatcccagcacttggaaggcagaggcaggtggatttctgagttcaaggccagcctggtctatagagtgagttccaaccagggctacactgagaagccctctcaaatgacaacaacaaaacagaaagaaaccaaaacaaaaaacaaagagcttgatatctcaacaactttgtgagatatcccaaccctgtttgtcctgatgcatataatgctgtcagtttgggtctttatgcttgtaatatttacattaaaatctgagtttagggatttactccctttcttcctcttttctatcttttttttttttcatatttacttttgagtttgggtgttgctaagattgatcttgcacgaactgtatctgtttgtctccctattctctccatggtcttgttttatgatctggactggtctaggacatactgtgttgctcagacttgccttggacacacagttaccttccttctctgtctcctgagtcctgggttataggcattcactcccatgcctgcctccaggtcttggactctcatcttctcagtactcaggaatccacacctctgctaccaggccaacgtcttcctgggtttttgtcaatctgattttttgttgggaaagagaaagatggggacagtggatagttgggtttggtctgttttgttggaaagtttgtgtgaggagggagcaagtcacatgaccggagaagccactcctagggcactgccttccatctttgtgcaggagtgtgaaggctggagaaaaacgcaggtcctgcttggggaaaggagtccctgggacacacagaaccccagcacaccccattcagcatagctgagtctggtgccttggggttcttcaaaataatggccagagcatcaaaatggatgtttgaggaatttaacagagtgatgtttccaagcattatttgaaaaattttaaggaatcataagctgtttcaaacaaatacccggtatggaatggagccctggaggctggggagaacttagggtgcttgagtcttgcgaggaaaaaggtatgattagagaatgaacagctgcggctgaagtttcgcggaagccttgcaagtgtgactggtcccttaaacgctaagcagatgccagttacttgggtttggtcctacagcgtttgcagtgagaaccctgacagcgtggtttgtttctgctttccactcttaagtttgacaaattggagtcggtctttcggaaccctttcctgtctacctctgctttgtgctgggtggtcactgggttccgaaggtaacaacactgttctaagaatgttgccagaaccaggaggatggcactggatgacagtggtcagcacagtgtgtgccccttgggcgaggaagagtaaggctggctttagttttgctgactatgtcatttgatccctgatgttgaggcaggaggattggaccagctaacaacatgatgtataaccatctctccccctctgttctcttcttccatcaggtaggggcatcagtgatgtctgcagtgggagaaaacgccaaccccgagaacagtgacctcaagtattcaggtcaagacggcctctacataggtgtcagtctgtcctcccctgccgaagtcacatcctccgtgcgacaggattcttggtgtgctctggccctggcctgagctggtgctaccaagaggcaaggagggctctgaaggcctcataccacttgtgtctgatattgtccagcagtccagatggcagcaaaaatgcagacataacattccttcgatgcgtgatttctgtgcctttgttttgaaagagatatatttctcaagaagcttactgaagtaagaagagatgggcttttgcaggaagggccagcaccgtgggcatgtggcctgctcctgccagcctgggctgcttcctgcctctgactctgccccataccagtgggagaaactgtgacaatgaccggggccttgtctgctaaggaagattgagagatttaagagaaaatgtttgtgtattgctccaaatcatgtgcttcttgtgatcaacctcggttatcccagaacccattcatccccgaccaccgtgcacatttcacaagcgttcgtggagaggagcactgggagccatttggtctatcctggaggcggagtgcattcctggggtctcaacaagaatattaatttgcaagattgcatcatgacagacactgactgacttatctcaacgttcatcgtaacgtggctgatctgaggtcacttggaatttgtaaacagggtagcaaacaagatatttttcttccatgtacacaataatttttttaagtgcaatttgcgttgcagcaatcagtgttaaatcatttgcataagatttaacagcatttttataatgaatgtaaacattttaacttaatggtacttaaaataatttaaaaaaaagttaactttagacatatgcttcttacactcacagcccacttctgtgttcccaattgtttaaaagaaaaaaaaaaagatttcaagaacaaatcttctctcaggaaattgccttttctccatttatgaatttttatacaagaacaccaacacagtccccgttcttttactgaggaaaaagtgctggaaattgcaacaaacctttactacctagagaatagcatttgtaaatattctaagtatctgtaacactcttgacgcctgtaccacgtgaccaacccacaggttggtttacattattattttttttaatgggatatcatatggaaacctatttcaccagagttttaaaaaataaaaagggtattgttttgtgttctgtacagtga

SEQ ID NO: 29 - DNA, 11014 bp, Homo sapiens
ggaggacacttctcagaaggggttgttttgcttttgcttatttccgtccatttccctctctgcgcgcggaccttccttttccagatggtgagagccgcggggacacccgacgccggggcaggctgatccacgatcctgggtgtgcgtaacgccgcctggggctccgtgggcgagggacgtgtggggacaggtgcaccggaaactgccagactggagagttgaggcatcggaggcgcgagaacagcactactactgcggcgagacgagcgcggcgcatcccaaagcccggccaaatgcgctcgtccctgggaggggagggaggcgcgcctggagcggggacaggtgaggccgcgcgaacgttccagcctggcgcggctgcgggatccgggcgcgctgggaaagcgaggaggaccccgcgcgggaatcagggagcatcgcaggctgccgggcagcccctcgcggaagtgcgggctggggcgggctggggcgggctggggcaggccggggcgtccagcttaccttcctccggggcttgccccgccgctttgatggaggtgcaaacatttggagaagggcgggggtgtaggggctgggccggggctcgcagggctggggccccggatttacatgaaacaggcgtgcgggagcccattgttggcccccggcctcccagacccgcccggctgggtctgatatggccgctctcggccaatgggaggctgcccggcacttcaaagcgtgcgcggcccaatccgccgagcaccccagcgctgccgccgcggctctatttatggggagggcactgaatttcggtccccagagacctacactagtagagccttggggagttcaagtggaataacttctccccacccctctgcccccgtcccctccccccaagtcttggtccgcgccctcctcccgggtctgtgccgggacccgggacccgggagccgtcgcaggtctcggtccaaggggccccttttctcggaagggcggcggccaagagcagggaaggtggatctcaggtagcgagtctgggcttcggggacggcggggaggggagccggacgggaggatgagctcccctggcaccgagagcgcgggaaagagcctgcagtaccgagtggaccacctgctgagcgccgtggagaatgagctgcaggcgggcagcgagaagggcgaccccacagagcgcgaactgcgcgtgggcctggaggagagcgagctgtggctgcgcttcaaggagctcaccaatgagatgatcgtgaccaagaacggcaggtgggtgcgcgtccggagcccgcgcgcgccgcgctctccagcgcctgggcagcctgggggacctggcaagttcccggaggtcgaaccctttttctcctggaggagggctttgtgtttgttcccgctctggttaactccctcgagtgcatttctacaagcccctcttctggggctttctccgcggaagcttggggaggaggaacgcgcacttcggtgtcccgacctcggaggcatcccgggacccgcgaggcgcgccctggtccccgcctgtccccgcgggatgtggcctcctgcactgaaacccttcgccaggtcctctcctcccctccctcccgaggccgtggagatggtgaggaggccacctggacctggcagggctcggggaagggggagcttgggagtcaccctcggacgttccccagggggctcctctgtgccccgaaataactgaggcctctgtgcccagcttctgcctccggcctacctggtcagtgtcggggtcctcctgcgcccgccccgtgttttccaggaggatgtttccggtgctgaaggtgaacgtgtctggcctggaccccaacgccatgtactccttcctgctggacttcgtggcggcggacaaccaccgctggaagtacgtgaacggggaatgggtgccggggggcaagccggagccgcaggcgcccagctgcgtctacatccaccccgactcgcccaacttcggggcccactggatgaaggctcccgtctccttcagcaaagtcaagctcaccaacaagctcaacggagggggccaggtaggtgtgaggagcccgccaggtctgggaccagcgaggagggggccgcgctgcgccttctgcacgggggttgtgggaagggacgctgcttgaacgggaggcgacgtctgccctggagaaactgccacagccttctctaataaggcctttagcgctgtttatactaagctgataacatccacgcctggcgaacggggagcgggagcactcccctttgaaggactggagcttttggggaacttccgttgtctagccctaaactctcctgggggtggaaaagatatcagccttgatggcaaagtcgcatttaaatttaaacatgcgccacagtacttactgcgtggagtcggaacaaacttgtaaagtcgtgcttttctaaagaacattctttagtcggggattgttcctggaagaccccaggttaggcaagttgcaaacaagctcagtcttttaaaaatgaccatagccttcctgaaagccttagtactttattccaccaggtgaaaggattttgtgatgagcattcattgcttttaatggtgtgtagcatctcacatcccttttccaaacaagctgtgggaatagcacatataaaccgcggagaagcctcccctggtggaaccccacttccctcaacagcagagacactttcttgggatccagaggactttctgcatcctggagaaatggatgttttgctgttttaacgcaggcctttcagtgccaccaatcctgtatctgtctccctcagatcatgctgaactccttgcataagtatgagcctcgaatccacatagtgagagttgggggtccacagcgcatgatcaccagccactgcttccctgagacccagttcatagcggtgactgcttatcagaacgaggaggtgagaaggacagaggcggatcgctttcccggtgtgctgcggtgtggtgtgctgctccgtggagattctggaggagcggggagacgcgctaacccgcactgagaggaaggcttcctgccctttcaaataatattccggaacttgaaatggaagcacaggagagaactgtttaaattaagtccccattcaaacattttccccttgaattctccatacaagtgtttaaaactagaaacaacttctcaatgctcaaaatgaaaagatccaaaaagcattcaggttaaatggtgtgagaatttcttgagaacaagacttgagtgagagaggggcatgtccttccttggaaatcttccccaaagggtgggggggcaacccctcaaatctctgcagtgtgaagactcaactagatacaagctactgcataggtgcctgtaaatctatgcctaagcccaaccccaaagtactgcaaattcgacattagttggataccttgttggtgttgacgttgaccgaaaactagaacttccaggtctctatttcctaagcagccccagactgtgttttcagccatttctgatttatacacatggaacattgttagtagtaggttaaatttattgtgaatcccactcagaacattgacattgaaaatttttcataagcatgctactctgtacaattactcagctattttcagttccaaatagaaaactgtatgtggaaagaagtctgattatatttgaatatttaaaagtggtactggcatttctcaatttcttggtgccaaattaaatcccctggctaatagggaatatactagtaaatgcaatttcttgtttttcagatcacagctcttaaaattaagtacaatccatttgcaaaagctttccttgatgcaaaggaaaggtgagagaattctaactataaatacccttgggcaaagaagtatgcagaaagatgaaatattgctgcacatactcttttctgaatttccttatttttgaaaattcgatatactttttttttttcattttgatagaagtgatcacaaagagatgatggaggaacccggagacagccagcaacctgggtactcccaatgtacggtttgttgcactctgtcatgtcattctgcgtcatcgggactagacttgctgagagctgggaagtggagatggagaagacaagggtgtttctgggtgtgcctgggatgtaagattgcctttttgccatgcgaggctcttggccctgtgatgttgaagctgtgttgcccatctaacctctgctctaatcggggctgtggatactctcctgggtgcttttgttttgccgtgaggcagctgccaccatgcctggggtggatcattgagacctagctgggtgtttggactctcctgtattaggtaggcaacaggagaatctagctcattacctcctctttgaggctttcattaatggttgaagagccatctttccaatgatgcttaggaaccaaatttttccttagccctttggttctaggaatgtctcaccagctcctgtggctctgaggatgagagagttggatttaagtctagctccctctaggactttcaggagtcagagtgcaggatagaggattatacggcagcatttgttgggagaaacgctctctctcatcctggtccgtcctctccacccggggaagggacttggagatattaaacaatgaacgcggtagcactggctggtcaagaggctggatgaatcaacagggcacactcctccttacacaggcattttctattctgtagatttttcatcatttcctaggctgattgaacaaccagaaaggcagtcacttgagtagagtgagccactgctctggccagggccggctgggcagccagggcacgtctgcacccttccttccagtgctgcctggagaattgttagtagtttggaaattgaagccacagtagttgtcccgctaggggttgctttttctcaatcaaaacaacaaagcttgaagagtgtagaagaggacgggcacggtggctcacgcctgtaatcccaacactttgggaggccaagttggatggatcatttgagatcagggagttagagaccagcctggccaatatggtgaaacctcatctctactaaaaatacaaaaattgtcaggcatgatggtgggcgcctgtaatcccagctacttgggaggctgaggcatgagaatcccttgaacctgagaggcggagattgcaataagccaagatcacaccactgcactccagcctgggtgacagaatgaaactcccagtctcagaggagaaaaaaatgagtggacaagaaattgtagttttagaggaaggaaggggagtcttggaagaactttctgattctcctggggagaatggggggagcttaaaccaggagagtgagcagtaaaagggtctacccccagctaggaaggcacctcccgtctctgtgggtggcaggaggagaaggggagggcacccttgtctaagcaccaccccacctctctcagcatctctcacctgctctctgcctgtggttacattgtattcatgctcagtggaggaaagctcacctgccttggggaatagtagatctcaaagcaatccagaggattctcaggaggaaacagcttaggttgcctgaggccaggctcctgggtttactcaggtacacacaggattggaagccttgggttacctgtggtagtgagtgtggggctgatggcctcagatgtcttgtgaggcagactgtgtcctaagtatgagacactcagggtgcttcccccatcaggggcccctgaggggaaggtgggaagtcactggcctgggctctgctctctggagtgatggagggacagtccctggcctgggctctgctctctggagtgatggagggagagtccctggcctgggctctgctctctggagtgatggagggagagtccctggcctgggctctgctctctggagtgatggagggacagtccctggcctgggctctgctctctggagagatggagggagcactaatgcaggttactcagcactgtcttttctcacagcaggggggtggcttcttcctggaaccagcaccctgtgtccacctgcaaatcctcatcctcagtttggaggtgccctctccctcccctccacgcacagctgtgacaggtacccaaccctgaggagccaccggtcctcaccctaccccagcccctatgctcatcggaacaattctccaagtgagtcctcagcctcattctgccaggggttggtgggtggctgcaagaccactttgggaaaggcattctgcaggagtctagaatctaaaaaaatggagacggttttctggaacacatacccaagcccagttttttagtagctcaagagaagatcttcaatttatgtctccgccactgccgctgctggcggaacaaccacggacacccagatcagaggcttgcatccttgcacaggcctcagagctgctgctccaggttttgaaaatgacagattcctgggcctctccacagaaccatggtcgatccttaggaggagagcccaggtttgagtcttctatgaacctctctaaagtgacaatgatgggcagccaggctcaagaattcctgactacaccagtgattctccaaatacggtgcccaggccagagcctcagcaccacccgagagtgggcacagtctcaggccccaccccagactgacaggcagcagctcttggtggggcccggcaatgtgtgcttttttttgagacggagtctcgctctgtcgcccaggctggagtgcagtcgcacgatctcggctcactgcaagctccgcctctcgggttcacgccattctcctgcctcagcctcccaaggagctgggactacaggtgcctgccaccaggcctggctaatttttttgtatttttagtagagacggggtttcaccgtgttagccaggatggtctcgatcttctgacctcgtgatccacccgcctcggcctcccaaagtgctgggattacaggcgtgagccaccacgcctggccagtgtgcttttaaaagccttccaggccattccgatgcatgctccaatattaggaacactgggatagaccataaagatcccctggcctaattctctctataacactgtatatgtctagacttaattttgtctggctccaaaagaaggaaaatagctaaagaataccataaaacaattaagcaattaaagctgatttgaaatgaaaggaccttattgggttaggaagtcactgggacttgttcaaccagaggctagactctgaggcaggaagatcttatttctaattttgcctggagtaatggtttctatcgcccattcttatgaagtaatcactggtaaaaaggcagggtaaagttatatttatttttaaagataagtaattccaagtcagtgattgtaagtaagattcaatgtctacagggcatctactgataatgatgataagggaaaaagcttgggtttaccagggtatgttttcaaatacatatatttggcaataaatcttgcccctgataaccatgtaaatagactaatggattgttttctacagttaatatcccatgtacattttgttttcagtgttacgtagcttcagttattggtggtatttcactgtactttgttgttcttggaagacaccatctataattgcactttgttaccttccccccttagcctattctgacaactcacctgcatgtttatccatgctgcaatcccatgacaattggtccagccttggaatgcctgcccatcccagcatgctccccgtgagccacaatgccagcccacctaccagctccaggtaatgtatgtccaggacctggtgcaaagcatcctgggagctctgcctgtgacttcacgctgtttccattcccataggcccttagtccttattctccttggtccctgtgggtggttgggtctttatttagaattctttattagccagctatgcccagggattgcaggtgacatgactgccgagttcctgtttgcagtctgttcgctggaaggactgggctcctttacaacccaggtgtggaatgggagctgcgctatcccatccctgaatgaaaccagggtccccatcctggttctgccacttactggttcacgtgatggacaagtcttttagcctctctgggcctcagtttcctcacatataaaaggaaggtggtaaaaaaataacccagcctcggcctgtctcctacagggttgttggggtcagtaggtagagcttaaagagatcgtttcggaaccttttccaacaaaagctagtaaatgaaggaaatgagtttattggcttttctatggatacaggctcgaagtctttaatatatgtgctaggtaactggtaaacaatgatgactattttgttaccaacttgcaagttatgcagagggaaaaaggcttacaaattaagcaggctggtaaatgtcttacatttcttcataggatgaatataaaaacctaaaataccaaagctagaagtcaaccctcactttctagggaggaaggagggccagagatattaaatgattggaccagctcacagcagagtgagcctggaattaagtgatcttgacctcaaaggcaatgcacttcattttctagaataccaaaatatgcctgcgatcttaattcttgtctagaaaacagttccttcataataagaattcaattgcccgcggttagaaacagagcaacaatgcgtaaacaagcgaagctttcaggggctccaagagcatcgccccagaagcctgcacccgatcagatgacccgcacactgcaagctgttgacagaggccccacccgagggtctcagtgtggctctaattgggcatcttagaacctgaagctttcatttgtaaaatggcataaaaatctgccttgattaactcagacttgtttaaaacagtatggtgatacaacataaggtctcattattcacttgtagaaagacaaggttatttcccaaaataaaatcttaccataattgaatgctatccacttccatgtgcttagactggagaattcaatagtcatttccaccttcctcattttatgccttgagaaacacagcctataagtagtctcaggcaaagtgtaatgtgacacagctaggtaaaggcggaactgggaatggcttcctagtctgactgccaggtgcttttcttgctgctgggcaccatgctagcacacctatgtactgaacaggacaaagtgcagggaattgtgtctgtactggagttactctaaggaatgtctgctgcttagtgtttgaggagaggctggtcttcatcgtgagaatcactgcggtggtgggggtggggtgtcctagataaaaacatgtgtacttaagcccatcctcagtaacttttggttgagactatctgaaaagttttattctgaatgagagtgcaaaactactggtctgagtctttcttttctgttttgtgtgtttgtttgacggagtttcactcttgttgcccagactggagtgcaatggtgcaatcccagctcactgcaacatctgcctcccgggttcaagcgattctcctgcctcagcctcccaagtagctgggattacaggcatgtgccaccatgcccagccaattttttgtatttagtagagacggggtttcaccatgttagtcaggctggccttgaactcctgacatcagctgatccacctgccttggcctcccaaagtactgggattacaggcatcacccactgcggctggcctggtatgagtctttcgcagtgaaacttaacagcgctctttcatgagctctgaatatgtgaataatcttttcagtcatcttcctgatgattttgtttcttattaatagatacgacaataacttctatacatcacagaatgtgcttgtgagtcctttaataatttggagaaaatgacctgtttgaaagaagaaaactgtcatattacacagtcactccgaatgggatttctggtgtgtttttccatccttagctggcctgcagcccctgcccaggccctgctcactggtgtctttctgttgcagtcagtaccccagcctgtggtctgtgagcaacggcgccgtcaccccgggctcccaggcagcagccgtgtccaacgggctgggggcccagttcttccggggctcccccgcgcactacacacccctcacccatccggtctcggcgccctcttcctcgggatccccactgtacgaaggggcggccgcggccacagacatcgtggacagccagtacgacgccgcagcccaaggccgcctcatagcctcatggacacctgtgtcgccaccttccatgtgaagcagcaaggcccaggtcccgaaagatgcagtgactttttgtcgtggcagccagtggtgactggattgacctactaggtacccagtggcagtctcaggttaagaaggaaatgcagcctcagtaacttccttttcaaagcagtggaggagcacacggcacctttccccagagccccagcatcccttgctcacacctgcagtagcggtgctgtcccaggtggcttacagatgaacccaactgtggagatgatgcagttggcccaacctcactgacggtgaaaaaatgtttgccagggtccagaaactttttttggtttatttctcatacagtgtattggcaactttggcacaccagaatttgtaaactccaccagtcctactttagtgagataaaaagcacactcttaatcttcttccttgttgctttcaagtagttagagttgagctgttaaggacagaataaaatcatagttgaggacagcaggttttagttgaattgaaaatttgactgctctgccccctagaatgtgtgtattttaagcatatgtagctaatctcttgtgttgttaaactataactgtttcatatttttcttttgacaaagtagccaaagacaatcagcagaaagcattttctgcaaaataaacgcaatatgcaaaa

SEQ ID NO: 30 - DNA, 10078 bp, Pan troglodytes
ggggagggcactgaatttcggtccccagagacctacactagtagagccttggggagttcaagtggaataacttctccccacccctctgcccccgtctcctccccccaagtcttggtccgcgccctcctcccgggtctgtgccgggacccgggacccgggagccgtcgcaggtctcggtccaaggggccccttttctcggaagggcggcggccaagagcggggaaggtggatctcaggtagcgagtctgggcttcggggacggcggggaggggagccggacgggaggatgagttcccctggcaccgagagcgcgggaaagagcctgcagtaccgagtggaccacctgctgagcgccgtggagaatgagctgcaggcgggcagcgagaagggcgaccccacagagcgcgaactgcgcgtgggcctggaggagagcgagctgtggctgcgcttcaaggagctcaccaatgagatgatcgtgaccaagaacggcaggtgggtgcgcgtccggagcccgcgcgcgccgcgctctccagcgcctgggcagcctgggggacctggcaagttcccggaggtcgaaccctttttctcctggaggagggctttgtgtttgttcccgctctggttaactccctcgagtgcatttctccaagtccctcttctggggctttctccgcggaagcttggggaggaggagcgcgcactccggtgtcccgacctcggaggcatcccgggacccgcgaggcgcgccctggtccccgcctgtccccgcgggatgtggcctcctgcactgaaacccttcgccaggtcctctcctccccgccctcccgaggccgtggagatggtgaggaggccacccggacctggcagggctcggggaagggggagcttgggagtcaccttcggacgttccccagggggctcctctgtgccccgaaataacggaggcctctgtgcccagcttctgcctccggcctacctggtcagtgtcggggtcctcctgcgcccgccccgtgttttccaggaggatgtttccggtgctgaaggtgaacgtgtctggcctggaccccaacgccatgtactccttcctgctggacttcgtggcggcggacaaccaccgctggaagtacgtgaacggggaatgggtgccggggggcaagccggagccgcaggcgcccagctgcgtctacatccaccccgactcgcccaacttcggggcccactggatgaaggctcccgtctccttcagcaaagtcaagctcaccaacaagctcaacggagggggccaggtaggtgtgaggagcccgccaggtctgggaccagcgaggaggggccgcgctgggccttctgcacgggggttgtgggaagggacgctgcttgaacgggaggcgacgtctgccctggagaaacggccacagccttctctaataaggcctttagcgctgtttatactaagctgataacatccacgcctggcgaacggggagcgggagcactcccctttgaaggactggagctttgggggaacttccgtgtctagccctaaactctcctgggggtggaaaagatatcagccttgatggcaaagtcgcatttaaatttaaacatgcgccacactacttactgcgtggagtcagaacaaacttgtaaagtcgtgcttttctaaagaacattctttagtcggggattgttcctggaagaccccaggttaggcaagttgcaaacaagctcagtcttttaaaaatgtccatagccttcctgaaagccttagtactttattccaccaggtgaaaggattttgtgatgagcattcattgcttttaatggtgtgtagcgtctcacatcccttttccaaacaagctgtgggaatagcacatataaaccgcagagaagcctcccctggtggaaccccacttccctcaacagcagagacactttcttgggatccagaggactttctgcatcccggagaaatggatgttttgctgttttaacgcaggccgttcagtgccaccaatcctgtatctgtctccctcagatcatgctgaactccttgcataagtatgagcctcgaatccacatagtgagagttgggggtccacagcgcatgatcaccagccactgcttccctgagacccagttcatagcggtgactgcttatcagaacgaggaggtgagaaggacagaggcggatcgctttcccggtgtgctgcggtgtggtgtgctgctccgtggagactctggaggagcggggagacgcgctaacccgcactgagaggaaggcttcctgccctttcaaataatattccggaacttgaaatggaagcacaggagagaactgtttaaattaagtccccattcaaatattttccccttgaattctccatacaagtgtttaaaactagaaacaacttctcaatgctcaaaatgaaaagatccaaaaagcattcaggttaaatgctgtgagaatttcttgagaacaagacttgagtgacagaggggcatgtccttccttggaaatcttccccaaaggtggggggggcaacccctcaaatctctgcagtgtgaagactcaactagatacaagctactgcataggtgcctgtaaatctatgcctaagcccaaccccaaagtactgcaaattcaacattagttggataccttgttggtgttgacgttgaccgaaatctagaacttccaggtctctatttcctaagcagccccagcctgtgttttcagccatttctgatttatacacatggaacattgttagtagtaggttaaatttattgtgaatcccactcagaacattgacattgaaaatttttcataagcatgctactctgtacaattactcagctattttcagttccaaatagaaaactgtatgtggaaagaagtctgattatatttgaaaatttaaaagtggtactggcatttctcaatttcttggtgccaaattaaatcccctggctaatagggaatatactagtaaatgcaatttcttgtttttcagatcacagctcttaaaattaagtacaatccatttgcaaaagctttccttgatgcaaaggaaaggtgagagaattctaactataaatacccttgggcaaagaagtatgcagaaagatgaaatattgctgcacatactcttttctgaatttccttatgtttgaaaattcgatatactttttttttttcattttgatagaagtgatcacaaagagatgatggaggaacccggagacagccagcaacctgggtactcccaatgtacggtttgttgcactctgtcatgtcattctgcgtcatcgggactagacttgctgagagctgggaagtggagatggagaagacaagggtgtttctgggtgtgcctgggatgtaagattgcctttttgccatgcgaggctcttggccctgtgatgttgaagctgtgttgcccatctaacctctgctctaatcggggctgtggatactctcctgggtgcttttgttttgccgtgaggcagctgccaccatgcctggggtggatcattgagacctagctgggtgtttggactctcctgtattaggcaacaggagaatctagctcattacatcctctttgaggctttcattaatggttgaagagccatctttccaatgatgcttaggaacaaaatttttccttagccctgtggttctaggaatgtctcaccagctcctgtggctctgaggatgagagagttggatttaagtctagctccctctaggactttcaggagtcagagtgcaggatagaggattatacagcagcatttgttgggagaaacgctctctctcatcctggtccgtcctctccacccggggaagggacttggagatattaaacaatgaacgcggtagcactggctggtcaagaggctggatgaatcaacagggcacactcctccttacacaggcattttctattctgtagatttttcatcatttcctaggctgattgaacaaccagaaggggagtcacttgagtagagtgagccactgctctggccagggccggctgggcagcgagagcacatctgcaccctcccttccagtgctgcctggagaattgttagtagtttggaaattgaagccacagtagttgtcccactaggggttgctttttctcaatcaaaacaacaaagcttgaagagtgtagaagaggacgggcacggtggctcacgcctgtaatcccaacactttgggaggccaagttggatggatcatttgaggtcagggagttagagaccagcctggccaatatagtgaaacctcatctctactaaaaatacaaaaattgtcaggcatgatggtgggcgcctgtaatcccagctacttgggaggctgaggcatgagaatcccttgaacctgagaggcggagattgcaataagccaagatcacaccactgcattccagcctgggtgacagaatgaaactcccagtctcagaggagaaaaaaatgcgtggacaagaaattgtagttttagaggaaggaaggggagccttggaagaactttctgattctcctggggagaatgtggggagcttaaaccagaagagtgagcagtaaaggggtctacccccagctaggaaggcagctcccgtctctgtgggtggcaggaggagaaggggagggcacccttgtctaagcaccaccccacctctctcacctgctctctgcctgtggttacattgtattcatgctcagtggaggaaagctcacctgccttggggaatagtagatctcaaagcaatccagaggattctcaggaggaaacagcttaggttgcctgaggccaggctcctgggtttactcaggtacacacaggattggaagccttgggttacctgtggtagtgagtgtggggctgatggcctcagatgtcttgtgaggcagactgtgtcctaagtatgagacactcagggtgcttcgtccatcaggggcccctgaggggaaggtgggaagtcactggcctgggctctgctctctggagtgatggagggagagtccctggcctgggctctgctctctggagtgatggagggagcactaatgcaggttactcagcactctcttttctcacagcaggggggtggcttcttcctggaaccagcaccctgtgtccacctgcaaatcctcatcctcagtttggaggtgccctctccctcccctccacgcacggctgtgacaggtacccagccctgaggagccaccggtcctcaccctaccccagcccctatgctcatcggaacaattctccaagtgagtcctcagcctcattctgccaggggttggtgggtggctgcaagaccactttgggaaaggcattctgcaggggtctagaatctaaaaaaacggagacggttttctggaacacatacccaagcccagttttttagtagctcaagagaagatcttcaatttatgtctccgccactgctgccgctggcggaacaaccacggacacccagatcagaggcttgcatccttgcacgggcctcagagctgctgctccaggttttgaaaatgacagattcctgggcctctccacagaaccatggtcgatccttaggaggagagcccaggtttgagtcttttatgaacctctctaaagtgacaatgatgggcagccaggctcaagaattactgactacaccagtgattctccaaatacggtgcccaggccagagcctcagcaccacccgagagtgggcacagtctcaggccccaccccagactgacaggcagcagctcttggtggggcccggcaatgtgtgcttttttttgagacggagtctcgctctgtcgcccagactggagtgcagtggcacgatctcagctcactgcaagctccgcctctcgggttcacgccattctcctgcctcagcctcccaaggagctgagactacaggtgcctgccaccaggcctggctaatttttttgtatttttagtagagacggggtttcaccgtgttagccaggatggtctcgatctcctgacctcgtgatccacccgcctcggcctcccaaagtgctgggattacaggcgtgagccaccgctcctggccagtgtgcttttaaaagccttccaggccattccgatgcatgttccaatattaggaccactgggatagaccataaagatcccctggcctaactctctctataacactgtatatgtctagacttaattttgtctggctccaaaagaaggaaaatagctcaagaacaccataaaacaattaagcaattaaagttgatttgaaatgaaaggaccttattgggttaggaagtcactgggacttgttcaaccagaggctagactctgaggcaggaagatcttatttctaattttgcctggagtaatggtttctatcgcccattcttatgaaataatcactggtaaaaaggcagggtaaagttatatttatttttaaagataagtaattccaagtcagtgattgtaagtaagattcaatgtctacagggcatctactgataatgatgataagggaaaaagcttgggtttaccagggtatgttttcaaatacatacatttggcaataaatcttgcccctgataaccacgtaaatagattaatggattgttttctacagttaatatcccatgtacattttgttttcagtgttacgtagcttcagttattggtgatatttcactgtactttgttgttcttggaagacaccatctataattgcactttgttaccttccccccttagcctattctgacaactcacctgcatgtttatccatgctgcaatcccatgacaattggtccagccttggaatgcctgcccatcccagcatgctccccgtgagccacaatgccagcccacctaccagctccaggtaatggatgtccaggacgtggtgcaaagcatcctgggagctctgcctgtgacttcacgctgtttcattcctataggcccttagtccttattctcctcggtccctgtgggtggttgggtctttatttagaattctttattagccagctatgcccagggattgcaggtgacatgactgccgagttcctgtttgcagtctgttcgctggaaggactgggctcctttacaacccaggtgtggaatgggagctgcgctatcccatccctgaatgaaaccatagtccccatcctggttctaccacttactggttcacgtgatggacaagtcttttagcctctctgggcctcagtttcctcacatataaaaggaaggtggtaaaaaaataacccagcctcggcctgtctcctacagggttgttggggtcagtaggtagagcttaaagagatcgttttggaaccttttccaacaaaagctagtaaatgaaggaaatgaatttattggcttttctatggatacaggctcgaagtctttaatatatgtgctaggtaactggtaaacaatgatgactattttgttaccaacttgcaagttatgcagagggagaaaggcttacaaattaagcaggctggtaaatgtcttacatttcttcataggatgaatataaaaacctaaaataccaaagctagaagtcaactctcactttctagggaggaaggagggccagagatattaaatgattggaccagctcacagcagagtgagcctggaattaagtgatcttgacctcaaaggcaatgcacttcattttctagaataccaaaatatgcctgcgatcttaattcttgtctagaaaacagttccttcataataagaattcaattgcttgcggttagaaacagagcaacaatgcgtaaacaagcgaagctttcaggggctccaagagcatcgccccagaagcctgcaccgatcagatgacctgcacactgcaagctgttgacagaggccccacccgagggtctcagtgtggctctaattgggcatcttagaacctgaagctttcatttgtaaaatggcataaaaatctgccttgattaactcagacttgtttaaaacagcatggtgatacaacataaggtctcattattcacttatagaaagacaaggttatttcccaaaataaaatcttaccataattgaatgctatccacttccatgtgcttagactggagaattcaatagtcatttccaccttcctaattttatgccttgagaaacacagcctataagtagtctcaggcaaagtgtaatgtgacacagctaggtaaaggcggaactgggaatggcttcctagtctgactgccaggtgcttttcttgctgctgggcaccatgctagcacacctatgtactgaacaggacaaagtgcagggaattgtgtctgtactggagttactctaaggaatgtctgctgcttagcgtttgaggagaggctggtctccatcgtgagaatcactgcggtggtgggggtgggatgtgctagataaaaacatgtgcacttaagcccatcctcagtcacttttgattgagactatctgaaaagttttattctgaatgagagtgcaaaactactggtctgagtctttcttttctgttttgtttgtttgtttgacggagtttcactcttgttgcccagactggagtgcaatggtgcaatcccagctcactgcaacatctgcctcccgggttcaagcgattctcctgcctcagcctcccaagtcgctgggattacaggcatgtgccaccatgcccagccaattttttgtatttagtagagacggggtttcaccatgttagtcaggctggtcttgaactcctgacctcaggtgatccacctgccttggcctcccaaagtactgggattacaggcatcacccactgcggctggcctggtatgagtctttcgtagtgaaacttaacagcgctctttcatgagctctgaatatgtgaataatcttttcagtcatcttcctgatgattttgtttcttattaatagatacgacaataacttctatacatcacagaatgtgcttgtgagtcctttaataatttggagaaaatgacctgtttgaaagaagaaaactgtcatattacacagtcactccgaatgggatttctggtgtatttttccatccttagctggcctgcagcccctgcccaggccctgctcactggtgtctttctgttgcagtcagtaccccagcctgtggtctgtgagcaacggcgccgtcaccccgggctcccaggcagcagccgtgtccaacgggctgggggcccagttcttccggggctcccccgcgcactacacacccctcacccatccggtctcggcgccctcttcctcgggatccccactgtacgaaggggcggccgcggccacagacatcgtggacagccagtacgacgccgcagcccaaggccgcctcatagcctcatggacacctgtgtcgccaccttccatgtgaagcagcaaggcccaggtcccgaaagatgcagtgactttttgtcgtggcagccagtggtgactggattgacctactaggtacccagtggcagtctcaggttaagaaggaaatgcagcctcagtaacttccttttcaaagcagtggaggagcacacggcactgttccccagagccccagcatcccttgctcacacctgcagtagcggtgctgtcccaggtggcttacagatgaacccaactgtggagatgatgcagttggcccaacctcactgacggtgaaaaaatgtttgccagggtccagaaactttttttggttgatttctcatacagtgtattggcaactttggcacaccagaatttgtaaactccaccagtcctactttagtgagataaaaagcacactcttaatcttcttccttgttgctttcaagtagttagagttgagctgttaaggacagaataaaatcatagttgaggacagcaggttttagttgaattgaaaatttgactgctctgccccctaggatgtgtgtattttaagcatatgtagctaatctcttgtgttgttaaactataactgtttcatatttttcttctgacaaagtagccaaagacaatcagcagaaagcattttctgcaaaataaacgcaatatgcaaaa

SEQ ID NO: 31 - DNA, 20319 bp, Mus musculus
ttttaaacagtcattagataaagtccaaacaggatatgacagctttctttttctttgagtctgcattatgataagcagcgaggtaggtatccggtagagatgctcgtgcctgacacgagatgcctggcacttcgttctttcattattattttttaagatttatttatttattatatgtaagtacactgtagctgtcttcagactcgtcagaagagggcatcagacctcattatggatggttgtgagtcaccatgtggttgctgggatttgaacgcaggactttaggaagaacactcagtgctcttaaccgctgagccatctctccagcccttgttctttcgttgtaaaggtgacaccatcatgcagagcccgaaccgtgaatttggatgatggagacagtcaggcaggcagcacagtgggcagcagcgctgagcagactcagacatgaggctccagcccatggctagtcacttcttctgactcatggtccttctgcctggtgctctctttgcagcatcttaaataaaataagcttgttttctttcttaaaatttgtttaaagattcatttaaagattcatttatctatgcatatgagtgctctatttgtatgtatgcctgcataacagaagaggacatcagaactccttagagatggttgtgagctaccatgtggttgctgggaattgaactcaggacctctggaagagcagccagcgctcttaactgctgatccatccctcctgcccttaaaaattatttttaaaacagctttcaaattatgggtaaggataaggaggcatgaaagtgagccaagggtgtttgatgaagtgaaatgagcgttataagtagaaaaatataaggagcggaagtagattccaacaaggggttggattaggcatatctgaagatggaatgtgtgaaccagagaggccagagatgtgatcagatgtgagcaccagagacaaagtgctggccttaatagcccagcggagctgaagcccagggccagcagtgatggcagagaagctgtggaaggcactgtgctgaacagaaaggaatttccagaaggggtgaaaaatatcaaccctaatatttagggaacccaaaaaaatcacaagcactagtagaaatgacagcattgtctgtggatgtggctgagtggacgactgctttacttgatgctcaaggccctgagttcaatccccagtattgcaagaatactaataaagggggtggggggaggagatggctcagcaccctgaacgggaaaatcccagctgtgattccagtgtcaggggacagatgcccccttctggcttctgtgggtactgcatgcacatggcacacagccattcaagcaggcaaaacacccatacatggaaaagatgaatagttaaaaattttttttcatcctggtgttgtggtccagcactcaggaggcagaggcaggtagatctctgagtttgaggccagcctggtttatagagggagttcccttggttggacagggaggggggagaacaataaaaaaagaaaaagagggggagagagagaggggggggagagagggagggagggagggagggagggagggagggagggaaggaaggaaggaaggaaggaaggaacgaaggaaggaaggaacgaaggaaggaaggaaggaagggattttagaagaacaatggaaatgcttaaaggagccaaagaaaaaggcaggtctcaccaagggataacacccaaagtgcagacagctccctagtggaagtaaggtcagattcggagagaatctttttaagaggtagaaacccttaggagtcctataacaattcagccaagcccatcactttctttctacctctaagaaaataagaaaatgttaggcacacgaagcctgcagatgcagagggaggagacaacagaactcaaacatacattctctagagagagggcctaaggagcagttcccagctccccctgggagggcagtgcatcctcagtcacaaagccagagctacacagttgttcctcccaacccaggcaccactcctaaaaacacagtggcaaaccaagaactaagcctgtgtttaaatatatgtaagaaacctgtgtgttcaacagtgagctagcgtgaccttttctcttgaagttagggacagcaccaggctctacttcatttccactcctgtgcaatactgtaggagaagcttgacccacacaaggatggggaaaaaggataaacactatcgtcgtttataagttttaattttatcttatgtgtacaggtgtctgtgcagcacatacacacagtgcctgaggagtccatagggggatgagggatcccctaggactgtaactacaagtgtttgtgagctgatgtgtcagggctgagagtttagcctgggtcccctagaagagcagccagtgagcttagcctctgagccatctgtctagccccattgtattgtatagagtttaaatgctacaggaaaacatagctgtgtttaacgtttgcaaacatttcctctatgaataaacagaattttttaaaaaaataacttttaaatgtgtgtgtgtccgtgtccgtgtccgtgtccctgtgattggccagacatgtccaatctcctggtgttacaattataggtggttgtgaactggggactgtgtggttgctggaaaccaaacttgggtgctctcaagagcaaaggtattctgcaccactgagccatctctccagcccagtaaatagaactttaaagacacttgaataccttttaactttaggtgagactcttgtctcagtctcagaaggtcccaaggaggagaagacagacccaggttctgaactggcacttgcagtttcctcagaatgaaacagaagctatgttctggcccttgctttcttgcccacaccttctgaggcatgtcaccattggccacctgggagccagctggtatttcaggaatacagttgcccctcatcctcttcattttatagcccttcaaggagacaggctgtgcttaactttaagacacagtaagaaaagctgacaccttggaaaagtatgatgaagatgaaggaacaattatataactatttaaggaggaaaatggactgtcacgtcatactggaaacagaattataatctgtagaaatatatgtttccgtggatgagttgtctgagctcttgggaaaatcagaaagctagttacagggttgagctaggcatgaggtcagaaaataagaaggtcatagaatttcttcattccacactgaaaaatacattgagtacagttagcatgtcgttggtgcagtaaggatactcatgaggtgtgtggggggggggcaggaaggagggagagagaagagagaaaaagagagaaggagggagaggagaaagaggagggagggagagaaaggatggatagggggaaagggagagagaagagagtgggagggaaagaaagaggtgggagggagaggtgggagagaagaaaggagagcagaagggggagagaggagagggagagtgaataagaatctcagattctagggtggttgagatgggaaaaatattttgagttcgtgaccagcctggtcaacatggtattgaggaaggagggacagaaggaaggactgggtgggaggagggaggacctggaggaaaggaaggcaggctgccactttcctcatcagcaggtgagcaagaagagaactggtctgagtaaacacagcctgttagcactgttctaaacagcagagctctgcctaggcagcacagaccccagcaggttggaaactagccaaaccagtttatacaagtttaaggatcccttggctaaaatgcttgtgaccagaagtgtttaagacttgaatcttctaggtttgggaatatttgactttaatggttgagcatctctcaatatctttctcttaaataccttgtaaccgaggctggaaagatgacttagtgcattttttttccctcttgcaaagggccctgggtttgattctcagcactcacatgatggctcacaaccatctctaaggccagttccagggggtctgatgccctcttctgacctccatgggcactacacattcgatatgcttacattcacgcaagcagaatacgcaaacccatacaataaagtaaaataaactagaaaataatcacaacaacaagaaaaacccactttgctgtggcagcgtagagatagcggctgggtaggagagcaaagggaatcctgtccagcctcagtggactctcctgatcctccgggtccccagctggcatggagttggagtcccacatttaccagtggcctggaggggtgaccatggccctctttggactttcatccatttgtggtaagatcatcatctcagggacagacttctgagagatgttccatagtggattaaaaccaaagcaggaggggctggggagatggctcagaggttaagaacacaagttgctctttcagaggactgggttcaagtcccagatcacatgtggcagatcatagctgtctatagctcaagtttcaggggatccaaagctctcctctggggtgtgtgaatttgattcctggagtccacatggcagaaggagatctgacctccataatttgcaccctccgcttctatggtgagggctgtgcccacacacataaatacacacttacacacatatgtgcacacaatgttatgtctcactacatagctctggctggcttggactggctgtgtagaccaggcttagactcaggctcatagagctctgcctcctctctgctaccacgtgcactgccatgattgagaaacaaaacaaacaaatgatttattttctaaaataaagtcctgggggactggagaggagttcagtttccagtgtccaagttagctcaaaactgcctgtaagctgaggcagataaagcttgcatgaccaatgggcctctttccattgatggccaactaggccatcttctgatacatatgcgcgtgtgcgtgcacacacacagacacacaaacacacagagacacacagacacataccctactacacactacacacatgcatacacacacacatacacacacattccttaccatataccacacacatacacagacacacacacaaacacacaccctactacacattacacacatgcatacacgcacacattccattacataccgcatacacacacatgtatacacacagtccaatatacactccacaccacatatatactatacctacatacacatacacacacactacactatatcatactataccatacatacacacacacagcacacacacacacacacacacacacacacacacacacaccacaccatacactcacacacatacatacagaccacatacacacacgcacacacacacacacacacacacacacacacacacacaaacacatgctgaagggttccaggcctgagcagggtaaacaaggcaccagcaagccttgtctttcccctaaacgttagctcacactcctgaagctaaccaccaaggtctattcccttatttggccactttcttatactgcctcattcctgaagctggtcacctcaccaaagcccagcaatcaaaagcgtccacttagctaccttaattaaaatctgcggtcagagcctaccaacccaccccagctcattctaacccagacctcccattttttcctcttaaaattaactcctaccaaccttgtctctttgccctgcttaaggattactccatgttggaaattggtacttgggtgtggtatgtgcctaatctggggcccctcccacacactgttcaggtaccatcacacataatcaaaaataaattataaaagtaaaaaatcatggttaagggagaagatggattttcctgctgatgtcttttgaactatccccacttggtttgtaaactagacacctttagagtcatctaagaggagggaacctcagttgagaaaatgcttccataaaatcagcctgtaggcaaacctttaggccaagttcttgattagtaattgatgtgggagggtgatgctacccctgagctggtgcctggctgagaaagtcatacaggagcaaaccagtaagccatactcctccaagggctctgcttcctggtcctgcattcagactcctgccctgaccaccctggaggtacaagttacaagtgaaataaaccatttctccccagactgggttttgtccttctgttttatcccagcgatagaaactctaactactatagaaattggtacagagtgggggtttgctgtagggagatgatggtggcatttgaatttggggctggaaaagccatggaacactcagagggctgctctgtgggagcctggaacagtagtgcatatgacgacagtcctggcttgtcacgtttcagagggaggcaaaaactgatctgggcatttattcgatgttttgaatgaagattctgtggttccggtcggtggggctgaagaatcagctgtgattaagaagagaccaacatcgctgaggtggaatcttctgatgccctgggattgtttccttgggggcagcatagactgggtcactggtagctgggtagtggtggcacaggcttttaatctcagcactggagaggcagaggcaggtggatttttgtgagtttgaggccagcctggtctacagagcgagttccaggacagccagggttatacagcgaaaccctatcttgaaaaaccaaaaataaataaatacatacataaataagtggagtcgatggacatgatgggaaagatctgtaatcatagaattcaggaagcagtggtagttcaaggccagcctggtttgtatggtgagtttcaggctagcctgggctacatagtgggcccttgcctttaaaaaaagtagccaagtctatcccatttaccttcctcaggtcaaattccttttgtaactatttgtgcgaacgtggtgagctagcaagaggaaagcaaagaaaccccacttttactttctacatacttaaggtgtttcagtagagataaaatagacttaaatgaagataaacccgaagtcttctcattttccactcttttctgcgagcttcgggtgccttatccacagaaagactgctatcccctacggggttgttccactcagtgacttgtgcctacttcttccctgcatacaatataggctttctggtattcggaggtgggactggtgtctggaagccggattgtgggtcgtggcttgcgctaatgcagacttccaagtgggctttcctctctgggctcttcagcttggtggagtctggtgttggcattctctcattctgaatcggttctcaggagtgtgttaagagccccctccccattttttatcaggcttgcccttgatatgtgcggagatttatcttaaccttcgagcttcctgcggcaaagctcccccggggccattcgctagctcacctcctcttcgcctcttcctgttgcttagctgtcagcaggtgggcgcagcctccttcctcacacccactcctcctggaagcggccagcgggtttctgccccacctaccccgctggtcgccgacctgggatactgtcacaagtccgtcattcccctgctcctgttactgtctttcccttgaatgctccctggaaattcctattaaaagcctctaaatcagtgttcttccagaatttttatgggacttcaaattctttctaccaggactctggagatcaccaaatctccccctatctaagaagcctgataggcatctgccctctcaagagtcctcctttggactcatccctctgccttcttgttctttatcagctccgaaaagtctcccaaaaatgcctgcagctctgacctctgacctcccctccgtggttcttttgtagtagctgctgagtcttctctgtcatttaaattaggctctgtctcagtttgccattctcctcctggggtccttgatttctgctttcacaagccccctgggccgttaggattccagtggtcggtacacctggggaagctatatacacttgacccaggttctccggggagcttggcatactctcctgttatctccgctgtcctagtgaatgtcatgtactagctggagccaagagcctgctgtgacgtgtggtttggatataatggagggggaagcggaggggaggagagagagagagagagagagagagagagggagagagagagagagagagagagagaaaacgaagaactcctgtacaaatgacctgtatacaaccactcactaaatgagcgcctgtaatgatttctggaataactccgagcctgcctctgtctacctctgctttctctgagatagctttcttgaggtctcagttaaataggaaacagaacaacacagatggggaaaaaaatgcccggactgctgtggcacctgactttagaaggtgtgcagggccaccaggtctgggtcgtccagtagttcacacaccacagcagtgcggtggctgctgctcctcctggacacagtgacatctatctgccttccatgaccatccctgagttcaagaagacgagagatgaggcatctgtgtaagattctctatgtcagacttagccagggttgagcggagtaaggagaaacaacatggagtcttcagcaaagggctgaaggctaatggagactagcctaagactagaaagaaataaccaacagtagtcacctgaaaacagctgtcaggcccaagtataaggcagaacctggtggcctctaggaaacacaaataccctcgaggagcaaaaggctgccacagaagaccgtggaatagcatggcagaaactagggggagtggggactgcccgaaactcaaagggacagggacgaaataaaatctgcctcgaagggagtaaaacccaagggtgacttagagacaaattgacagggtggtgtggtgcacatacttcacacaccattcaatccacgcagaaggaccagagatgaaacccctcaggagaagcaggagaaatggaaaataggcagggcccgtcattccctggcaccgctgacctggaggcctagagaccccaacaagacaagaatgaggcactagagctttccttgactcactcctgaccgggcatggaaagcttaggtgtggaagagactcaaactacccaccctagaaggtaccaagccagtggccagagtccctcttgagtcttggattcaaagagctgggaggtttccggagaaatgttggctggtttgtttgttttcaatgtgtcaactcctgtccctaaagcaccagaactctggctcatgagggcatctagaataggattggacctgagaacaccttcagctgcccctcgcccagggcagcacctccctcctgcctgcagcttagaatctctagagctggtgattctctttcacagtcgcggtgaccagcaacatatagtcctgatggctcctttcaaaggcccttctattttctttttttataaaaccccggccaccaaagacaacctaatgtcccttttaaagttcaatgttaagcagtctaaagaattgtgccccttttaaaagcccatactgaagccaccattttctttcattgtttgatgacagaattgttttcgttgaagatgtctctgcactgatttgggatttggggatggggatcctgtgtctgcctggtcagcttggggaaacaggaagtggagcagggctagggtggtatactggaacctgaagttactagggctcatgtatctgtgttctgcaacatggatatattatattatattatattatattatattatattatatattatcccctcccctccccttctttcaagaaagaagactccgggagttgtgaggtcaggacccaggatggctcctctcctctgtactggctccaaaggaaagggggctttgttgtctcaaatagggtgagaccagggaaactccccgtaggaattgtcacgggcatacatttatggttcctgggccttttcctttgtttgctcttggtgggaatgttgccttgcggaggctcaggcacgaagcttttctgggatagttgaagcttctccaggactggccaactggagagagaagcagccagcagtgcccaggccacgcctctcccaaggaagggcaggttactaactgggaattctttacagctggcctggaggatgtttttggctgtaaactgtcatggcaccgcaaccctccttgaaaaggctgaggacaactttctcgggacaaagatcagaaattaatcacagaaaagggtagggacagaatagctaagcctcaaaagagtcgcttctagcccggaaaccagggatgtggcactgtggagtggagagattccactgctcacggtagagaaagtaacaccatttatttgcctcctcctctttggagaacagttccagagcaatcttctaccagcttcctgaacgatggcgaaaatccacttttgaccaacaacattcccaggaccggctccgccttcacgccagaggttaaacgcgtcagtgacatatattagtgacccagcctcccttgactttcatgtcctcctccaccgagatttattcctagttccaggaagtctcaggccttagcgtccccgagggtagaaaaggtgaaatctcccttgtatacttctgcaaacccacaacacaaactggctggtgctcattgcaggagggtcggggttgggcgcaaatgagagccttttggtgtctgtagaaagaagtgtcccgctcctctagccagagatttctttatatcctagaccacagaaaagcagccgaacaccccagtattcagtgggaaagggcagaggagggtagtctagggcatcccaccccagaggttggctcctggaaaaccgtctctcccagaagtaggggcaggtagaacccacaactccgaccccaaagacttcccagggagactctcagagagacaacgaactcagaattgagtgcccccacctgattcaggggcctcttccaaggagcttcgggataggataggagagtggaagacggggaaacggaggctggaacccagagtctcgttaaagagctgggcgcgagctctggcttccttcccgcttcctgggctcccgttttagaggaatgttattgtttaaagagaccccattgaactatttcctgctctttgtcaccttcccctcactctcccggcagaggttctcaccgagaggcaataaaccaactgctgcccacaccgcatggcgaggcgggtagggaaacgcgcgcagcatgcgttccaacaatccccggcgcaaagagaccagggactcccggggccacattcggtgcaggcgcatccaccgtcaaagtccagcttttatgtgggacgcgaggacacctcctactagggtcgctatctgttcgtctatttccctctctggacagatccgcattgagcttccctctccacgcaggtgaaggtcgtgggggacctggatgccgaggtgggagttagtggcagtccatggggcgaggggacgtgtcccaaagctgccacacctggggaggctgaggctttggagaggtcaaggagacccgggagacgccgatccgccgaagtccctctcaggtgcgcgcagcgtggacactccgcggggcaaagtcgcaggcgccggtgtgcgcttggacagcgcgtgggagtggagagtttagcagtggctctaggagccagggtcctgggtggctccagcccggcttctcgccctccctcccccagggtccgccccgccgctttgatggaggtgcaaacatttgggggagggcgggggtgtcgggactgcgcccgacgctttccttacaggaagcgcgcgctggagcccattgttggcccccagcctccgggcccgcccggccagtctgatatggccgcgcaccgccaatgggcagctgctcggtacttcaaagggtgtcccgcccaatccgccgcacccccctgcgaggccacctcggctgtatttatggggaggggacccatttttctcttccccagagacttactcttgtcgcgccttgcgggagttcaagtggagccacggctccccaggccctctcccccatccccgcccccttcccccctcatcccgatctcggtgctcctttggcgaatgtgcagggacccaggtgtaatctttgggctccgcagagtgaccctttttcttggaaaagcggtggcgagagaagtgaaggtggctgttgggtagggagtcaagactcctggaaggtggagagggtggcgggaggatgagctcgccgggcacagagagcgcagggaagagcctgcagtaccgagtggaccacctgctcagcgccgtggagagcgagctgcaggcgggcagcgagaagggagaccccaccgaacgcgaactgcgagtgggcctggaggagagcgagctgtggctgcgcttcaaggagctaactaacgagatgattgtgaccaagaacggcaggtaggtgcgtgctgcaagccggcagtctggggcctggcgagtgcccctcgcctcggggagagcatcttttcttcccaaccggccgactttgtttcttcccgctgagttaacagctccccagaggattcctaaaccttggtttctcgggaactttccccctgacgaaacctgaggaggaaggaggcattcgaactctagggttcctaggtgtatactggaatgaccaggtttgcctagggggccgaaacccttggctagatttgtccctctgctgtcccgagaacccgtgggcttagtggggggagatgatttggttcctgaactgagaaagttcaggcaaagatgcttgcgagaccggttgccggggtcctcctctttggccggcatcaaacacttagtgcaggctccccctctccaacggatgggtcctcctgccgtgcgctgtcttttccaggaggatgttcccggtgctgaaggtaaatgtgtcaggcctggaccccaatgccatgtactctttcttgctggacttcgtgacggctgacaaccaccgctggaaatatgtgaacggggagtgggtacctgggggcaaaccagagcctcaggcgcccagctgcgtctacatccacccagactcgcccaattttggggcccactggatgaaggcgcctgtgtctttcagcaaagtcaaactcaccaacaagctcaatggagggggacaggtaagccagtgcagaagacagcctctgggccccaggccgaagggaagagcctggctgggagcttagaaagacaccaccagcctttgtcagccccacagaagccaccgtggcctccttccccaattaaatctttagtactgtttatattaagctgatgagggttaagcagggcctggcaaagggaactgggagttctccctcaccttggaagggttgaagaaggcctgccgcttgggaactggctctggccataggtgagcattggttccgaatcctcagtcactttaaagtcaaaaggggacactggctactctgcacaaatgtgcacattccacccttctgaaaagtctttaattggggcctgtttccaagaaaactcactccaagttgccaccaagccaggcatttaaagttgtttgtggccttatgccggcagggtttaatggtgtatagcgtatctcccatcccagttccagaccatctgtgggaagcagatgtgtaaaatggaccccatgccctccatactgctggcagtttcctgaagactttctgtggctggatccatgtttcttcctgagcagttcctgtggatgctgctgcggtattaaggtaggcctgcacgcaggtctgcattcttgctctgtatctcctgcagatcatgttaaactccttgcataagtatgaacctcggattcacatcgtgagagttgggggcccgcaacgcatgatcaccagccactgctttcccgagacccagttcatagctgtgactgcctaccagaatgaggaggtgaggtttcggaagggagtccccctaccctgcctgtcctgggaactgggagatagaaccacagtactgaagacaggcaagatttagttcccatttaccacttctgtggctaagaggaaaaaactttaaaatactcattcgagcatgttgctaatctcaacagagcacacgtctatgaaagaagcataaaccacaacttcacggttttaagatctggagaggagaggggacagctcttgatctcagcaacgggaaagtcctggcaaaggctgtcaagggttcttacttctaaccctaaatcatagaaaatgtgtcatcagtcccctggggctgccgctgttgaccttaactccacagcaattccaggctatgttgggactgtcatgatatctagccttgatagcaattatgttaaattggagtttcacttagaaattgcttctctttgtaatttctcatccctttcagacacagatagaaaaacaaagaccaattcattctaacttggctgttttcttttgttttttttttttttttttctttctcagtttccttttctcttctttggtagtgtccccccactcccatttgatgcttgctatgtaacccaagatgttcttcagttcacagtccccttacctcagcatcgtaggatgcttctccacccccccccatcaaatactccggtaattagcattgtattgttagtaaatacactttctcttttttcagattacagcccttaaaattaaatacaacccatttgctaaagccttccttgatgccaaagaaaggtgagagttctaaccttgctcctggggcaaaggaccgtgtggagagaaggctggttgctcacctcctctgggcaggcctccttttgaccatcctgaatactttttggcagaaacgaccacaaagatgtaatggaggaaccgggggactgccagcagccggggtattcccaatgtacggtttgttgcacccccatattcctctgccttgtttcaggcctagacttgctaaaaccagaacccatagggaggtttgggtttctgggaatagtgggggtggcaggatggctctgctttgtgccctgggcaaagcgtgccctttgctttggaagctgcctaaccatcttgggctttggacactggcaggcaaaagaacttttgatttgtttgtttttctgcagcagccagggtggagtggactcctgggagtttagacttgggtatggtgagggttcggctatccccctcccccacctttgagatggcttccacttgttagtggctgaaaactgaatggctatctttggatacacctatgagcggccttcctgctcagttcctgtgcctcctgattttggtggcttttatggtggctagttctttaaaaatatctctttaggaggtctcctaggcagtgatgggtagaggtctgttcaggcacatggagagaaaaggcctggtctcgtccctttttccaaggagggattttcaagtattgaagttgttgctgaggggtagaagggtcttgcaggccatttcagtggctgccagaccagcctagcactctgtccctaaacaatgatcaggtattttaataccatcttctaaacaaatttaacaaatgaatttaacgaacagttcccctattgtggctcatcgggtagtcacctgaccaggaagaaatggacggtgtatggggccagtgtggacacatgtgtgctcctcaagtattgtctcaagtattgtatcgggtagtcacctgaccaggaagaaatgggcggtgtatggggccagtgtggacacatgtgtgctcctcaagtattgcctgaagaactgtttcttaaagtagagagcaaaattagcttcagtggatagatctgtcttggaggtgtagtggaaagaatgtgggagagtcaaaacagaagggagcagataggaaatggacccattagctattcttgaggcaggagcatgactactggcctcagtagctggggagtgggaagctgtctggagcagtctgagtcctacctgtggcccactgggtgcctctccctttattctagagcccattaacatatcactcctgctcacttggtagaaagccaccggtctgcagaaccgaaatttcacaaaggttaggagaggtcttaggtctaatcctgtaagacagggctatgggcggagctcaggcctcttgagcgctggcatcccgggtgccacagggacactttgaaacttggctgcactgagggagggatactggttattcttcagttccagagtccctgggttagagctaggacaggactgagtctcaagcaagggccagttacccagcatgcttttctcacagcaggggggtggcttgttcctggtgctggcaccctctgcccgcctgccagctcccaccctcagtttggaggctcgctctctctcccctccacacacggctgtgagaggtacccagctctaaggaaccaccggtcatcgccctaccccagcccctatgctcatcggaacagctctccaagtaggtcctgtacatccatttaccagctgggggaggggtgccggggtggggcggatccctccggagaggcatttctataggggtgcaagatagggaacccagctccttgtggctcctggagagacttggtcaagatgctggttgaaccaggggtccccaaggaggctttcatttcaatatccatgtgcctcagaacatgccccgggcttttcaaaagacagctgtctgggcctttccaaggagccaaagcttgagccccagaatggagccgtggtttgatgaacatcaaggttccatgaacctctctaaagtgacccgatttgactagccaggtacaaacgttcctgaccagatcaaagactctccaggtgtagaactcaagcccttagtgtgggtgtcaccggagaaccaggcacattttaggtccaccctggacccagaagatggacctaggcgcaggacagacctctggcagattctttaacacttgtctgtttagaccaacctttgtctgctccaaagggaggggaaaatggctaaagaacaccataaaacaattaagcaattacaactgattcaaaatgaaaggccacagtcttggagactcctccatcagaggctgggctctgaggcgggggagatcatatttttaatttggtgaggacatggttgccatagcctctccgagccttgcggaatcgccattatggaaaaggtgagctaacgtggcagatatttttttatttgcttttaaaattaagcattccaggctagggtgtcactcagtggatcagcacttgcctagcgtttgagaggctctgagtcagatccctaatgctacaaaaataataaataaatagcataaaaataaagatcaataccactgtctgaaggacatctccttgtgggatgataagagacaccttaggttaagtgggatatattttctaataattgacactgacaataaatattgctgtgctgatgagctaaagcaggctaggggcttgctctccacatctacccaggtagctcttgtttgcagtgttgggttcagttggtatcattttattctgtttgaaagacctgtcaggtaacttcccctctctgcatccctcagcctatgcggacaattcatctgcttgtctgtccatgctgcagtcccatgataactggtctagcctcggagtgcctggccacaccagcatgctgcctgtgagtcataacgccagcccacctactggctctaggtatgtatgtctgtatgtaaaaagcagctcaggcctcagtctgtgtgtgtctctcaggctgatgggtttgacatgggtagtttaaagaaacagtgtagaccctttagtcactggaggcaacacattggctttttctgtggacaaagaaatagaaagtccttagtgcctccagtgctgagaaccagtgaaggatgaagactgtggactgtcccgcaggctatagacgaggctgctggggatacgttcccttcaggcttgttaaccctccagggtactgaaacaacagtgaagaactgcaaagctagatgccaatactccatctccagtgaggaaagggacctgaagatactgattctgggtcagtgtgatgatgaactgtctgttctcagaggagtgagcctgccatcatacaaccttgaccccaaatgtctaaaccagtggtcctcaaccttcccagtgctatgaccctttaatacagttcctcatgttgtggtgactcccaaccatagagttattttgttgccacttcataacttatttttctgttatgaagcatagtataaatatctgatatgcaggatatctgataaaggggttgcaatccacagattgagcagtagtggtctagaaaattaaacatttagctaaggccctagctgttttggctttggagctagctcttcactaataagaatttagttgtctcgtgtttctttgtttggttggctttgtttggtttttgacataggtctcaggctggctttgaactcactacacagtccagagctcaaggtcttgattctcctgcctcagcctctttagttgttggggttattggtaggtattactaattccactttaacctgctcttaaggcaaacacacagatgacaaacttctcaatggccctgaggactttgcttaaggacccaagtgatcggcaggcagccaagtgctgatcactcgttccaatttggtgtcttagtctgaaacagtaatctgccttgatttacccaggcttgctctagagtccgaatgcctttgtagatgccagagggtttagcactcatttcagcatcctcgttttatatcctgaaaaacagtcatggggcaaggtcaagacgcagaactggtcttcagcccagctctggggtccctggcgtattgccccatgctgacacgctaatcccctgtctactggacaagcctgtgacagcaatgatggctttctaaagaatatgcattctgtgaatgcggggattgtggggtggggttgggaacacattgccctgagccttggtgctcagtgctaatcctgtatgccaatgagcacagagctacttgtcagagtcctctttaggaggactcggcacactaaacagtcactgtgcttatgggcaccttattggttttgtttgatgcagtccatccctgtggtcatagtgaaaaaaaaatagtctgcaaagccctgtgatgcaattaagtactgattcctcccccacatctcatcatagctcatttgcaggcccctgatgtctgttttctctatttcagccagtatcccagtctctggtctgtgagcaatggtaccatcaccccaggctcccagacagctggggtgtccaacgggctgggagctcagttctttcgaggctcccctgcacattacacaccactgacgcacacggtctcagctgccacgtcctcgtcttctggttctccgatgtatgaaggggctgctacagtcacagacatttctgacagccagtatgacacggcccaaagcctcctcatagcctcgtggacacctgtgtcacccccatctatgtgaattgaactttcctccatgtgctgagacttgtaacaaccggtgtcaactggatcttctaggctcaaagtggcaggctcttgggacaagggaaaaataaataaataaaagctagatactaacaactccattttcaaataagagcaataatacatgtcctataatcatgttctacagcctcttgtttgatacctacagtagtgatatgtgtcctacattatgaagccaaggacagagagacggctgtggtccagttttttgtgactggcagttaatcagagtcctttgctaggtagggtcctatatcttgtgtttctctacaacatatatgtgactttgaaatcctggaattcgtccaccccctgtcctactttagtgagacacaaggtacacctctaatgtcctcccttgttgccttagagtagttaactttgaggacagaaaaaagcatagccagaagattgtaactgaaccgtcaactgttctgcccttggaacatgcctactttaagcacacgtagctttttgtgttgggaagtcaactgtatggatacttttctgttgacaaagtagccaaagacaatctgcagaaagtgttttctgcacaataaaggcaatatatagcacctgg

SEQ ID NO: 32 - DNA, 24430 bp, Homo sapiens
ggggaagcttcgcaggcgtgcacggagcagtgagatcactggcgttataaatatcccggtgccagcgcggagatccgctcgggtggcctctctcttcccctctccccttctcttccccgaggctatgtccacccggtgcggcgaggcgggcagagccagaggcacgcagccgcacaggggctacagagcccagaatcagccctacaagatgcacttaggacccccgcggctggaagaatgagcttgtccttcctcctcctcctcttcttcagccacctgatcctcagcgcctgggctcacggggagaagcgtctcgcccccaaagggcaacccggacccgctgccactgataggaaccctagaggctccagcagcagacagagcagcagtagcgctatgtcttcctcttctgcctcctcctcccccgcagcttctctgggcagccaaggaagtggcttggagcagagcagtttccagtggagcccctcggggcgccggaccggcagcctctactgcagagtgggcatcggtttccatctgcagatctacccggatggcaaagtcaatggatcccacgaagccaatatgttaagtaagttactcgctctcctacaaaacccgtcctaggcggccgcggaagattcgggagggacagcaggtattcgccgggacacaggctcaccttcctgagcccaggccactgggaccaagctgatactcagaaacagccgggcgggttgggtggagatgcatctatatggcgtgcgcacacgcacccctctcctgggcatgaggaattgcgatttctcaggtgtatgttacctagaggctggtgcccagacgggtaccttgttttcagtttgctctagcctcaaagacgagtccccagccatgacaggagagaacaaaaaactcatttcttctcactcaatttgtttaccttctgcttatgaactagcctggcatttttcattaggcatcaaaggcagcccttctccctatccataactgaagttattttttgaaaagaagaatcaaatcccaaatacttccctcttccatccgctaccataaacctcaaattaatattgtatatgtatatgtatatatgtatataagtctatgtatacaatgtatacacataggtagatagatagatagatagatagatacacagatagatagacagacagatagataactaggggacaccagacagacattcctgcttggaagaagattgtgctctagaaaactggacgcgtttagagagggagacatgataaacattgaaattactaactccagagttggatttaacaatgtttagtatcttgagaccatgactacaccgtattaggagagtggccagcctttggtccccaagaacagttaggggaaagttccttattttagaagaaacgcagaggttaaatttggtaggggtgcagattttgtaggactttttataaacaaagttttaaattttccctctgagttttttctttcagcacgctctcttttttcctttctcatctcctcttcccttccaccccatctatgtttccagaccatcgcagccactcctctggtttctcttcactgcctctaggcagctgggggcagggacggtttggggctgtgagtaggagtggggagatctctgtggggcttttgctcagtagggccagatcgctcttccagcgcgggttggtccaccaggcagagccccagccagggcctgtcaggtacccagggagaccggaaatgtagccaggagacagcagcgctcacagtcacctggtttcagtgtcagcctggttgctcctagatgttcctaacttgctccatctcagaccaaagactccacgggccattgggctccttcttacacaggctccagaggagcgtggacaccaccggcggtctgaagatttggcagccagcagtctccagaggggggtcggaggcgcgcaagtgggtaaggcggtaggctggctagcctcctccggtgggttaagggggcctaatgcggaagacctgatggttcatgctgagagaaaagcaggtctatgcccgcccctctgcgcctgtctagtctatctgatcgcgctgattcagcagcctgcggcgcacgtggtgagggcgcctggagcgcccagctggagagagggccctccgcacacgcaccagcgagtcccagggcctccctcacactcccgagaggaatctatttccatattttagagtttatttcactcatcgaataactgctcatttgggggataaagggcaagatctgttggggtgaaatggaattttctgagatttgaggaataatcagtaacatctatttatttccattcgtccttctcattttgtctcaacggtcttttgactccatcagccatcacagcttattcccacttccggcaacctttccttctctcttacaagaaaactttctttcttctgttcttcttgtaacgacccgtggagtcattggtctgagatggagcaagttaggaacatctaggagcaaccaggctgacactgaaagacaggtgactgtgcgcgctgctgtctcctggctatgtttccactctccctgggtacatgacagagcaccaacagaggataacttccgtgagctcaagggcggaccccaaactagcaggcagcaagcagcaggttggagcccagggagctcagagaatgcttctggggagggtttaggtgtgctagagatctcagaaagcaaggctcattcccaggatattcaccatcttctctacgaagacactatatgagacgaaggtagttttacagcttaggccttgctagagggggtgttgtagaaaagcaaaggggggaaaataagagcagatcaaaaagagtgcacccagataaacaagacattgaccactacccagtatgtaacatgtacattttcttttaaaatccatgttgaaagatatctacaagagaacagggatgtttcctaaaacagtgccgacaaaaagcttaatttaaactttttcctaatttattcttgtttacaataacctttcagagtttagtttctgtgtctttcacatgacttgctttcattcatgccataaatcatgtacccaatataagatacctatctcactaagcatgatattttggttacttttgtgttgtttgtcttccatagagtttttttttttttccccagaagaaagcatagcaaatattcaaatcatagtaattttctgctttgtgatatctggagtgtctaatactacttcataaaatttttactacctttgatcaatgcagaatttgcatgtaatttgggaatttaacatggatctctgccattacctagctgtaaaagagaaacagaaacttgctaattacaattggtcatttacctctttgaaggcagtagttgatgtttcctgacattcgtgtaaactaaggtgttggccatggcctttcttagagtatgtgaggaaatgtgtttaaatctcctaagagaggctgagagggctggatcaagggccacagaggatacctcagtttgatctcatcttctatttctactgtatgtgagttagtgatgatagaaaacctattctttttgttacaaccctgatacttcagaaaagtcaaagctttgccatgaaactgcattctaacaagttattttaaacctaataatattctgtagtatttgtctgatagaacagataatcatatgtgtttcgcaaactattatttgacagtaaactttttttttttttttgcaaattgcaaatgttttctggtttcaccatgagaagtgcaccatggccatggactttcaaacataatttgtttagtttacatggaccaattaatatactcttagcttctcttacacaataattatcccaagttttgaacacagaaaatgaaatcaagctcattgtatataaatccttattatgaggaaatactgtggaaaaatgaagaaatatgaacaaggcaagatagatgacccaactattgcatggaaacaaatggtttggtttaatttatacgccttcaagtttaatgtcaatacagtgcttctgttgacttaccttgggccattgaagaataggcaatcaagtagttgtcagtttagggaagaaaagtttaaggctttgtcaaagcgtttacataaaatatgaaaattccaagcacatattttggttaatagaatcgtcgatgttactgctttttaaaaaaatctaaattcactaccaattttggggtcatgtggagtcattagacagtcccccaagcctagataaatcagaatctatatctactatgcagaaaaatcaagtggaaaatttctgttgctaatttaatcagtgaagactgctaaactgaatatttcaagattcagatttcataacttggcacagcatatctgttactttgtggatgcaagtagagaaacttcagttttaaaatatttttgtctggggattttcagatgcgttgttgaaagcttctgaatacatggaatatctgtgcttttctatattttattcattaacaaaagagagaaaaaggaaaaatgtgtatagttgtatcaaccactatcagtagagccctattatattaagaaatctgcagaggactaagtcaaaaatctagaaatatgtttttttttacggaagtaagcttacatcataatgcataagtggaatagactgtgtgtataagctgagagacaccaagacattcttgccttcttcagcctaggtgtcaatgctgaaattccacaaagagaataattccttctgttaagcattctcctcttcttttgaccctcttaaatgggaacaccttaagaaaaataacacactgtctgtagcactttaatgtgaatttatttacactgagccacccgtccaccccgtgccttctcaagcaggagaaggccacagtagcaggagagtactaagacacctgtccatacttgtgtatgcatggggtgtcctgacaagagaaaagagaggtagtgagaggatcaaagaaggcagtcaaatttagcaaacagtcattgactatataccatctacaagacaagcttggccttccacagtttggcttagaaatactgccttggcatccataaggagaattgtaagtttccatcaaatttaatatgcgtgactcccgatgataaaggtcagaaaattactgaaattaaaaaaaatcaatgtcagagaaatgttttcagaaatttatatatttgtgatttaaggcacatgggtttaaaaaattacgtagaattcctgaatgagttactgagatttgtcatagcaaaatcaataggcctgtgatgttttggggaggagggcaggaaactgaactgtgagactcattgaatctgctccagaaaacaaggcattgtgaaatcactgctgacattactttggaaattatgatcataacagtgttcttaatattaggtcataattacggtaagatttagaagatcaataccaaagttactcacgtgaaaaataattcattcatctagtctcatctcttacatctcctgcattctttataatgttaaatagaatgacatatgtaaagtgtatttttaagctttcagttaaagataattttcttaaggttataaaatcttttaattctcaggcactatatcatttttatcctggaagttttaagaagaaacccagcaatatgtaatacaataataacactttcacatatattatttcatcttccccatatttaaaatacattacatgcaacttgtacataatatatacacagagtgtacactgtattgaaatacatgttaaatgcatctaaatgggtctttgtttaaagagagaatgagctaattatcagaaactatttatttaagcaaagcagtagtatttctattaaaacaaatatttataaagcctttttatctcaacatcttaaaagttagcatataaacacatacacttatgagactttaatcttttattctgccatgtattttttcattaatatacaatatatctgcatgttcaaaaccagataattttccagggaatggaattaaaagcctctaacaatctagcaccatgagtaaattggaggaaatatacaatcaaatctctcctgtatcaactccatgttgtcccttttgtatccatcattccacacatatacaatttccttctttctttctttctcatttttgaatgcacatgtttacataaatattcacaatcacatcccccatctcccaaatatctaaaatcattaatgctattcccaatatcattccgtatttccaatagaaatttaactttgtatcactgttatagtcatgctttagtaataatattattataacatattacatctgtgtagagtaactttacaaagcatttggtgtgttttgttaatatttgataaaatgataatgcttctaaacctttagaagcacactcaaacaatgttcataataaatcctattataaatagcatttaaaaacattttgaaggaaaggatttatacagcactggtggttttttttttcagtttccttctaaaagcaaaagtagtttccaatagtttttgatttttgtttttcaatttaaagaaacacctattagtgaactggtacctgcagtttccctaaagtgtgttttatttactttgggctaaaaacatctattttttaaataagctgttcagttatcccctttttcacataaactttctaatcaagttttttaagaaaccaagttgaataaataaacagcagtgcttgctagaattatagatgttagctcacattgcacaaaataaatgctcaataaagttactcacatatatttataaaatatttcttgtttttggtaaacagaataattttatatatacctcaaatactgcagggagagtttgctatttcaagaaaatctgatgaatttctctatttggcagagtcctattgagatatcctaattagtatatatgcttagaatattatagatggaaatattgagatgttcttttttccatccctttccttctttgtttccttcttttcttccttccttcttttcctttttaaaagtagagatgcggtgtcactattttgaccaggatggtcttgaactcctggtatcaggcgatccttcagcctcagccttccaaagtgctggaattacaggcgtgagctactgcacctggcttccctttttcctttctaagacaggtccctttttagctctattgagctaaaaatctctttttaaaaattttgaaatagacaactaataaaacacattatagctctattgagctaaaagtctctttttaaaaattttgaaatagacaactaataaaacacattatgctcttttcatgttcatataaaatacataaatttatgttaaataagcaggctttctaattaagtgcagactatgtgttttatcttattaaactactctatgaacagtggtgtgtaattctcttgatccagtggacgtgaattttgaaattactgtaggagacagagggacattgacttcataatgctaactataaaatacaaaatttatacaacaatgtaataaattatttcattaatttttttctaggaaatgattcaaaatgcaagatgtctcaaagcataatccattaaacatttcattgaaccaataatttcaagttatttataatgctttcagtatcttatatgtagtctttaaatgcagtcactaaaagactgagtatggtatatgtttatttgtaactaccattataaccttgataattagagtagaggaatttatttaatgtaaataagtattattttccagactttcaaatagttatactagtcttgagcacagatttgtgctttaatgttcaaagtagtgtattatctttgatgaagaaacaatggaggagaattattttgaaaaacattttttaaatgtctttttaatttctttaaaacctgagaaaacttcatgctcattgtttactaaaagcaacttatttgtccaaataattactgatgaagtagaatcaaatttttgaatcttgaaattattttaaatgaacacttgaatcctagccttctttgtttttaacatagtgaatgtcatgaacaataaggatgttaaatactaagttcttttttaaaatcacaataataaagaatggaaagaatctatgtagaaatttaattcttcacaatgatataaataagagcctgtgttttattttgggatttctgtcatcctaggtgttttggaaatatttgctgtgtctcaggggattgtaggaatacgaggagttttcagcaacaaatttttagcgatgtcaaaaaaaggaaaactccatgcaagtgtaagtagaaccactttatatttgttaaaggtgctataaagattttacatttgtaaaacagaataattttccaaattcataggtaagaaaatttgcccaaagaacttaacttttaaaaagtatttttacatttaaccaagataattttgtgcgcttccagaagtaataatttaaatatttaatttacttaaaagatattacagagtctacaaaaagtttaagcataaatgtatttgaaaacagcattctcaaaggggcagccatccacttatttcttagaagtggcccacgtaagaaggaatatggcaataatatatttcatcacattttaaacttacaagtttatagtgactgtatttgtgctaagtagatgaggttcttatttaagtttacaggctactcataataccaaattgggtctcagtaatgtaaaatattttcatattaacaagcagggagggaaaaaaccaataattagaagactctgactttcatagacaaattttatttaattaatttgaagaatttttatcttgtatttttgtcacatcaaaaataaagacttcttaatactatgaaaactaattttgcattctcaaaaatttattcagaccagttttatatattgtaatcaattcacaaactatttatttgctttgttatgaaagttcccattacctgggaagtattaaaacattttaaagataataaaatatgttcagcttagttttcccactcacagattctatttatttgcattagtatatacacgctgcacttaaaggtgctttatgctttttctctggcatacttattttcttcacattaaaacattttgaaagcaattattctttaaagttagtcctttaatcctgattctttatagtctttattaaataaattattggaatatcactttttcagttttcaaagttatagaaagtttcaattgatagcaataattgaaacttactatatataatttgatttgatagatctttaaaaaattcaatgagaacgccacttggtttaatgtgtaagacttttataattttacttttcttaacatctaaagtgatttgttaatatcttttggaagagacagaatttgaacaatttctatagttatttgaggattcgatgagataatacatgcagtgtgctaagaatactatttggtgtgttataagtgctcaataaatattgcctattattatagggttaacaatctaaatataatctaaatataataaattactaaaatttcagtttactaacataaatggaaatcctttgttaaacacttaaatcactcattgcaagaactattaaacaatttaccatttcattttttgagctggttactatactctagcaagatgtagtataatattcatagaaatatatttttctaattttttcatttgtttaagggacaacattctgcatcactgtgaaaaaagtagggtattacttttttaaatttattttttatttcaataggtttttaaggagcaggtggtatttggttacatgaaaaagttctttagtggtgatttctgagatttaggtgcacctatcaccccagtagtgtacaccgtacccaatgtgttgtcttttacccccagccccctcccctttccccctgagttcccaaagtccaatgtatcattctcagggcatttaattttattttaaaatattagttaaaatccacatacagatgagttctcacgagggctggaaaaaaaagtaaaaaaaaaaaaaatccacatacagaattgaaaacaatgattaaacacatctaaacggaataacttttcctcagtctactttaagtttataaaagattaaaacacctttaaaatctaacctcataatagtacacagtgcatacaaagaaactttctcttactggtttgttttgagtgaaaatcttaactttcaaaatattctgatttatgccatagtacatgcaaaaaaaatagactaaacttggaacagcttaaggataattgccacagaaagtaacatattacaaatggaagccaattagaaaggtcaaactgagaggttaagatacatgattcctctgtcaaaggcaagtaacaaatttctagaaatttgacccaaatgtctaaggatggctggttgaaataatgcagataatgcaaaaacagcatctgttattctttctcatcttggcaggctaaagttatttcatagaataatgacttttaaacagtacaaagcaagtcttgctcttgtcactcactgaagctctttgatataaaagtcattctgatgactttgagctaaattgtagataaaaatattaagcctatgattatgtggattctttttaaaccaattatccaagcccactttctcttatctgagcatttattagcacttttcctctaggtgtaaacctaattaaattataaagtgatttattttttaaagatgttgaatttagaaatagtattaatgctagcaattaccagttttatgcccagttggtttctttcctgttttcacattctagttaaacatgctgggaaattgtttttgtaactctaaatatgactatttgatttagttaatagttttgatttttacgactttacatcatccccaaaaaaggttaaaaactcatagacttttaggattaaacttgtaatttgtgagttgctttaaactaaaaattttgcggaggcatttaaagggtacttttagggttctatctacaaagcaaatgtaaactaaaaatataaaatattaatagaattctgggaaaagtaatcccccactgtactgagaaatattcatggatacttgtaaatattcaactcagtttttgtaataataatcagagtactaaaaattagctactaggcagagataatgtactttcatagttctttaaaagcccttttgctcacattatctcattagataatgaggtgacgaaagagtctcatagatgttaaattattttcccaaggttacacagttaacaagtgattgaaccagaactatatcctcctagaattttctctttctttttaaatgctatagtgcttggtagataaaagttagcttcaaagaagatattaaattttgtttggaatcaattacattgttttcacctcttagtgtatagaaattaatatgtgcgtgaaaatatttttgtattacatatacaaatgaatactgtggcacatcattagaatatttatagcactctatttaataggcaaataaacaggcaatttaagacttatagttaaaattgtaaatttccccattctaggtacctctttttctctttgattcatatcaccttttttgaactggtgtttcccccatctactcctgggtctccagtactttactttagaatctagagaagaggggatgtgtctgccacagaattttacaaatgttggttattcattgtcaatgatgagttgcatagggaactcctgcctcccgagataaactttcaaaacagaaaagagatctgttttgctcacagaaaacttcatttagtaaatattttactgccatagacacaaatatggcagactgaaagggtaggccagagcagattcaggcagcattgatgctgattccatttttgtgctaaatttattaatcccatcagataagttttatttgagcttcagccatctaaatgtgggctccctggactcattcaagcccctgatctacaggcagctctccttcaaacttttattggtatactctaaatatgcagtgcaaccaaattcttgtcgtgcaggtttttcagcattctttacaaggatgaggatgtatggtcttctctttgtccaaatgtatcaagaatcatcaagagcaggaggagataattactttccaaagagccatgagggctactccaagccacagctgtggcctgtactctctttctcaacacattcccatgctaagataccttctgagactgagcactctttctccctttatctgtctgtctgtccctgctccctcctgaggttggcatccttactgaaagtcccctagagagcctttctggatttatctgaggtgggtccagactaggagtgaaaggccttgagtgtgatggtaaagacacagttagattgccccaggctgaatcctactctaccacttcctaactgtgtcattttacttcatctttctattccttggttttatcaactacaaaagaaggaaaattaaagtcacaatctattgggatagttaagtgttttaaacaagataatacacataaaacacttagagtactgcctgaaaagtgttccacacttaatgtttaaacagattttcctgaatttgctctcaggcagctgtttgacaatccttaatctttttctttctgattttggggtcaggcaactgtgacccttaaattattcaggccagccccaactcctatttatcactgaccttttcttcctcacgtccaaactttgtgtgcttataggtgtcccttatctactaagttttcctttcaccaaggaacctaatttcaaagcaaaatttccaagctcaacctcttaaagaggcatggatttcctatggttataatcttgtgacttttttcatagctctgttgtccatcttgatttttccctaaatatataaatcttggaaaaggtggttatcatgtattcttcagtcttttcataaagtatgcagaaagctcattgctaattagggaaaaacatgttaccttattttaaagatccagagagaagcatgtggtggaattatttttgtttctcagggttttaggggatcatgtttgaaaggaaagctaattgcagactttatgaaacaggcatggaatgtgtgcttgatcagtcctaagcaaggaatagatcatcctcctttcctggtttcagagggtgccagctggcttgcctgggatgagactccagaatggacttcctgcgctgcaggcagagtgaagaggagtcagcagcccctaaagctgaacatatttactgaaaggggaaatggaggcttgagtaatacttatcatcctcatcaaaaaataacttactaagcactccactctgccagtcaagaccatgcatgagctagatcaaggcatttgaaaagaatatttttttgccctctaagagctttcaatatacagtaaaatggaatgtctagctattcaggcacaaaaatgggtttaaactctgccttcgcagtaaatgccagtttcccctcagttttgcactgtggaggtctagttaaaagacctattttattgaggaaatctggatgtgattgccttgtagattcagaaatccattttagcagaaagtgagacatggtaatatatttctttgatgatttgaagagtgacacttgtcattcatcaatattttaacaggaaacaacttcagagcaagtaagattgtatgagcaaagactaggcaatagctttggtttgtatagtgttatggaaagacccttagtctaggaatcagaagatgcaatttaaatcacaggtctattctggcacttaataaatgcagggtgatagatggatcattttctttacttctctggctgaaaaaaatcagataatactatcctaatagcagccatggaattactgtgagttaaattatatatgtaaaccacctgacacagagtagtctccaatagtccagctatatggagttattaagggcctcagaaagaaagtcatgctataccatgttttgcctggtgtggtccttacttcaagggtatcaaaaccacatgggatgctggttaatgatacatcaagtccagggtctcacctcagacttagaaaaacacagtccctggagatagggcttgaggagctgcatttgagcctgctctctgagtaatttgaaggcaaattatgtaagtgaagaaaagagatcctgtagttgatattctttactgcattatctcaggttgggtgatattaaagccaacttgtgtattttgttggttgctcagtatgaagaactgagatatagaaggaacgaatgtccagtaccaagcaggagatatggccgtgcctgggagatagcatggcaaggctacaactgacccatacacagcttatatagtaaagagtaagaagtagccctctgggtgcttgctatcctgtaccagggcacaagtataaaaaacgaactgagtttagggtacctgtcccaggcagctccattggtggagggaagggatgggaaccaagcaggtctaaaaggagggaggggaattagaagtgatgcatgtgacaaggaaacttagtttagagcaaaatttggtctatagttgtttttattacagtctatgataacctttttgttatttaataatattagtctataacaacattttgattatttatatttggctttttttcccttaactttataaggtttttcaggagaaaggggcaaatcaaagaaaacaagctgaaataaatcattaaaattgattaagtacacacaaattccaaggtttatactggtgtctgttcaaattcactcctatttctatatctcatatcctacatatttagttctgtagttgcacgcaagagtcggtatttgcacagctttaattcatactatacaaggtactcaatcatcatagatggtgatatttactaaggaacaaaaccacaagaagggattttagagagatttttttaaacaatatcattttggaaataatttatttggtttaattgacctgtttaattttggcttggcagaattagtcatttctggaatattgtagttaatcggagttgtgctttctttgaattcaatttgaccgttcaaaaaatatctgttgtttaaaattgatccttcactgtgagaaggggtgaggagagccacagtttacttctagtgaaaaagttctttttttttttgagatagagttttgctcttgttgcccaggctagagtgcaatggtaggatcccagctcactgcaacctccgccccctgggttcaagcgattctcctgcctcagtctcctgagtagttgagattacaggcgcgcacaaccacacctggctgattttgtatttttagtacagacagggtttcaccatgttggtcaggctggtctcgaactcctgacctcaaaagatccacccgccttggcctcccaaagtgctgtgattacagatgtgagccaccgtacccagcagaaagttcttatttctcttaatagtagtgtgtttcctctccttgtaataatctggatattcaagaaaaaatagttcgatttgtttaaagttcttttttttttgtcaattaggagtatatactaaagtacaaaaaacgctgattttaaacatttcattttaattttgcaattatggtttgttgaatgtaacctgttattattcttgccagatcaaggagaaattaaagagattttaatgtaatttaagtcaacaaaaacatgggcaggaccatgttaatactgttttccactgtaaaagtggcacctagcacagtgcctggcatgtgatatctgtggaataaattagtgaaaaatgaatatgaaactttttaaacaaatatttaaacaattgctttcattgtagtggctgatggtggtaaggcaattagatgaaggagtcttgatttcagcaacttatctgaaatttgattcatctctctacttcatactctttaactatagaaaaagtctgttaatttcaggggttttttttctagaaaaataatggagttctatcattttaaaagtgtatattttattagaagacttataatttaaaaaaaagatttaaaaaataaaaatcagcctggaaaatttattgtccaaaattttctaatggtaaatgtatgtattttagtacctctagctaagacctatgactctttgctataaagatggtccatgcacaacattatgtatagagatatactgcttagggtcaccatcttgtctgagccagaccgggaatactaacaggaatagtcaatccttcaagatgagtaaattcactgaaatgtttgtttcaaatgattctgtgttccatcacagctggaataatttttcagacaaaacattaaattaaaagttaattaagaaagccaaaacagtctaactgcgtttactcccgtattaatgtagaatgtaggatttggatggctgaggggctgtgtgtactgtgtagatccttagaactctacacacttctaccctgggtaacagttaggtgacctttgaaaaatctgaagtccaaatagccatctccataaagggctcctcttaagaaagaactttagaatatgaatctcgaggaaaagaggaggaaaagagaaagattttagatgaaacaattgtagggggtggggcaggtgggtttcactcatatgaaagatcctaaaatggaaatgatatagattcctgttttaaaaaaagaaatgctgtggtgtgtgtctgcacatgcacctgtgcatgagtgtgtgtgtgcctgtcatctacattagttaaaaatgacatgttctttctttattttcttgggcactgttgggggaaaatattaaataatgtagtacattgtaaaaacctaactctgtcaaaattgagtaaagcaatcaccgctgtttttgtgaaacagagctggaagtcagatcaaggcataatgtattacacattttcaaaaatgtcattcaactgcattttaagaaaaaaaaaacccgagacaagataaatatacctgatactctttttaatgaaatgtttcacacctttgtaaaattcttgtgatctgtttatagagccagaaacattctagatgtctatagcttttattttgaaataaaatgttgggattatctaattaaatgggaaaaccattttaagagctaagcagctgtagacaaatctacaatgaatttgtaagcaagtctttctaataaaaaataggaatagtcaatgtgtggtcttcgaaagtgatgtcagcatagcagtccgggcctaaatgcaggctggcaaggtgtatcgtagacagggtgaaagggatgccatacataggtggtgattgtttataatacctgccttcggccgggtgcggtggctcacacctgaatcccagcactttgggaggccgaggcaggcagattatctgaggtcaggaattcgagacaagcctggccaatatggtgaaaccccgtctctactaaaaatacaaaaattagctgggcatggtggcacacacctgtaatcccagctactcaggaggctgaagcaggagaattgcttgagcctgggagatggaggttgcagtgagccaagataatgccactgcactccagcctggccaacagagcaagaacctgtctcaaaaacaacaacaataacaaaacaacaacaacaacaacaacaaagaaacaaacaaaaaatacttgccttcagcctgctcgagatcatatccagagattcaccagtagacttgtggaagatctacatatatggcttcataacctgccaatggaactttgttgattgaactacacttaaatataagtaactccagtaaactattgtacataaagtgaatgtgctgttggaaatgctctgatattggttggcttctactactgtcagtaacctgcactgctcagaaactccatgtggacttcaacagtggatctatgtagattgccttgcaatattcagatttttagatttctgtgttatgatcagtatttcaaagaaaagtttggcattattagaaaaaacaaggaaaaaaaggccattttattcccgtataaaacttcttggtttgatatagaagtatgtagcttttagtgtttttatatataggggacaaaatatttggtattctcaaacacgggaattctgtgtaaatagtactccttgaaattatgaaacctggtagtcttaactagtacaggaattcttaattctttgggggttatgggctctttcaagtttgatgaaagctacagaatcctcctttggattctcataacagccctattgttgtaagtgttatggataaggaggctaaggctaagagcttaattggcagaactggtttttgattgcatgtctgactccaagttcacactcttcccccattctcccacatattccttcaaattttactacatggcaaactaagctctttcagagctggtgctgacctacattgtctggctcatctccttacttcccacatgcatcctaggtagaggtcacgctgaactacttacaggtatttgaaagtgtcatgttgacctttcaacaccctgttccttctccctgaaaatcctttcttattttgccttcctctctaatgctagttagagaacattcctagttgtacttgaagactcagctcaaatgtcaccttttataggaagacttttctgccctcttcttggccacctccaccctcttagatgcccttcctctatgctgtcattgtaccctctgcataccgctgtcataattccatttatcaagctgcaccatgacggatgtctacttgtctgcttttccactattctgtaagcatttcaagggcagatattttgtgtgtgtgtaagatctggccaaagtgtagttagtaactcgagtgacttttttcttcttggagttagatatactttcctgtaatgcctgagtaaagatacgttatttttttctaaagaactctaacacgtgcaatattaatgggggccatatgctacttctctctcagcagcctcaatcacactgataacattgaaaaaatgcaagcttgtttcaaaggaataattttgacctcatttctgtgaacaggaatttatattttaccaggcaatcatttcttagtaatatagttccatttattttcttagtgagttaggaggaaaaacagtatgtaaaaagatttgtaactatacatttcaaagtatttaaacaatagtaacagggtttaaatgtatcaagagttctggttacttttatagtcatcgatattatgtcaccaagtaagtagggaacagaaatgtgttacaaagataaatgaagtagaaatatagaaagaaaaatagtaattttaaagcaactttaaaataagcaaacatgtctttataaaaaggaattgagtaggaggaacagagatcaacaaaattattgtttttttttctacaataccttatgttttattacatgctgaaaagatcgccacaacttaaatttcctctttttttctcctccttaggccaagttcacagatgactgcaagttcagggagcgttttcaagaaaatagctataatacctatgcctcagcaatacatagaactgaaaaaacagggcgggagtggtatgtggccctgaataaaagaggaaaagccaaacgagggtgcagcccccgggttaaaccccagcatatctctacccattttctgccaagattcaagcagtcggagcagccagaactttctttcacggttactgttcctgaaaagaaaaagccacctagccctatcaagccaaagattcccctttctgcacctcggaaaaataccaactcagtgaaatacagactcaagtttcgctttggataatattcctcttggccttgtgagaaaccattctttcccctcaggagtttctataggtgtcttcagagttctgaagaaaaattactggacacagcttcagctatacttacactgtattgaagtcacgtcatttgtttcaatgtgactgaaacaaaatgttttttgataggaaggaaactggaattctttgtactaatacagggagcacactccttcagttcagcaagacataaagccttttgctttatgcttgagggatatttagaactttgtattttcggaaagttaaataacagggactacgtatttttctgacttttacagattaacctgaaagaacatacatgatacatttttatttttggtttccaaagaatattttgatgcagataaaatattttgttaacttttgtttttttttgtttgttttcttaaaagtacctctgcattgagcatattttcttacttttattattttaattaatatgacataagcaatcattttatgctgtttatgaattataaatgtgtttatagctcatttgtaatatggaaatcttttacatttttcctattcactgcacttttttattgtttttatttctagccatacctcagataatatgtttagttttacattttaaaatgtttaaattctctttcacagcaccaaaggctcagcttggatttgtgtgtatgtgtatgtcaattcatgacattatgtggaatcctaaacctttggtggctgggatatgatgggttagaagcaaggagaaaatataaggactttttgatggaattaaatgtgggaggtaaggaaaaggatttagaggtaaaagtacactaagtttgcaacatttattgagatctaagtctgtcttgccttcatttctctttttatctcccccttgccctcattcttgaacagctggaggaatacattttattctgtccatgaagcatacactatgaaattcaagtgcttaaaaatacttctatgactctctgctatcccactgtatagatccacagggagcaaacacttagaaatgatagagaactgaaggagatcaatggtttaacagttatccatgccaagtcccattgtcagaaatattcttattactcagtcaaacactctttgagcttcccttcctaaaggtaaccaatccagtgaatagatgtgcccttttataaggaaacttctgatgtttattaaaaaaactggccttttgatagaggtaacttaatttgggaatttgttgtgttgaaatggcatttaatttcaacctaaatactgactgctggacataaatcacagaaaatttaacttaagaaaatttacaaaatttattctcaggtaatcattttaataaagttctgcaaaatacacgtttatcttacattcagaaatgtggcaaaaaaggcatagctaaaggctaaacatatggctttagtagtaacaaaagggttcatagaaacttcatggtttgcatttaaacatgtttaaagtgtacttataaactatttttttcttaaagcaaactatgatttattttggtgcacaaatacaaagtggaaacttaccaaaattgaactagctaccatataagcagattgctttaatttgatgggaaaatagtacacacatatatataacaaataatatattaaaaaacccatccatcaactaaaacattatatgtatacatcagtatagtgttttattataaagccaattatctgattaagcattctttccactgaatgcataatgtttaaatagcataaaatgaaatgctacaaaaattgaactaatttatactttaaagtatttctgggttaaatgaaacaatgaaattttttagtatgttcaactctcatccaaatggcatatgaccctgtttacacagcctaaagctaaaaatattactctagtttattctaatctattgttaagtattgtgcactgtataccaagttcttagggcacatgaaaaattttagctgccaaacaggaactagtaaacatatgttcctaataagtgaagggaaagataataatgatggtcaacaataagccacgtcaatgcataagttgtataggctaaatgttgcttgtaggctacattaaactcaaatgtaatagtttatcttatactcctggtttgatttgattagcatattaacgtgaaagtaggatagctactaaatatatattatgcaagtcaggaatcattaatttcaaaatttaaagccatgctaaaattaaaaagaaaatattaaattacacaattacacttgtctttactggccatacaaaatgattttttttttttttttgagacagagtcttgctctgtcaccaggctggagtgcagtggcatgatctcggctcactgcaacctccaactccctggtttaagggattctcctgcctcagcctcccaagtagctgggattacagactcatgccaccacgccagctaatttttgtatttttagtagagacggggtttcaccatgttggtcaggatggtctcaatcctggcctcttgatagtcctgacctcatgatctgcccacctcggcctccccaaagtgctgggattacaggtacaatgatgtataattaatgcttagtgaagcataaagttacctacatcaattaattaaatgaacttatgtacagaaaacatgtataaatataagtctatactaatgcttacaactttctaagagggttcttgcttatgtagctttttattattttaagtaactagaaccaccaaatatcaaataaaattatttggttatggttatgttcatctaaacacaacaataacttttatattaatatttaggagtctattttgtctataggtgacaaacatctccagactaacatgtcagttttatcaattatattatgtttaattatttaagatttctttatgtggaacatctatagagataaatagaaattttcaataagatgtagtaacactgtgatttatctttcaagagtctctcttcacttccttctaaagagactaatttgagagtacaggtgcatattaattttcttggttctttcagctgaattatattggtccagaagttcaaaatcatgtgacaataataagggatactgacagaagttatttccaagtttgtgtatatattataaaaattacatatataaaactaaggcttttatttctgttatttttaagcttttatttcttgtagctaaaaataaaacatcataaatctggtaggtaaatttcttattaaatcaatcttgaaatagaaaatgtaataactttcttaccattaacattttttacccttccatagaagggagggaataaatcatgacttatcccattttcaataacaaaacgaaactatggcactaaccaaaaacttgcattctggcataatttttacagttgcagagaattgtttctgggctcattaaaaaaagtagtattgcagacattgctgcaatgggaagcagacaataacttcttaaaggaattctacacctcctttaagatttacttaattgctacatctaaattctgataatttaaaatccattttaggtgataaaattttttaaaagttttgaaggaaacctctggataaatggacaaggcctaatttttttttgtagtcaatccaactgtactggccaatttttgaaataagattatatgattaggtattagcagagacaaagagttacctcctccatcttactctgccctatttgaaagtctcaggggagaaaagggaacaagatgctgatccaacctgagtggagtcaggtgaggcatctttacatctaagaatttttttttaaattttattattattatacttcaagttctagggtacatgtccacaatgcacatgtctgtcacacatgcacacatgtgccatgctggtgtgctgcacccaccaacctgtcatccagcattaggtatatctcctaatgctatccctcccctctccacccaccccacagcaggccccggtatgtgatgttccccttcgtgtgtccatgtgttcttattgttcaattcccacctatgagtgagaatatgtggtgtttggtttttggtccttgcaatagtttgctgagaatgatggtttccagcttcatccatgtccctacaaagaacatgaactcatcattttttatggctgcatagtattccatggtgtatatgtgccacattttcttaatccagtctatcattgttggacatttgggttggttccaagtctttgctattgtgaatagtgctgcaataaacatatgtgtgcatgtgtcttta

SEQ ID NO: 33 - DNA, 37503 bp, Pan troglodytes
  misc_feature (25565)..(26413): n is a, c, g, or t
  misc_feature (27538)..(27547): n is a, c, g, or t
gctccctccccgcaccggccagtgagtacacaaagccgcgggtgaggggaagcttcgcaggcgtgcacggagcagtgagatcactggcgttataaatatcccggtgccagcgcggagatccgctcgggtggcctctctcttcccctctccccttctcttccccgaggctatgtccacccggtgcggcgaggcgggcagcgccagaggcacgcagccgcacaggggctacagagcccagaatcagccctacaagatgcacttaggacccccgcggctggaagaatgagcttgtccttcctcctcctcctcttcttcagccacctgatcctcagcgcctgggctcacggggagaagcgtctcgcccccaaagggcaacccggacccgctgccactgataggaaccctagaggctccagcagcagacagagcagcagtagcgctatgtcttcctcttctgcctcctcctccgccgcagcttctctgggcagccaaggaagtggcttggagcagagcagtttccagtggagcccctcggggcgtcggaccggcagcctctactgcagagtgggcatcggtttccatctgcagatctacccggacggcaaagtcaatggatcccacgaagccaatatgttaagtaagttactcgctctcctacaaaacccgtcctaggcggccgcggaagattcgggagggacagcaggtattcaccgggacacaggctcaccttcctgagcccaggccactgggaccaagctgatactcagaaacagccgggcgggttgggtggagatgcatctatatggcgtgcgcacacgcacccctctcctgggcatgaggaattgcgatttctcaggtgtatgttacctagaggctggtgcccagacgggtaccttgtttccagtttgctctagcctcaaagacgagtccccagccatgacaggagagaacaaaaaactcatttcttctcattcaatttgtttaccttctgcttatgaactagcctggcatttttcattaggcatcaaaggcagcccttctccctatccataactgaagttattttttgaaaagaagaatcaaatcccaaatacttccctcttccatccgctaccataaacctcaaattaatattgtatatgtatatgcatatatgtatataagtctatgtatacaatgtatacacataggtagatagatagatagatagatagatagatagatagatagatagatgatagatagatagatacatagatacacagatagatagacagacagatagataactaggggacaccagacagacattcctgcttggaagaagattgtgctctagaaaactggacgcgtttagagagggagacatgataaacattgaaattactaactccagagttggatttaacaatgtttagtatcttgagaccatgactacaccgtattaggagagtggccagcctttggtccccaagaacagttaggggaaagttccttattttagaagaaacgcagaggttaaatttggtaggggtgaagattttgtaggactttttataaacaaagttttaaattttccctctgagttttttctttcagcacgctctcttttttcctttctcatctcctcttcccttctaccccatctatgtttccagaccatcgcagccactcctctggtttcccttcactgcctctaggcagctgggggcagggacggtttggggctgtgtgtaggagtggggagatctctgtgaggcttttgctcagtagggccagatcgctcttccagcgcgggttggtccaccaggcagagccccagccagggcctgtcaggtacccagggagaccggaaatgtagccaggagacagcagcgcgcacagtcacctggtttcagtgtcagcctggttgctcctagatgttcctaacttgctccatctcagaccaacgactccacgggccattgggctccttcttacacaggctccagaggagcgtggacaccactggcggtctgaaaatttggcagccagcagtctccagagcggggtcggaggcgcgcaagtgggtaaggcggtaggctggctagcctcctccggtgggttaagggggcctaatgcggaagacctgatggttcatgctgagagaaaagcaggtctatgcccgcccctctgcgcctgtctagtctatctgatcgcgctgattcagcagcctgcggcgcacgtggtgagggcgcctggagcgcccagctggagagagggccctccgcacacgcaccagcgagtcccagggcctccctcacactcccgagaggaatctatttccatattttagagtttatttcactcatcgaataactgctcatttgggggataaagggcaagatctgttggggtgaaatggaattttctgagatttgaggaataatcagtaacatctatttatttccattcgtccttctcattttgtctcaacggtctcttgactccatcagccatcacagcttattcccacttccggcaacctttccttctctcttacaagaaaactttctttcttctgttcttcttgtaacgacccgtggagtcattggtctgagatggagcaagttaggaacatctaggagcaaccaggctgacactgaaagacaggtgactgtgcgcgctgctgtctcctggctacgtttccgctctccctgggtacatgacagagcaccaacagaggataacttccgtgagctcaagggcggaccccaaactagcaggcagcaagcagcaggttggagcccagggagctcagagaatgcttctggggagggtttaggtgtgctagagatctcagaaagcaaggctcattcccaggatattcaccatcttctctacgaagacactatatgagacgaaggtagttttacagcttaggccttgctagaggggatgttgtagaaaagcaaaggggggaaataagagcagatcaaaaagagtgcacccagataaacaagacattgaccactacccagtatgtaacatgtacattttcttttaaaatccacgttgaaagatatctacaagagaacagggatgtttcctaaaacagtgccgacaaaaagcttaatttaaactttttcctaatttattcctgtttacaataacctttcagagtttagtttctgtgtctttcacatgacttgctttcattcatgccataaatcatgtacccaatataagatacctatctcactaagcatgatattttggttacttttgtgttgtttgtcttccatagagttttttttttccccagaagaaagcacagcaaatattcaaatcatagtaattttctgctttgtgatatctggagtgtctaatactacttcataaaattttaactacctttgatcaatgcagaatttgcatgtaatttgggaatttaacatggatctctgccattacctagctgtaaaagagaaacagaaacttgctaattacaattggtcatttacctctttgaaggcagtatttgatgtttcctgacattcgtgtaaactaaggtgttggccatggcctttcttagagtatgtgaggaaatgtgtttaaatctcctaagagaggctgagagggctggatcaagggccacagaggatacctcagtttgatctcatcttctatttctactgtctgtgagttagtgatgatagaaaacctattctttttgttacaaccctgatacttcagaaaagtcaaagctttgccatgaaactgcattccaacaagttattttaaacctaataatattctgtagtatttgtctgatagaacagataatcatatgtgtttcgcaaactattatttgacagtaaactttttttttttgcaaattgcaaatgttttctggtttcaccatgagaagtgcaccatggccatggactttcaaacataatttgtttagtttacatggaccaattaatatactcttagcttctcttacacaatagttatcccaagttttgaacacagaaaatgaaatcaagctcattgtatataaatccttattatgaggaaatactgtggaaaaatgaagaaatatgaacaagacaagatagatgacccaactattgcatggaaacaaatggtttggtttaatttatacgccttcaagtttaatgtcaatacagtgcttctgttgacttaccttgggccattgaagaataggcaatcaagtagttgtcagtttagggaagaaaagtttaaggctttggctacacgaactcaaagcgtttacataaaatatgaaaattccaagcacatattttggttaatagaatcgttgatgttactgctttttaaaaaaatctaaattcactaccaattttggggtcatgtggagtcattagacagtcccccaagctagataaatcagaaactatatctactatgcagaaaaatcaagtggaaaatttctgttgctaatttaatcagtgaagactgctaaactgaatatttcaagattcagatttgataacttggcacaacatatctgttactttgtggatgcaagtagagaaacttcagttttaaaatatttttgtctggggattttcagatgggttgttgaaagcttctgaatacatggaatatctgtgcttttctatattttattcattaacaaaagagagaaaaaggaaaaatgtgtatagttgtatcaaccactatcagtagagccctattatattaagaaatctgcagaggactaagtcaaaaatctagaaatatgtttttttttatggaagtaagcttacatcataatgcataagtggaatagactgtgtgtataagctgagagacaccaagacattcttgccttcttcagcctaggtgtcagtgctgaaattccacaaagagagaataattccttctgttaagcattctcctcttcttttgaccttcttaaatgggaacaccttaagaaaaataacacactgtctgtagcactttaatgtgaatttatttacactgagccacccctccaccccgtgccttctcaagcaggagaaggccacagtagcaggagagtactaagacacctgtccatacttgtgtatgcatggggtgtcctgacaagagaaaagagaggtagtgagaagatcaaagaaggcagtcaaatttagcaaacagtcattgactatataccatctacaagacaagcttggccttccacagtttggcttagaaatactgccttggcatccataaggagaattgtaagtttccatcaaatttaatatacgtgactcctgatgataaaggtcagaaaattactgaaattaaaaaaaatcaatgtcagagaaatgttttcagaaatttatatatttgtgatttaaggcacatgggtttaaaaaattacatagaattcctgaatgagttactgagatttgtcatagcaaaatcaataggcctgtgatgttttggggaggaaggcaggaaactgaactgtgagactcattgaatctgctccagaaaacaaggcattgtgaaatcactgctgacattactttggaaattatgatcataacagtgttcttaatattaggtcataattacagtaagatttagaagatcaataccaaagttactcatgtgaaaaataattcattcatctagtctcatctcttacatctcctgcattctttataatgttaaatagaacgatatatgtaaagtgtatttttaagctttcggttaaagataattttcttaaggttataaaatcttttaattctcaggcactatatcatttttatcctggaagttttaagaagaaaccctgtaatatgtaatacaataataacactttcacatatattatttcatcttccccatatttaaaatacattacatgcaacttgtacataatatatacacagagtgtacactgtattgaaatacgtgttaaatgcatctaaatgggtctttgtttaaagagagaatgagctaattatcagaaactatttatttaagcaaagcagtagtatttctattaaaacaaatatttataaagcctttttatctcaacatcttaaaagttagcatataaacacatacacttatgagactttaatcttttattctaccatgtattttttcattaatatacaatatatctgcatgttcaaaaccagataattttccaaagaatggaattaaaagcctctaacaatctagcaccatgagtaaattggaggaaatatacaaccaaatctctcctgtatcaactccatgttgtcccttttgtatctatcattccacacatatacaatttctttctttctttctcatttttgaatgcacatgtttacataaatattcacaatcacatcccccatctcccaaatacctaaaatcattaatgctattcccaatatcattccatatttccgatagaaatttaactttgtatcactgttatagtcatgctttagtaataatattattataacatattacatctgtgtagagtaactttacaaagcatttggtgtgttttgttaatatttgataaaatgataatgcttctaaacgtttagaagcacactcaaataatgttcgtaataaatcctattataaatagcatttaaaaacattttgaaggaaaggatttatacagcactggtggttttttttttcagtttccttctaaaagcaaaagtagtttccaatagttttcgatttttgtttttcaatttaaagaaacacctattaatgaactggtacctgcagtttccctaaagtgtgttttatttactttgggctaaaaacatctattttttaaataagctgttcagttatcccctttttcacataaactttctaatcaggttttttaagaaaccaagttgaataaataaacaaacagcaatgcttgctagaattatagatgttagctcacattgcacaaaataaatgctcaataaagttactcacatatatttataaaatatttcttgtttttggtaaacagaataattttatatatacctcaaatactgcagggagagtttgctatttcaagaaaatctgatgaatttctctatttggctgagtcctattgagatatcctaattagtatatatgcttagaatattatagatggaaatattgagatgttcttttttccgtccctttccttctttgtttccttcttttcttccttccttccttcttttcctttttaaaagtagagatgcggtgtcactattttgaccaggatggtcttgaactcctggtatcaggcgatccttcagcctcagcctcccaaagtgctggaattacaggcgtgagctactgcacctggcttccctttttcctttctaagacaggtccctttttagctctattgagctaaaaatctctttttaaaatttttgaaatagacaactaataaaacacattatagctctattgagctaaaaatctctttttaaaaattttgaaatagacaactaataaaacacattatgctcttttcatgttcatataaaatacataaatttatgttaaataagcaggctttctaattaagtgcagactatgtgttttatcttattaaactactctatgaacagtggtgtgtcattctcttgatccagtggacgtgaactttgaaattactgtaggagacagagggacattgacttcataatgctaactataaaatacaaaatatatacagcaatgtaataaattatttcattaatttttttctaggaaatgattcaaaatgcaagatgtctcaaagcataatccattaaacatttcattgaaccaataatttcaagttatttataatgctttcagtatcttatatgtagtctttaaatgcagtcactaaaagactgagtatggtatatgtttatttgtaactaccattataaccttgataattagagtagaggaatttatttaatgtaaataagtattattttccagactttcaaatagttatactagtcttgagcacagatttgtgctttaatgttcaaagtagtgtattatctttgatgaagaaacaatggaggagaattattttgaaaaacattttttaaatgtctttttaatttctttaaaacctgagaaaacttcatgctcattgtttactaaaagcaacttatttgtccaaataattactgatgaagtagaatcaaatttttgaatcttgaaattattttaaatgaacacttgaatcgtagccttctttgtttttaacatagtgaatgtcatgaacaataaggatgttaaatactaagttctcttttaaaatcacaataataaagaatggaaagaatctatgtagaaatttaattcttcacaatgatataaagaagagcctgtgttttattttgggatttctgtcatcctaggtgttttggaaatatttgctgtgtctcaggggattgtaggaatacgaggagttttcagcaacaaatttttagcgatgtcaaaaaaaggaaaactccatgcaagtgtaagtagaaccactttatatttgttaaagctgctataaagattttacatttgtaaaacagaataattttccaaattcataggtaagaaaatttgcccaaagaacttaacttttaaaaagtatttttacatttaaccaagataattttgtgcgcttccagaagtaataatttaaatatttaatttacttaaaagatattatagagtctacaaaaagtttaagcataaatgtatttgaaaacagcattctcaaaggggcagccatccacttatttcttagaagtggcccacgtaagaaggaatatggcaataatatatttcatcacattttaaacttacaagtttatagtgattgtatttgtgctaagtagatgaggttcttatttaagtttacaggctactcataataccaaattgggtctcagtaatgtaaaatattttcatattaacaagcagggagggaaaaaaaccaataattagaagactctgactttcatagacaaattttatttaattaatttgaagaatttttatcttgtatttttgtcacatcaaaaataatgacttcttaatactatgaaaactaattttgcattctcaaaaatttattcagaccagttttatatattgtaatcaattcacaaactatttatttgctttgttatgaaagttcccattacctgggaagtattaaaacattttaaagataataaaatatgttcagcttagttttcccactcacagattctatttatttgcattagtatatacacactgcacttaaaggtgctttatgctttttctctggcatacttattttcttcacgttaaaacattttgaaagcaattattctttaaagttagtcctttaatcctgattctttatagtctttattaaataaattattggaatatcactttttcagttttcaaagttatagaaagtttcaattgatagcaataattgaaacttactatatgtaatttgatttgatagatctttaaaaaattcaatgagaacgccacttggtttaatgtgtaagagttttataattttacttttcttaacatctaaagtgatttgttaatatcttttggaagagacagaatttgaacaatttctatagttatttgaggattcgatgagataatacatgcagtgtgctaagaatactatttggtgtattataagtgctcaataaatattgcctattattatagggtaacaatctaaatataatctaaatgtaataaattactaaaatttcagtttactaacataaatggaaatcctttgttaaactcttaaatcactcattgcaagaactattaaacaatttaccatttcattttttgagctggttactatactctagcaagatgtagtataatattcatagaaatatatttttctaatttttttcatttgtttaagggacaacattctgcatcactgtgaaaaaagtagggtattacttttttaaatttattttttatttcaataggtttttaaggagcagatggtatttggttacatgaaaaagttctttagtggtgatttctgagatttaggtgcacccatcaccccagtagtgtacaccgtacccaatgtgttgtcttttacccccagccccctcccctttccccctgagttcccaaagtccaatgtatcattctcagggcatttaattttattttaaaatattagttaaaatccacatacagatgagttctcacgagggctggaaaaaaaagtaaaaaaaaaaaatccacatacagaatagaaaacaatgattaaacacatctaaacggaataacttttcctcagtctactttaagtttataaaagattaaaacacctttaaaatctaacctcataatagtacacagtgcatacaaagaaactttctcttactggtttgttttgagtgaaaatcttaactttcaaaatattctgatttatgccatagtacatgcaaaaaaaaaaatagactaaacttggaacagcttaaggataattgccacagaaagtaacatattacaaatggaagccaattagaaaggtcaaactgagaggttaagatacatgattcctctgtcaaagacaagtaacaaatttctagaaatttgacccaaatgtctaaggatggctggttgaaataatgcagataatgcaaaaacagcatctgttattctttctcatcttggcaggctaaagttatttcatagaataatgacttttaaacagtacaaagcaagtcttgctcttgtcactcactgaagctctttgatataaaagtcattctgatgactttgagctatattgtagataaaaatattaagcctatgattatgtggattctttttaaaccaattatccaagcccactttctcttatctgagcatttattagcagttttcctctaggtgaaaacctaattaaattataaagtgatttatcttttaaagatgttgaatttagaaatagtattaatgctagcaattaccagttttatgcccagttggtttctttcctgttttcacattctagttaaacatgctggaaaattgtttttgtaactctaaatatgactatttgatttagttaatagttttgatttttacgactttacatcatccccaaaaaaggttaaaaactcatagacttttaggattaaacttgtaatttgtgagttgctttaaactaaaaattttgcggaggcatttaaagggtacttttagggttctatctacaaagcaaatgtaaactaaaaatataaaatattaatagaattctgggaaaagtaatcccccactgtactgagaaatattcatggatacttgtaaatattcaactcagtttttgtaataataatcagagtactaaaaattagctactaggcagagataatgtattttcatagttctttaaaaacccttttgctcacattatctcattagataatgaggtgacgaaagagtctcatagatgttaaattattttcccaaggttacacagttaacaagtgattgaaccagaactatatcctcctagaattttatctttctttttaaatgctatagtgcttggtagataaaagttagcttcaaagaagatattaaattttgtttggaatcaattacattgttttcacctcttagtgtatagaaattaatatgtgcatgaaaatatttttgtattacatatacaaatgaatactgtggcacatcattagaatatttatagcactctatttaataggcaaataaacaggcaatttaagacttatagttaaaattgtaaatttccccattctaggtacctctttttctctttgattcatatcaccttttttgaactggtgtttcccccatctactcctgggtctccagtactttactttataatctagagaagaggggatgtgtctgccacagaattttacaaatgttggttattcattgtcaatgacgagttgcatagggaactcctgcctcccgagataaactttcaaaacagaaaagagatctgttttgctcacagaaaacttcatttagtaaatattttactgccatagacacaaatatggcagactgaaagggtaggccagagcagattcaggaagcattgatgctgattccatttttgtgctaaatttgttaatcccatcagataagttttatttgagcttcagccatctaaatgtgggctccctggactcattcaagcccctgatctacaggcagctctccttcaaacttttattggtatactctaaatatgcagtgcaaccaaattcttattgtgcaggtttttcagcattctttacaaggatgaggatgtatggtcttctctttgtccaaatgtatcaagaatcatcaagagcaggaggagataattactttccaaagagccatgagggctactccaagccacagctgtggcctgtactctctttctcaacacattcccatgctaagataccttctgagactgagcactctttctgcctttatctgtctgtctgtccctgctcactcctgagggtggcatccttactgaaagtcccctagagagcctttctggatttatctgaggtgggtccagactaggagtgaaaggccttgagtgtgatggtaaagacacagttagattgccccaggctgaatcctactctaccacttcctaactgtgtcattttacttcatctttctattccttggttttatcaactacaaaagaaggaaaattaaagtcacaatctattgggatagttaagtgttttaaacaagataatacacataaaacacttacagtactgcctgaaaagtgttccacacttaatgtttaaacagattttcctgaatttgctttcaggcagctgtttgacaatccttaatcttcttctttctgattttggggtcaggcagctgtgacccttaaattattcaggccagccccaactcctatttatcactgatcttttcttcctcacgtccaaactttgtgtgcttataggtgtcccttatctactaagttttcctttcaccaaggaacctaatttcaaagcaaaatttccaagctcaacctcttaaagaggcatggatttcctatggttataatcttgtgacttttttcatagctctgttgtccatcttgatttttccctaaatatataaatcttggaaaaggtggttatcatgtattcttcagtcttttcataaagtatgcagaaagctcattgctaattagggaaaaacatgttaccttattttaaagatccagagagaagcatgtggtggaattatttttgtttctcagggttttaggggatcatgtttgaaaggaaagctaattgcagactttatgaaacaggcatggaatgtgtgcttgatcagtcctaagcaaggaatagatcatcctcctttcctggtttcagagggtgccagctggcttgcctgggatgagactccagaatggacttcctgtgctgcaggcagagtgaagaggagtcagcagcccctaaagctgaacatatttactgaaaggggaaatggaggcttgagtaatacttatcatcctcatcaaaaaataactcactaagcactccactctgccagtcaagaccatgcatgagctagatcaaggcatttgaaaagaatttttttttgccctctaagagctttcaatatacagtaaaatggaatgtctagctattcaggcacaaaaatgggtttaaactctgcttcgcagtaaatgccagtttcccctcagttttgcactgtggaggtctagttaaaagacctattttattgaggaaatctggatgtgattgccttgtagattcagaaatccattttagcagaaagtgagacatggtaatatatttctttgatgatttgaagagtgacacttgtcattcatcaatattttaacaggaaacaacttcagagcaagtaagattgtatgagcaaagactaggcaatagctttggtttgtacagtgttatggaaagacccttagtctaggaatcagaagatgcaatttaaatcacaggtctattctggcacttaataaatgcagggtgatagatggatcattttctttacttctctggctgaaaaaaatcagataatactatcctaatagcggccatggaattactgtgagttaaattatatatgtaaaccacctgacacagagtagtctccaatagtccagctatatggagttattaagggcctcagaaagaaagtcatgctataccatgttttgcctggtgtggtccttacttcaagggtatcaaaaccacatgggatgctggttaatgatacatcaagtccagggtctcacctcagacttagaaaaacacagtccctggagatagggcttgaggagctgcatttgagcctgctctctgagtaatttgaaggcaaattatgtaagtgaagaaaagagatcctgtagttgatattctttactgcattatctcaggttgggtgatattaaagccaacttgtgtattttgttggttgctcagtatggagaactgagatatagaaggaacgaatgtccagtaccaagcaggagatatggccatgcctgggagatagcatggcaaggctacaactgacccatacacagcttatatagtaaagagtaagaagtagccctctgggtgcttgctatcctgtaccagggcacaagtataaaaaatgaactgagtttagggcacctgtcccaggcagctccattggtggagggaagggatgggaaccaagcaggtctaaaaggagggaggggaattagaagtgatgcatgtgacaaggaaacttagtttagagcaaaatttggtctatagttgtttttattacagtctatgataacctttttgttatttaataatattagtctataacaacattttaattatttatatttggctttttttcccttaactttataaggtttttcaggagaaagggccaaatcaaagaaaacaagctgaaataaatcattaaaattgattaaatacacacaaattccaaggtttatactggtgtctgttcaaattcactcctatttctatatctcatatcctacatatttagttctgtagttgcacgcaagagtcggtatttgcacagctttaattcatactatacaaggtactcaatcatcatagatggtgatatttactaaggaacaagaagagattttagagagttttttttaaacaatatcattttggaaataatttatttggtttaattgacctgtttaattttggcttggcagaattagtcatttctggaatattgtagttaatcggagttgtgctttctttgaattcaatttgacctttcaaaaaatatctgttgtttaaaattgatccttcactgtgagaaggagtgaggagagccacagtttacttctagtgaaaaagtttttttttttttttttgagacagagttttgctcttgttgcccaggctagagtgcaatggtaggatcccagctcactgcaacctctgccccctgggttcaagcgattctcctgcctcagtctcctgagtagttgggattacaggcgcgcacaaccacacctggctgattttgtatttttagtacagacagagtttcaccatgttggtcagcctggtctcgaactcctgacctcaaaagatccacccgccttggcctcccaaagtgctgtgattacagatgtgagccactgtacccagcagaaagttcttatttctcttaatagtagtgtgtttcctctccttgtaataatttggatattcaagaaaaaatagttcgatttgtttaaagttctttttctttttttgtcaattaggagtatatactaaactacaaaaaacgctgattttaaacatttcattttaattttgcaattatggtttgttgaatgtaacctgttattattcttgccagatcaaggagaaattaaagagattttaatgtaatttaagtcaacaaaaacatgggcaggaccatgttaatactgttttccactgtaaaagtggcacctagcacagtgcctggcatgtgatatctgtggaataaattagtgaaaaatgaatatgaaactttttaaacaaatatttaaacaattgctttcattgtagtggctgatggtggtaaggcaattagatgaaggagtcttgatttcagcaacttatctgaaatttgattcacctctctacttcatactctttaactatagaaaaagtctgtttgttaatttcagggttttttttctagaaaaataatggagttctatcattttaaaagtgtatattttattagaaggcttataatttaaaaaaaagatttaaaaaataaaaatcagcctggaaaatttattgtccaaaattttctaatggtaaatgtatgtattttagtacctctagctaagatctatgactctttgctataaagatggtccatgcacaacattatgtatagagatatactgcttagggtcactatcttgtctgagccagaccggcaatactaacaggaatagtcgatccttcaagatgagtaaattcactgaaatgtttgtttcaaatgattctgtgttccatcacagctggaagaatttttcagacaaaacattaaattaaaagttaattaaggaagccaaaacagtctaactgcgtttactcccgtattaatgtagaatgtaggatttggacggctgaggggctgtgtgtactgtgtggatccttagaactctacacacttctaccctgggtaacagttaggtgacctttgaaaaatctgaagtccaaatagccatctccgtaaagggctcctcttaagaaagaactttagaatatgaatctcgaggaaaagaggaggaaaagagaaagattttagatgaaacaattgtagggggtggggcaggtgggtttcactcatatgaaagaccctaaaatggaaatgatgtagattccagtttttaaaaaaggaatgctgtggtgtgtgtctgcacatgcacctgtgcatgagtgtgtgtgtgcctgtcatctacatcagttaaaaatgacatgttctttctttatttatttgggcactgttgggggaaaatattaaataatgtagtacattttaaaaacctaactctgtcaaaattgagtaaagcaatcaccgctgtttttgtgaaacagagctggaagtcagatcaaggcataatgtattacacattttcaaaaatgtcattcaactgcattttaaggaaaaaaaaaaacccaagacaaggtaaatatacctgatactctttttaatgaaatgtttcacacctttctaaaattcttgttatctgtttatagagccagaaacattctagatgtctatagcttttattttgaaataaaatgttgggattatctaattaaatgggaaagccattttaagagctaagcagctgcagacaaatctacaatgaatttgtaagcaagtctttctgataaaaaataggaatagtcaatgtgtggtcttcgaaagtgatgtcagcatagcagtcctggcctaaatgtaggctggcaaggtgtatcgtagacagggtgaaagggatgccatacataggtggtgattgtttataatacctgccttcggccgggtgcggtgtctcacacctgtaatcccagcactttgggaggccgaggcaggcagattatctgaggtcaggagttcgagacaagcctggccaatatggtgaaaccccgtctctactaaaaatacaaaaattagctgggcatggtggcgcacacctgtaatcccagctactcaggaggctgaagcaggagaattgcttgagcctgggagatggaggttgcagtgagccaagataatgccactgcactccagcctggccaacagagcaagaacctgtctcaaaaacaacaacaacaacaaaacaacaacaacaaagaaacaaacaaaaaatacttgccttcagcctgctcgagatcatatccagagattcaccagtagacttgtggaagatctacatatatggcttcataacctgccaatggaactttgttgattgaactacacttaaatataagtaactccagtaaactattgtacataaagttaatgtgctgttggaaatgctctgatattggttggcttctactactgtcagtaacttgcactgctcaaaaactccatgtggacttcaacagtggatctaggtagattgccttgcaatattcagatttttagatttctgtgttatgatcagtatttcaaagaaaagtttggcattattagaaaaaacaaggaaaaaaaggccattttattcccgtataaaacttcttggtttgatatagaagtatgtagcttttagtgtttttacatataggggacaaaatatttggtattctcaaacacgggaattctgtgtaaatagtactccttgaaattatgaaacctggtagtcttaactagtacaggaattcttaattttttgggggttatgggctctttcaagttcgatgagagctacagaatcctcctttggattctcataacagccctattgttgtaagtgttatggataaggaggctaaggctaagagcttaattggcagaactggtttttgattgcatgtctgactccaagttcacactcttcccccattctcccacatattccttcaaattttacaacatggcaaactaagccctttcagagctggtgctgacctacattgtctggctcatctccttacttcccacatgcatcctaggtagaggtcacgctgaactacttacaggtatttgaaagtgtcatgttgacctttcaacaccctgttccttctccctgaaaatcctttcttattttgcctgcctctctaatgctagttagagaacattcctagttgtacttgaagactcagctcaaatgtcactttttataggaagacttttctgccctcttcttggccacctccaccctcttagatgcccttcctctatgctgtcattgtaccctctgcataccgctgtcataattccatttatcaagctgcaccatgacggatgtctacttgtctgcttttccactattctgtaagcatttcaagggcagatattttgtgtgtgtgtaagatctggccaaagtgtagttagttactcgagtgacttttttcttcttggagtcagatatactttcctgtaatgcctgagtaaagatacgttatttttttctaaagaactctaacatgtgcaatattaatgggggccatatgctacttctctctcagcagcctcaatcacactgataacattgaaaaaatgcaagcttgtttcaaaggaataattttgaccccatttctgtgaacagaaatttatattttaccaggcaatcgtttcttagtaatatagttccatttattttcttggtgagttaggaggaaaaacagtatgtaaaaagatttgtaactatacatttcaaagtatttaaacaatagtaacagagtttaaatgtatcaagagttctggttacttttatagtcatcaatattatgtcaccaagtaagtagggaacagaaatgtgttacaaagataaatgaagtagaaatatagaaagaaaaatagtaattttaaagcaactttaaaataagcaaacatgtctttataaaaaggaattgagtaggaggaacagagatcaacaaaattattgttttttttttctacaataccttatattttattacatgctgaaaagatcgccacaacttaaatttcctctctttttctcctccttaggccaagttcacagatgactgcaagttcagggagcgttttcaagaaaatagctataatacctatgcctcagcaatacatagaactgaaaaaacagggcgggagtggtatgtggccctgaataaaagaggaaaagccaaacgagggtgcagcccccgggttaaaccccagcatatctctacccattttctgccaagattcaagcagtcggagcagccagaactttctttcacggttactgttcctgaaaagaaaaagccacgtagccctatcaagccaaagattcccctttctgcacctcggaaaaataccaactcagtgaaatacagactcaagtttcgctttggataatattcctcttggccttgtgagaaaccattctttcccctcaggagtttctataggtgtcttcagagttctgaagaaaaattactggacacagcttcagctatacttacactgtattgaagtcacgtcatttgtttcagtgtgactgaaacaaaatgttttttgataggaaggaaactggaattctttgtactaatacagggagcacactccttcagttcagcaagacataaagccttttgctttatgcttgagggatatttagaactttgtattttcggaaagttaaataacagggactacgtatttttctgacttttacagattaacctgaaagaacatacatgatacatttttatttttggtttccaaagaatattttgatgcagataaaatattttgttaacttttgttttttttttgtttgttttcttaaaagtacctctgcattgagcatattttcttacttttattattttaattaatatgacataagcaatcattttatgctgtttatgaattataaatgtgtttatagctcatttgtaatatggaaatcttttacatttttcctattcactgcacttttttattgtttttatttctagccatacctcagataatatgtttagttttacattttaaaatgtttaaattctctttcacagcaccaaaggctcagcttggatttgtgtgtatgtgtatgtcaattcatgacattatgtggaatcctgcacctttggtggctgggatatgatgggttagaagcaaggagaaaatataaggactttttgatggaattaaatgtgggaggtaaggaaaaggatttagaggtaaaagtacactaagtttgcaacatttattgagatctaagtctgtcttgccttcatttctctttttatctcccccttgccctcattcttgaacagctggaggaatacattttattctgtccatgaagcatacactatgaaattcaagtgcttaaaaatacttctatgactctctgctatcccactgtatagatccacagggagcaaacacttagaaatgatagagaactgaaggagatcaatggtttaacagttatccatgccaagtcccattgtcagaaatattcttattactcagtcaaacactctttgagcttcccttcctaaaggtaaccattacagtgaatagatgtgcccttttataaggaaacttctgatgtttatttaaaaaactggccttttgatagaggtaacttaatttgggaatttgttatgttgaaatggcatttaatttcaacctaaatactgactgctggacataaatcacagaaaatttaacttaagaaaatttacaaaatttattctcaggtaatcattttaataaagttctgcaaaatacacatgtttatcttacattcagaaatgtggctaaaaaggcatagctaaaggctaaacatatggctttagtagtaacaaaagggttcatagaaacttcatggtttgcatttaaacatgtttaaagtatacttataaactatttttttcttaaagcaaactacaatttattttggtgcacaaatacaaagtggaaacttaccaaaattgaactagctaccatataagcagattgctttaatttgatgggaaaatagtacacacacatatataacaaataatatattaaaaaacccatccatcaactaaaacattttatgtatacatcagtatagtgcttcattataaagccaattatctgattaagcattctttccactgaatgcataatttttaaatagcataaaatgaaatgctacaaaaaattgaactaatttatactttaaagtatttctgggttaaatgaaacaatgaaattttttagtatgtccaactctcatccaaatggcatatgaccctgtttacacagcctaaagctaaaaatattactctagtttattctaatctattgttaagtattgtgcactctataccaagttcttagggcacatgaaaaattttagctgccaaacagaaactagtaaacatatgttcctaataagtgaagggaaagataataatgatggtcaacaataagccacgtcaatgcataagttgtataggctaaatgttgcttgtaggctacattaaactcaaatgtaatagtttatcttatactcctggtttgatttgattagcatattaacgtgaaagtaggatagctactaaatatatattatgcaagtcaggaatcattaatttcaaaatttaaagccatgctaaaattaaaaagagaatattaaattacacaattacacttgtctttactggccatacaaaatgattttttttttttttttttttttgagacagagtcttgctctgtcaccaggctggagtgcagtggcatgatctcggctcactgcaacctccaactccctggtttaagggattctcctgcctcagcctcccaagtagctgggattacaggctcatgccaccacgccagctaatttttgtatttttagcagagacggggtttcaccatgttggtcaggatggtctcaatcctggcctcttgatagtcctgacctcatgatctgcccacctcagcctccccaaagtgctgggattacaggtacaatgatgtataattaatgcttagtgaagcataaagttacctacatcaattaattaaatgaacttatgtacagaaaacatgtataaatataagtctatactaatgcttacaactttctaagagggttcttgcttatgtagctttttattgttttaagtaactagaaccaccaaatatcaaataaaattatttggttatggttatgttcatctaaacacaacaataacttttatattaatatttaggagtctattttgtctataggtgacaaacatctccagactaacatgtcagttttatcaattatattatgtttaattatttaagatttctttatatggaacatctatagagataaatagaaattttcaataagatgtagtaacactgtgatttatctttcaagagtctctcttcacttccttctaaagagactaatttgagagtacaggtgtatattaattttcttggttctttcagctgaattatattggtccagaagttcaaaatcatgtgacaataataagggatactgacagaagttatttccaagtttgtgtatatattataaaaattacatatataaaactaaggcttttatttctgttatttttaagcttttatttcttgtagctaaaaataaaacatcataaatctggtaggtaaatttcttattaaatcaatcttgaaatagaaaatgtaataactttcttaccattaacattttttacccttccatagaagggagggaataaatcatgacttatcccattttcaataacaaaacgaaactatggcactaaccaaaaacttgcattctggcataatttttacagttgcagagaattgtttctgggctcattaaaaaaagtagtattgcagacattgctgcaatgggaagcaaacaataacttcttaaaggaattctacacctcctttaagatttacttaattgctacatctaaattctgataatttaaaatccattttaggtgatacaattttttaaaagttttgaaggaaacctctggataaatggacaaggcctattttttttttttttgtagtcaatccaaccgtactggccaatttttgaattaagattatatgattaggtattagcagagacaaagagttacctcctccatcttactctgccctatttgaaagtctcaggggagaaaagggaacaagatgctgatccaacctgagtggagtcaggtgaggcatctttacacctaagaatttttattttattttattattattatacttcaagttctagggtacatgtccacaatgcacatgtctgtcacacatgcacacatgtgccatgctggtgtgctgcacccaccaacctgtcatccagcattaggtatatctcctaatgctatccctcccctctccacccaccccacagcaggccccggtgtgtgatgttccccttcgtgtgtccatgtgttcttattgttcaattcccacctatgagtgagaatatgtggtgtttggtttttggtccttgcaatagtttgctgagaatgatggtttccagcttcatccatgtccctacaaaggacatgaactcatcattttttatagctgcatagtattccatggtgtatatgtgccacattttcttaatccagtctatcattgttggacatttgggttggttccaagtctttgctattgtgaatagtgctgcaataaacatacgtgtgcatgtgtctttatagcagcatgatttataatcctttgggtatatacacagtagtgggatggctgggtcaaatggtatttctagttctagatccctgaggaatcgccacactgacttccacaatggttgaactagtttacagtcccaccaacagtgtaaacgtgttcctatttctccacatcctctccagcacctgttgtttcctttttaatgattgccattctaacaggtgtgagatgatatctcattgtggttttgatttgcatttctctgatggccagtgatgatgagcattttttcatgtgttttttggctgcataaatgtcttcttttgagaagtgtctgttcctatccttagcccactttttgatggggttatttgtttttttcttgtaaatttgtttgagttcattgtagattctggatattagccctttgtcagatgagtagattgcaaaaattttctcccattctgtaggttgcctgttcactctgatggtagtttcttttgctgtgcagaagctctttagtttaattagatcccatttgtcaattttggcttttgttgccattgcttttggtgttttagacatgaagtccttgcccatgcctatgtcctgaatggtattgcctaggttttcttctatggtttttatggttttaggtctaacatttaaatctttaatccatcttgaattaatttttgtataaagtgtaaggaagggatccagtttcagctttctacacatggctagccagttttcccagcaccatttattaaatagggaatcctttccccattgcttgtttttgtcaggtttgtcaaagatcagatagttgtagatatgcagcattatttctgagggctctgttctgttccattgatctatatctctgttttggtaccagtaccatgctgttttggttactgtagccttgtagtatagtttgaagtcaggtagtgtgatgcctccagctttgttcttttggcttagcattgccttggcgatgcgggctcttttttggttccatatgaactttnnnnnnnnnnnnnnnnnnnnnnnnnnnnnnnnnnnnnnnnnnnnnnnnnnnnnnnnnnnnnnnnnnnnnnnnnnnnnnnnnnnnnnnnnnnnnnnnnnnnnnnnnnnnnnnnnnnnnnnnnnnnnnnnnnnnnnnnnnnnnnnnnnnnnnnnnnnnnnnnnnnnnnnnnnnnnnnnnnnnnnnnnnnnnnnnnnnnnnnnnnnnnnnnnnnnnnnnnnnnnnnnnnnnnnnnnnnnnnnnnnnnnnnnnnnnnnnnnnnnnnnnnnnnnnnnnnnnnnnnnnnnnnnnnnnnnnnnnnnnnnnnnnnnnnnnnnnnnnnnnnnnnnnnnnnnnnnnnnnnnnnnnnnnnnnnnnnnnnnnnnnnnnnnnnnnnnnnnnnnnnnnnnnnnnnnnnnnnnnnnnnnnnnnnnnnnnnnnnnnnnnnnnnnnnnnnnnnnnnnnnnnnnnnnnnnnnnnnnnnnnnnnnnnnnnnnnnnnnnnnnnnnnnnnnnnnnnnnnnnnnnnnnnnnnnnnnnnnnnnnnnnnnnnnnnnnnnnnnnnnnnnnnnnnnnnnnnnnnnnnnnnnnnnnnnnnnnnnnnnnnnnnnnnnnnnnnnnnnnnnnnnnnnnnnnnnnnnnnnnnnnnnnnnnnnnnnnnnnnnnnnnnnnnnnnnnnnnnnnnnnnnnnnnnnnnnnnnnnnnnnnnnnnnnnnnnnnnnnnnnnnnnnnnnnnnnnnnnnnnnnnnnnnnnnnnnnnnnnnnnnnnnnnnnnnnnnnnnnnnnnnnnnnnnnnnnnnnnnnnnnnnnnnnnnnnnnnnnnnnnnnnnnnnnnnnnnnnnnnnnnnnnnnnnnnnnnnnnnnnnnnnnnnnnaacataaatttttagaccaactaaaaatatcaggcacttgcagctgcatttaagtatcaatacatgtcatcatatgacacttcaatttcactagcaatcataaaaataggttactgtgcaaatcccagtgcttttgctatttgtaggccaaacaagcagtctagtaggatgccagtaggtatcagtgggagagtaaagacatttctttttggtaatttatttctagatgtgcttgtctttccctagataaactctctcagagaagactgacatttttctgtatcctacagagagattagtgaatgcataatcacacagtgacaggtccagctccaatgtgtttctcattaaattctctgtcgttccctctgtgggaaactggacaatttatcagattttcatacagggaggtgaatttctgctgaggaggcaacaccaatgtcttttaccttcctgagtgcaattatggctgagcttccctgatagtactccattttatgatagggttgtcattgtaggatgtgtgcattctataacttctgacactggttatatatttacactttttaaagttagctagttgtcctacatttgccttaacacagaatgtctgagattaagcatacctgtatactaaaatattaattgtacaaggagaatatacaaagatttctctaacagtcaccatcttaatggagcatgtgagagaatgagtttcaaatctggaaacagaaagtagcataaaagcgtatgttctcagtcaattcttgatttttttttgcataaaagatgaatttcaaaggggagaaaaatatgttttctgtttaagtaatgaaagaataaccgttatggcaataactaccataaattttgtctgagatctggagttcctttaagttatgattagaaggaaaattcatgcccatttatttatgttgccacatttgttgtatcactgtgtaaaacaacagatcagctctgacagagagtttgttttcactttagatatcatgttgcctaagattctcagcctttaccatttggtgagcaagtgaacaaatgagaaaaatacacacgcatcccaccttgctggtgcagagcacaaaccacaagattctccactannnnnnnnnngcatttcatgtttgcgctaatctcttggaggtcgtcactagccactttgatggtattgttttctgtattgtgagtcatgtagattctggatattagccctttgtcagatgagtagattgcaaaaattttctcccattctgtaggttgcctgttcactctgatggtagtttcttttgctgtgcagaagctctttagtttaattagatcccatttgtcaattttggcttttgttgccattgcttttggtgttttagacatgaagtccttgcccatgcctatgtcctgaatggtattgcctaggttttcttctatggtttttatggttttaggtctaacatttaaatctttaatccatcttgaattaatttttgtataaagtgtaaggaagggatccagtttcagctttctacacatggctagccagttttcccagcaccatttattaaatagggaatcctttccccattgcttgtttttgtcaggtttgtcaaagatcagatagttgtagatatgcagcattatttctgagggctctgttctgttccattgatctatatctctgttttggtaccagtaccatgctgttttggttactgtagccttgtagtatagtttgaagtcaggtagtgtgatgcctccagctttgttcttttggcttagcattgccttggcgatgcgggctcttttttggttccatatgaactttaaagtagttttttccaattctgtgaagaaagtcattggtagacatctaagaatttttatgacattgaatcagtcagctgggctacacatcatcaatcagtatttcagcaattttatgcaataaaaataatattagattataaaccaagaactctcatttatgttttagtttattaaattgtttttgtctttattcagacataaatatcacaagtcactctctagcacctgttttacccttcaccatttgatctctaacatgatttctagatttattaccagtgattgtaggattcttacaatgttgaaagttctatgagatcataaaaagggacatagttccttctctaatgaaactaaatttacgtccagatgaaactggacaaccacgtgaaaaaaaaagctgtcaatgaagttataaacatagatctttttaaaagatcttttcttagtttaaaaaatatccactgagtaagtttgtgagatttgatcaagacatttacaaagctgggatcgattttgggcttaacattttatgaaggatgtaaaaaatttgaattaacctggaggaagaatggtcagagtggtatcattgttgataataaatagccctacttaattaaacatgcaattttaaaatcagctcttttgtgattaaagttccccattctacatgaagtcttctagaaattcttgaagaaatatgagcaatttcttcttgacatcatgcctccaaataagatagctcaggacacaattttctgtcaccattcccttactttcccaaaaattcaggaaatgttttctgagatccctccttgcacaaggctctcagctagcaagacattcttggacttgctcagtgcttgtttagtagttccttgtgtatatttacttcaatgtactctcatattttgaacttctggagaaaatatgtctgccctcattgcacatttcccaccctaaaatcaggctaataaaaataactcaataaatgctcttagcgaaaagcaaacttgaatgatgtattcctctggcttaaacactttgtagaggctattggatattctagttattcacaaaacttagtgtataattataattataggttcctggcatatgttagttgctcagaaatgcttttaggatgtatacatgtgctgaataagatttatcggacaaaaatgatgatgacaggtaagagaatttcatgttaaatatgaaatgtctcctacaataagagtaagaacatccactgtccctcctactgtacttgaagttctcaaacataaatttttagaccaaactaaaaatatcaggcacttgcagctgcatttaagtatcaatacatgtcatcatatgacacttcaatttcactagcaatcataaaaataggttactgtgcaaatcccagtgcttttgctatttgtaggccaaacaagcagtctagtaggatgccagtaggtatcagtgggagagtaaagacatttcttttcggtaatttatttctagatgtgcttgtccctttccctagataaactctctcagagaagactgacatttttctgtatcctacagagagattagtgaatgcataatcacacagtgacaggtccagctccaatgtgtttctcattaaattctctgtcgttccctctgtgggaaactggacaatttatcagattttcatacagggaggtgaatttctgctgaggaggcaacaccaatgtcttttaccttcctgagtgcaattatggctgagcttccctgatagtactccattttatgatagggttgtcattgtaggatgtgtgcattctataacttctgacactggttatatatttacactttttaaagttagctagttgtcctacatttgccttaacacagaatgtctgagattaagcatacctgtatactaaaatattaattgtacaaggagaatatacaaagatttctctaacagtcaccatcttaatggagcatgtgagagaatgagtttcaaatctggaaacagaaagtagcataaaagcgtatgttctcagtcaattcttgattttttttttttgcataaaagatgaatttcaaaggggagaaaaatatgttttctgtttaagtaatgaaagaataaccgttatggcaataactaccataaattttgtctgagatctggagttcctttaagttatgattagaaggaaaattcatgcccatttatttatgttgccacatttgttgtatcactgtgtaaaacaacagatcagctctgacagagagtttgttttcactttagatatcatgttgcctaagattctcagcctttaccatttggtgagcaagtgaacaaatgagaaaaatacgcacgcatcccaccttgctggtgcagagcacaaaccacaagatttctccactagtcaagggagtttaatgtttaatgacacaaaatcaactcagtctagcaaaactccaaggtccaaaggagccaagcaaactaaaagaataatgatttcttggttgctaataattcatggcagaaaccactaataagtttctaatataagcattcagtgttcatttaaccccttatagctggcattatgctggggttctgggaatagaattaaacacattggtttgagggaaatttacattcttgctgataatattagggaagtgaaccatagctttagaatacgatatgcagttcttggtaggttaaaaatgacacttattcttgccaaagaaatttagtatgttgggtcactgtttaccaggatggatccaaaaccttaagctgtagtttacattacacattttagaagtaactctcaagtttctttgatgctccttttgggaatttacagcattttttattggatattaacctacaggatgttatcaaagatgcaagatgtttctatgcttattttaagataattagggatccaatggaacgtaagaaaattgtgtgcaggcttttctaattccatctgctataacaaacatttaccttacagctgggattggaaaagcaatacgatctgattccaggattgctcagaaattggaaaaaaactgacctgtgcttcccaaatttatttcccaagacaaagatgtctatagcacagaaaaaattgcatgaattaaaaaatcaagatgtattattaaatatggtcctgagtattgcttaacatttcagttctttttctacctgtttgctggaagcaagaacattgttaacaatttagcacctttttcattaaacaccacctcccactgttggtcttaaatataggattgtatatatatatcagacttcctttgagaacagctgctgctttttggactgctaggattagtgcaaacaaacctcccccaggacatttaagggggttggcaaatgctgctgtgtctactttggttgttatagaggcacccttgcagtggtttcagccagcgttcctgtaacattggcctgcagtcaataaatatttcatgtctctttcccctagggtgtgctcagaagaccaccctgcaagtttctgcctctgtggtcacagcttcatgctgtgggcgtaaaggtgggtgtgcagccagaggcaggatgtgcaggcaagatccaatgtggttaaaatttgggatcactagtctggctttagggaatctggagactatttcatgttaacactcattctaagagagaaagcatgtccatcagaggattatcattaagcatcagtgtgattcactcaagggttaatagaaagaaacattcataagaggtgaggtttcaggttaagagagaaataggagcctcttgttcttctcaccagagtgtagaatgtcttcttccctttaggaagaagaccctcaaagtttccagaaggttccaaagtttcctaaaggacccaagtgggaaaggatccatgtctccttagctctttaaaacatgtcatgaatcaggcatccaaacaataatgcactcagtgactgagtgaacatctagtgaaccgaatgattcagagattggtcgagatttattaattgcctaaaaaagagactcaaaggccagggaaagtagagccagttttgctttgcttaagaaaataagaggaaaaataaaaatggtgttgcacgttgcttttggggcctaatatcactttccctccaccctcgcagagggtaggtctaactcttgttagttatcatttggatggtttgcttagttattccctgtctgttttccatagacattgtttgagtacttactatatgccaaatatgccacaagtgatgggtgtagagataaataagacctggtttcttccctcaagaagcttgtagtctagatgagaagacaaacaattaaaaaaatatgctctatatatcccacgaaggcagagctggactactgtaataagtactgccaccttacttttgaacagtgctttttagttttaatgtagcacttaaagcgttcagaacatatttagctgccttatctaattagatatagaagtaaaccacctaaaaggaaatgaatggcttctaagaagttagcatttaaacctaagataccttgatgcttggtccaaattcccttttcagtgctcataactcagctgctgaatatgcagcttctcaaggccgtgcctcttaccttaggcaactaccaaggttacattcattcccacggtaccctgaggccaataactagctgattcagaaatacaatggcctgacccccttgccacgatttttaatcaatatgaagggccatagcagcttcaaggcacccctaggatcagctgaggccccagctgccgacatagagaagacaattttctccctccaccctgcctttttcatttccttacaggtagggacacagatacaagacaatactctcgactaaatttgaattctagataaacaataattttttgtataagtatgttgcaaatattgcataggtatcctgtagttttatttgctaggtctggcactactatgtacaattgtaactctgaagatcactccctgtgaacgtgctgtgtgctactctcagcctcagagtgttgctggggaatccattctctgggaaaaggtattgtggtcaggaagcacaagggagggcctggactgccagagaaaagtgtgaggggaataagaagaggatcctctttctacaatcagagatgaaggcatatttcaacattctcatgggcataaagaagtttatactcataagcaaggcaaaattcaaaagtttcagtggctatacaaagcctaaaatattctttatccaaagcgtgatcttgagggcttaattctttgctcagcctcccaaaacattagctgtatgtgtttgtacatataatactaaggcacatggactgtcttttcctaaattatgcaaggcatgtgatcaatttggggcttattaatgacatttctgaaagtctctcaaaaagttggtcagcctttcttcataaaacacattttttacatgttttacaaagtgccacatgcacctggcctttctgctacctcagcagctatttcttcctgtctctttggctagctcctcttttacctgacctgtaaaccttgtgggaccccagggaggtaaactcacttcctatgtgatttcacctccgccttacataccagatgtatgctgacgacttccacatttaaatctccagcctcaacctctcccagaatttcacattcacgtagccaactgcctgttgcagcaattctatattgctacaggatatctaacaggcatctgaaggctgacatgttcaaaactcaactcttgttcccaaaccagttaagcttccagacttctacagtttaataaacagcatgatgatttattcagtgactcgagccaaaaatctaggaatcattcttgtgtctttcctttctctcataaccctcatccagtacgccagcaactccttttggctaaacctttaagcaaattctgagttctttctctgtctctactccatatctcatctttggcttgacctgtcgctatatcctctcaactggtctctcttcttctcactacagtggattttacagagaagtcaaagtgaaattttaaaaacagaaatcacgtatttttcctgctcagaactcttcagtggcttcccagcccactaagatggagctagtcctttcctccctctcttgttccatcccctagtctcttccacctcactaactctgctttaacccaatgcctggaatgcctttcccccaattgttcagctattctactccttctctcctcagagatgccttccctgatgactgtttgaagtgtcttcccctacttactccatctcatccccttcttatttttgttagtgcatttttcatgctccttaattatcttgtatactttggtgttgattgatttcctcagggttatataagtaagtctgtttccccccaatagaatgtaaacaccttgtgtaaagacccttcgcttggcttcttcactgcaggatttctggttcctggtgtggacctgccacaaaggaggtactcgatatttatttatttattggaatgacaatattccctattctagaaaaggctagagggttgaaagtaagtgaactatacaattagccagaatgattagtcaagctttaattctaataagctctccaactggaatgctaagtttgtctgaaagtgcaattaattctctggccgaacatgaaaaacctcccaacgatttaccaatttttcagtaaggtaaattttgtagaaggattaggaaagccttaaaccctaatgtggtatcaccatgtttgcaagctcccctagacaatttatctatgcccttgctggatgtggtcaagattctaaggatctgccttatgagcaacactaaatagcatattaatattaataaatatctgtatggcataaaactgagacattcaccagcaaatatacaaatacataactactctttgattaattttaggataatccatcaaaagtaatgtgaatattatactttcttttttccaatattaaaacatttttaattgacacataattgtacatatttatgggatacaatttgatgtttcaatacacatatatgttatatagtgatcaaattagggcagctagcatttccatcatctcatgtatttatcatttttttgtggtgagaacattcataagcctctcttctagatattttgtattatacaatacattattgctaaccatagtcaccctattgtgcaacagaacactagaacttattccttctatctaattgtaacttgtacctgttgacctacctctccccatctttccttcctcccacccctccccacttagtctctggtaattactgttccactacctgcttctacaatatcaacttttgtatttgtttttctgtgtttgacttatttcacataaaattatatcctccaggttcatccatgttgtccaaatgacagggtttcattttcttttatggctgaaaagtattttattgtgtatatttaccacattttctttatgtgtttatccattgttggacactaatttgattccatatctgagctattgtaaatagtgctgcaataaacatgggagtgcagatacattttcaacatgtatatttctgttggatatatccctagtagggggattgctggataatagggtagttttgtttttaatattttgaggaaatttcctattgtgtttcataattgctgcactaatttacaatcccaaaaaccatgtgtaagtgttcccttttctccacatccttgccaatagttttcttttgtcttttttgataatagccattctaactagagtgaggtggtattttattgtggttttcatttgtatttagcataaatgattaatgacattaagcatttttttcatatatctgttggccatttgtttgtcttcaaagtctgctaaggtcttctgcccacttttaaattggattatcattattattattatttttgcattgagttccctttatataccggatattaaccccttgtcacatgtatagtttacatatattttctcctatcctgtaggttttattttcactcttgtttcattcactgtatgaaagctttttcatttgatgtaatcccgtttgtctatttttgcttttgttgcctgtgcttttgaggtcttacttaaaaaattttcacccagcccaatgtcgtgaagtgtttctcctataaaaattatgctgtgaagcatttcttccagtagttttatagtttcaggtaatatttattgattgaatgaatgagtatggtcagttttgctacaacagttgtttcgaaaaccctaatttgttccaactccattgatagattaggaaacaatttgagcataatgtaaattttgtgttgactcatatgcaatttcatctgtgagaaacactagatatttcagctgaactgagctatgtgggaatacgcaatatatacatacacatacctgatgagatcaatgagccatacctattcatacctggcattacaattttccatcagatacccctccttcaaacatgttgtggactaaattgtttccccctaaaattcatatgttgaagtcctcacccctaatataactgtatttggagatgtgggcattaaggagataattaaggttaaatgaagtcagaaggatgagtccctaatccattaggactggtccttaaaaacaaaggaagagacactggagctctctttcccctcatgcacagaaaaacagtaagtgaggagaaagcaacaaggcaaccctctgtaagccgacaaaagagccctcaataggaactgaatctgctggcactttgatctgggacttccagcttccagaactgaaaaaataaatttgttgtttaacccacctagtctgtggtattttgttatggcagcctgggaaggctaatacaaaccacttgacaatacctcacaagccacaaccctttctattgctaccctactcatgcagcgcagcatgcatcctcctatttttgtccctctttttaagcttttttgaatttttcctccctgttctcttttctttttctcttgatctttcctttatgatagaagctttttttctcagtttatttcttctcctcttcttttacacagaacacgctagaaacttaagtacaagcaaacttcagacccttttgaagg

SEQ ID NO: 34 - DNA, 22850 bp, Mus musculus
gcaggcgtgcacggagcagtgagatcactggcgttataaatatcccggtgccagcgccgagatccgctcgggtggcctctctctctccccctctccctctcccttccccgaggctatgtccaccctgtgcggcgagggaggcagcgccagaggcacgcagccgcgcgggggctacggagcccggagccagccctgcaagatgcacttaggacccccgcggccggaagaatgagcctgtccttgctcttcctcatcttctgcagccacctgatccacagcgcttgggctcacggggagaagcgtctcactcccgaagggcaacccgcgcctcctaggaacccgggagactccagcggcagccggggcagaagtagcgcgacgttttcttcgtcttctgcctcctcaccagtcgcagcttctccgggcagccaaggaagcggctcggaacatagcagtttccagtggagcccttcggggcgccggaccggcagcctgtactgcagagtgggcatcggtttccatctgcagatctacccggatggcaaagtcaatggctcccacgaagccagtgtgttaagtaagttgctcactctccaacaaaacctgttctgggagggacggtcaagattcctttgggccacaggcacctctaggagccctagcgtctgggactctgctggttctggaaagagtccggtagggtttcgtggagatgcgtctactcagagcgagcagacgcacccttctgtcttgggtagtaagcatgggtaagcccaggtgaggttaccgaggtgagacaggcagctcttttccagaatgcccgggccgaaaagactagccacccactctagctggagaagaaaaaaaaataataataataatgaaagaagtaacaatctttctcctggtacaatttctttctacttatgaactagaaccgcatttttctttaagcgttaagtatatctctattccctgtacataatttacgtttatgaaaagaacccatctgagtacttccattctccaactacaaatatcctatatatcccatattatgtttgtttattaatatctctatgtaactccgaatgcttaggtatctttcacacgaatacatacatatgtagatacatacatgcgtacataagcgcgcgcgcacaccaactacacaggtctacgtagaatttacgtgtacatgcgttttggaagggcaaagttctgcttgcaagaaagcaacatgatctggaaaaccggacagacagtattatgactaagtccggtgctgagtttaacaacatttagtaggctgagaccctgacaatgttaacctttggtttccagggacagatggagtaaagttcttaattttaaaagaattacagatgaggttggaaatggttgtaaattgagcataacttaaaaaaaaaaaacatcaaccacccaacctgaaatttttctgagttctctctttctcctttcctcttcgcttccacccccacccgcgttttctccattccatctgcttttctggaccaccacgttaatcactcgcactcccctcgctgctctaagctgctgaggtgagcggaggtttggagctgtgtgcatgcatgggactgtagttgtctctgtaatcctgcaagcagttttctcactaggttcaggtcgggtttccagcagggctcagtcctccagataaaagccacagcagggaccgctcagactcccatggagagcggaaatggggccaggagatagtgctgcgcagtcacctggctcctcttgtcttcctggtggctctcgggtgcacttcactagaccagcgtccccagaaactagaacacttttgtttactcagctccaagaaccacgggctttatttgttgggctgacagtcggctggggcctgtggggagggtttggaaattcaagcacaggtgggatggctggccgaccagtctctttcattgagttaagaggatcaggctagtgagatccggtggtagcttcccgacaggtgctgttccaagcctgcctgccggctgcttgctttgtctttggagagcaacacttcagtcggctgaggtgcagaaggagaagcaatgcacaacagagggccctggtctcccatcccattgagtctcagggcttccaatatagtccacattggaccccttctcttgacgttcgaaagaaactttggtctttgtgtatgaagggaatagtccgttctgataagggtggattttctgatgctcctcggagatgttacttctgtttcaatatttctgctcattctcctcattttgcagggttcagttctaccacaagacagcctttagtcttgacctcaacaattttcttagctcttgtagaaaaactttctctactttgttgctgtgaatgagcaccaagtatatataacccttgcttgctcaggagagaccccaatagcaggtagctagcagtaggttgggatctcctgtgcctggggtagctttggagtgctagggagctctggtagcagaacattaaaaaagcccattgaagctaaatgtggctgcagtacaggccttgctagaaggggttttttcagaaacataaatgaagaaactcgagagcagatcaacagatcatttatctaacgaagaaactagccagctacatattatatccaggggctaattttaatttaaaatcctcattgaaattatttaaaatcctcattgaaaggtgggcacaaaccagaggagatgtatcctagacagggacttataaaactttgtaagtagctttttcctaactcccaaccttgcaattttaaacagccattcagagtttaatttgtatctttcaaaagactggcatgtatgcatgcattcattcgttcattcattcatgtacccaatgtaggatgtctgcctcagaatgcgtgttttggttacttatgtgccatgttttcttttcctttttttacattttctctggctttgccttccacagacaggtttttctcaaagaaaagcataacttaagtctcatagtcacagtcctttcggttatcagtacttcccaacacagctctctatgaattgattttatgtgcagtggaaaggcatgggatttggaaacttaaaatggctctttacacttaggtagccatggaagaaaaagcagcatctacttgcaactgattactacagtgcaatatatatatatatatatatatatatatatatatatatatataccttagactatgtattgcttagactatatgtggaaacgtgtttttctctcacaagaaagactgaaatgcattgggggaaataaccctcagtatgaaggtgtttttgttttgttttgtttttatgcctcaatgagcctttttttttagataaaatgtcgatttttacttgataataaatatatttgccaatcatgaagatttgtttagttttactatcaaaaccatgctctagccacagatactgaaacgtccctttcggtacttcaactagtcaggccctggtttgcctcactcaatagtgggtaccatgctttacagacagaatatggtatctggcatcttgcatatgaacccttgtaggaaggaaatgctggggaaagatgaagaatggacacaaccaggggctatgagctctaaccctgaagagaaatgaacagctgctttcccttacaagctgtcaagtctagcttccatacagtgctttacttggcttacctggggccattaaaactatggaatgagatagcagttcagagggaaagctttaggtgacagctattcagagcagtcacacaaaatatgaacctttcattcattcacattttgactaagagagtcctgaatgttacactttgttctgaaaatctgatttgactatccatttcaggatcatatgctcatcagacatcaccccaggctggataagccagaatttaatgtgcagagaaattccagggggagatttcatcaataatttaatcagcaaaagacagagctaaattggatcattcaagactgagatgtgataacttggcagaggagcatgtcggttaccatggatgagagtagaaagacttcagtgtcgccatgtttttcttttgggaaatttcagatgctttattgaaagcttctgaacacacgtgatatctatgttctcttagcttttattctcctagtctgtaataatgtgtcccccatcatcaatagcatcttctgatattaagagagctaaagaacaggaaagaaaactatgtatgctttttttcttactgagggaaacttattgtaatcatcctttgaagtaggcagattaaggaccaatggtagagacaccaagaaactttgtctctttcaaccttgacattttactaagaaaggcttcttccttccatctctgtctctcctctcttctcctaatcatagacaccttgggaaagatgacacaccatctttagtacctgcatatgagtatatcctgagttctccacacccatccccaaacaggagagagacacaataaatagtaagagcaactcaaaactcatgaccctgcaagggggttgtccccaagacagtgcaacatcaaagatagtcactggtccctacaggcgtctacttgggtgtccccaagacagcacagcattgcagtcagtcactggcaggtctgtgagacaatcactttccataattatgcttaaggacactgtcttagcatccacagggtgaataacaaattattaccttaagtttatcatctccaactcctaaaaattagaggacaaataatactgacttcataaagtcagctttagcgaaatgcactttggggtgtattaattcacgatttgacacacatgggtttacagtatttcctagaattcttgaatgagttactgagatgtgtgctctcttggagagagaaagatggaaagcccattgtgagtcatgcaggattgtgctggtattctagaaaaccagactgtgtgaaatcattgatattagtttagaaattatgattttaacaatgactccaatattaggtaaaaattacattaagatttaaaagattaattacaaagttgcctatgtgaaaaacaattcttatgcacacacatatgcatatacatgctcacttacatacatgcatgcatacacacacacacacacacacacacacacacacacacatatatatatatatatatatacttattaagcttttaggaacactaaatcttaaaattacatagtctttccattatagggcaatatgtgatttttatcatacagacaatgcaatgtgtaataacataacacttttataggcattacttcatcatctccccatatttaaaattaattgcaatgagaatgtatataatcaacacacatagaataaaatatgcagtgtattgagatacaagttaattgagccaaaatgagttcttaaaggaaggtcttatggtcggaaaacagtcgtttagttaaacaaggacctatttttttttaaaccaagtcaatatttataaagccatttaatttcaacatctcaaaaggtaggctgaaaatataagaatttgatctttgctgctgaatattttcattaatgtaggaccaatctacatttataaaaatgaacacttccgtaaggagaacagaaaactctgttcattgtcttcctaaaaattaagatacagaaaaaaattgaatttaaaaaggatcagaaaaaatgtttgttggtctacattagtatatgagtgaatgcacccttagcaatctagaggcatgagtaccctgaagacaaccatgaagagctcatggtccaaccctattgtcttcttatgtcaatcatttcacacagacgagttctcgccgtggcccttccatacttctgatcacatatgtggtgtttacatgttcaccccgaatcagctaaatatttgaactctttactgaagctttcaatattattcccaaattctgattcaaatatagctttttgtaagaagcgatggccatattttaataataatatatcctactatgtctttttataaagctaaagctcacgtgtggagtatattttaaattttagaatgttaaatacaccatgtaattatacctattatactctatataaactgatgtatgtaagtttacaaagtattctgtgtgctttgccagtatctggtaaagtgacgatgcttctaagttcttgcatgtgtatctcaatcaaacaatttttatattaggctctacctaaataaaaattagaaatatttgaatggaaatgatatgtggaacagtagtgtctgttaacactagtgtctgttaacactagtgtctgttaacataagcaaaagcagctctgggtaaggtgggtttggtttggtttggttttgttgttttggttttttatgttctgtttcttttcattctcctgaaaagacacaacagtaaagtggggcctgcaatggttttcttattctgggctaagactgtccaaaacaacagtaacaaaacagttccccaggtgttcccttttctctgtgaagcttctgagtgtttaaaggcggagctgagtgagcactcggtaatatttgtgagaactgcagatgttcagcttgcgctatgcaataataattcttcaacaaactgattcacctgtatgcactcatcgccctcgtgggcaaattaactattgtgcacaagtcctgtaggggagaatgctacttcaaggacacctgaggaaaatgtcacctccacagaggtatttccacaataccctaagcagggtacatgcttgaaacaattgtgtccaagtgttgagatctgctctctcctcctctgagttttctttgttttgttttcctctgttctaatgaactatattgctctatttcagctctaatgaaatacactgtttctatattttaacagtatcatgtgtataactaacaagaatattctccccactcatatttatatataaagtcttttgtgactttatatactaggcaggctttctagctatgtgcaaagcacacattgaaccttttaaaaaccctcgaggaattgcagttaacagtttcttgactcagcacatgtgggtcttgaaatgattgcaggaaataaagggactaaggcttgacacacagactgtgcatcacacagtcacaacatcgtagatcatcacacttttctaggaaatgatttaaagcgcaatacgtctcaaaacataattcattaaacaattcacataagtagtgtaacttatattttcagtatcttaggtatggtttttatggttttaaaagattgttttatgtaagaaattataactttccaggcttttgaattttttatacttgtggaatagtaacaaattagaattaccgaaaaaaatattttaaaagcctctctcaataccttcagggcttgagaaggatctattgtcaaatttactaaaaacaacctgctatgtgcaaatacagaattactgaggaagcagggtaaagttcctgaatcttgaaataagtcattccgagtgtacacgcattgttagccattctttaacacgttggaggtcacaaaaggtcattatatgttcttttatttaatctcagtagtaaggactgagaacagttgacgtagtagacattgaattcttcacagttctgtgtagaagagtctgtgttttattttgggatttttttgtcatcctaggtattttggaaatatttgctgtgtctcaggggattgtaggaatacgaggagttttcagcaacaaatttttagcgatgtcaaaaaaaggaaaactccatgcaagtgtaagtagaaacccctttgtgtttgttgaaaagtgctccaccggttgtgcgtctgtaacaaagtgaagagattgtttttgaaatgagtggataagatagaccatttgcctaaggaacttatttggtttttttctggtaaaaatgatatgtatgtataaccaattgtgaatctgtctgtaagtcattattggaacatgtctttgttttggaaacaaatagaaccttcaaggctgtaaagggtaaatgcacttgtaaacagcctttgcaaacggattgccattgtgagacttgtcacaggagtgagctattccgtggcctcacataaactttacatttggtggcatgtgtgtttaatagacagaggggttcttaattgattttacagattactcatgatattaatttgaggtctaagtaatatatgtttccatgtaaggaagtaaaggacaaaagcgacacccgccaagcctctcacctcccagagagaaactgtgcttgaggaagcaggggcatttctgtcttgtctttttttttttttctgtcacttcaattataattacttaatactaatcttgcattcaaaagttttcttcggagtgcttacacattttgtaatcattttaaaaattatttgcttcttagctttttaccacatctagattctgtttgtattagtgtatatgtgtcacacttaaaagtaacttcgggcttttttgtgatgaaagagatttttcttaacacgacataaatttaaaaggcaattgctccttaaagttagtcctttaattaataggaaatgactagctgaatatttcttttgtaattttcaaagggtacagggaaatctaactcaccggtgaaaccaattgacaccagcctctaagccctgattctacagatctttaagaaccaaccagaattccacgcttttctatatggaaagctccacaatgtcctttcctttgcatctgaaagaattagtaacttctgaagaacactatatctatttggagttttgtgagatggtagatataaagtccttaggacagcagttggggccttgtgagtttttaagaaacagtgtgaattattaaatgcagtaagctaaacataatgtaatgtagcaagccacctcaatctggaattaatgagaagcctttcttaaactctttcatcattaatttcaagagttataaaagcaatttatttcgtttctgtgttgttttactccagtaatgactaacacagttttttttttaaagaaagttataactgaacaagtaaaagtcacatttcactcatttctgtgggaaaaatcagacatcactcattttgttagggataacgtttgatcactaaaaggtcacatccaggttggacaataatgacttttcattgttctgctttaaggctctaaagccttcaaagcctcagtgtcctaagatccgagacaagtaaagagatcacctcttaaaggtttgtctgaggaatgaaaaattgtaaccctgaaaatgttctcatctgcgtaccagtgcatacaaaaatagatggaactcgggccagcgagaggataattgccacagaaagcaaagtattataaatggatgccaattagaagggtcaagctgagaggttaggatacatgattcctccgtcaaatgcaagtaactaatttctagaaatttgacccaaatgtctaaggacgactggtggaaataatgcagataatgcaaaaaaacagccatctgttattcttcctcatgctggcaggccaaagttatttcatgggataatgacttttaaacagtacaaagcaagtcttgctcttgtcactcaatgggcttcttagatacaaaagtcattctggtgactttgagctgaactggagataaaaaaaaaaaataagccccacgattgtgtccaaacctccattctcttatctgagcttttattagcaccccacccccccccccagatggaaacctaattaaattatgaagtgatttatttttaaagaagtcgagtttagaaacagcattaatcatagcaattatcggctttatgcccagccactttgttttcctgttctcactgtactcaacatgttaaagaaacactcttctaactttcaatgtgtttacctgctttggttttgacgcttacagagttattatcgcccgaactactaacccacactcagtaacacatagttggtgagttgctttatagtaataaccttgcattggccttggagagcatctttcagcttcttcatccgaattgaaagtgagttagaagtgtaatgtagccaggtacctggcgaaaatgattcccctacagcggagtgtccatttcaatccagttctaatagcagagcttaagctggccaccaggctacagtgatgtagtttcacagctctgcaaaggaccttccactcacatgacctcatcacacactcaggcaagaaaagaggctggagaggggtagttacttccctaaggttacatagttgtaggattgaaaggaaactgtgtcctcttcaaattccctctttagatatccaaatggtttgcaggcataagttagtttaaaagatagcattgtgtttgggaacaaattacattgtttccatgtgcttataggaattattaagtaatagccttacaccatatgtcaaaaatgaagactatggcagaccattaagagcatttatagcacgctgttaactagctaagaagagggaaattctataccagatgtgtaaagttataaattaatttccactgtctcaccttcccttggattcaaaacatttattttggcccttgcctttccccccaaactctccagtacttgattttagtctacagaggaggggatatgtctgctacagagctttacacagacatattcattcggtgtgatattgggtcacttagggaacccctctggaggttaactttcaaactgaaaagaactgcctggtttccaaaaatcctcaagcactgactgctacttcttttgtgggtgtgagcaaagatggcggactgcaatggcctgcctggagcagcatgaaggaggcacgctggcgctgacagaattgtcccgtttgtcaatgtcacaataggagttttacttgaacctccaagagttgacaggtggtgttgaagctctctccccatcccctcatccgtgcgcgcacgggcacctctcctcaaaaccattcacagattccaaatgcgcaagatagtcgtcatattcccactgtgtgaatttcccagcacgcttgaaaagaatttaatttaaaaaaatatattttccatacaacctattctgatgttggttttccctcccctacctccttacaggatcctccccactccccacttcgccaaatccatactctttctcactggggagagagagggggagagggagagagagagtgaaagtttatggtctttttgtcaaaatgtgtgaggagctctggacaggagaagagcatgattgcttcctagagaggcagcagggttagtcagggtatcaccgtggctcccattcactgtcttaaactattctggatgaaggcccttgctgtgtcctctcaggctttcagcctgtcgccctcacgtttggggtcttcatggaaagcccgccacaggacctttctggctcttccaacacagtttaggtgtgaagagtgaacacctctgggtatgcagttaagcccagttccgctccacacttgtgtcacgttatcgaatagtctgcgttttgcttttatagttgaaataaacaggaaaattatagcggctgcccaaagtggtggctgtgttttccatgagactgtgtacagaggtcttgctgtagtgcctggaatctattatcactcgccatttaaacaaatcttccagaatgtgttctctggcagctggtgggtgatctccaatgtctccttatgatttcaaggtcaagcagcctcggctcctcagctatttagattagcctaaatcctactccttgggacgtcactgtttgcacacacaacagcctcttatctgctaggttttccttttgccaaggaatcaaatttgaaggcaaggtttccaagctcacaccggcagggtggggagcggggaggggagttcctgtcctcatggtcttctggtccctttggagtcctacagtctattttagtatggaaaattataaatcttgggaaagttggaggtcatatgtgcttcaatgttttcatgaagtatacatgatagcttgttacatgttgggaaaaaacttaactatccagagaaaggcatatggtcaaatggttattttcttatgtctctgggttttaggggatcatgtttggaaggaaggctaattgcagagtttacgaaacaggcttggaatgtgtgctgatcagccctgagtgaggactagaatattctcctttcctgagttcagagggtgccagctggctagccagtctggactggacgtccagcgctgggggcagtgagtgagcaaccaacagccccccaagctcagcatgcttagtaaaaggggaaaagaaagaccggagcaacacttacaattatctcctagaaacataacctattacaagccccacttcctggcacgatcacgggttctaggtatagaaatgtcattagcactgtaagagctcacttctatgtaaaaaggaaagagacagtgatttgccatccagaatgagtttgcagttaattcctgtaccagcctttaattttttccttctgtcaggttggtgagaaggactttgttgaagaaatgtggggaaaatgaatggacttgttgatcccaaatacaagttgtttaaagcaagtgtagcgcgccatcactctgatggcctaggagatggtgcttatcagtctttaaggacggaagaaattcagagtaagtcgtctatacaaatgtgaggagacttgtgagactatgccggggcctagcaaacacacagtggatgctcacagtcagctaatggatggatcacagggctcccaatggaggagctagagaaagtacccaaggagctaaagggatctgcaaccctataggtagaacaacaatatgaactaaccagtaccccggagctcttgactctagctgcatatgtatcaaaagatggcctagtcggccatcactggaaagagaggcccattggacacacaaactttatatgccccagtacaggggaatgccagggccaaaaagtgggaatgggtgggtaggagagtgggggggagggtatgggggacttttgggatagcattggaaatgtaattgaggaaaatacgtaataaaaaatattaaaaagaaaaaaaaaaagaaaaaactaccttcctctaaggaaagtttaaaggaaaaaaaaatgtgaggagacaagtcttaattttcagtgttacggaaagaactgcagtctcagtcaggaaatgagagctatgtgcccaatccggtacttggaactgtgggactttaggtgtcagtgtctttactcttttgactcaaagccaaataatagtatcttgattattgcaggaggtaaataatgtaggctgatcatggtatatagagtagtgcagttttccagggctattaaagaccccagaaatcaagcacccgtttccttcccctggtcttcagatactcttcttacctcgcctccaccactactatctagctgctggtgattcaagtccaaagcttccatctcccgcttactaaaatagaatctctgaagatacagccaggggtataagcatcttaaatctgctcgatgattaattttttaaaagttatattgatgtccttttaagttgtttattttgaagccatctgaatatctgtataaaaattttaagccttctgaggttatggacaactaaactataaatctgctatctgattgatttttaagacaattcctggttggcatttgccgctgtcttactggaatggttattattaaacccagcaatcccttggctgctcaataggaataatgaagcagagaagggtgagatgtcaagtgtcaagcaggagctatgcccctgctgggataacacagcagagctaccatggacctccatgggacatacatggtgaagggtaaagggcagctcctttgggcttgcattgccctacatcaggacacagctatacacagcaatactcgtaaaagtaaaggcgggagccaagcattactgaacgtgggcaggggagccagaagctgggatccatgtagtcagcaaactgcttaaagcacaccttggctgatacttgtttttattgcagcatagaataacattttaattatttgggttaagttagttctttctcgaatttataacttttaggaggatgaaggcaaccaacgaaaacatggtaaaatagataaatagatgaaacaccttataagctctgtgtgttaggtgccgtctatccaaattcacttcggttggcaccttgttcatgcactgcatcttcatctgtcactgtacattctgagcactgatatttgcgtagccctggccgggagctagagatccttggattgagctttcccagtgcagagattacaggtgtttggcaagaacctttaaatagtacccatagtttagaatggattccacactgggaaaacacgcagtagaatctaaacactacttatttatttgcttactgctttacttatttgtttctttgtttataaattagcccataagttgcctccttagcgcagcaggtagcccatcagtctcataaatcagcccacaaagtattagagttcactgttttcaaagacaacttgtgattatttcattttctgtttcttttctctcaatcccgacccctccctgtgatcatgtgctaaggccccccccccccccacagccacttcctgtctcacttttgctaccacgcttaccttctttaactccctccccctcttctggtctcctttctaacatcatggcctgtatccactcctacctctcacccacattaataaaaaaaaaaaaaaaaaacacctaaagactcaagagaacacatgaaatttgtctctctgtgtattgcctacctagcttgatataatactcttccaccagatgtctgaaatgctcgtgagttcactactctttacagcagaataaaattctactttgtgtaagtaccacacttccctcacccagtcttctctggatcatcatctggaatggttgcatttccttgctactgtggataatgcagcaatggaactgtaaatgtttctatggtgggatacagtgtggtgtctggagatgctcagggtcgtatagtaggtccagatagatttccatggtggccacattggtttacagtctcagtagtacataaactttcctccttcctccatctccactgtcatctgctgccatttgatgtcttgatcttgccattctgagatcaaactcaaagaagttttaatttgcagtttcccaatgtgcacttccccaatggctagtgatgttgaatgcctaaaaaagaaagaaaatacatattgataagttgtatttcctttttggagaattgtctgctcatgcccatgtattaactggctgtttgattttcttggtgtttaagttttacagttctttgtatattctagatactaactctctgcagcattctgcagactccctgatagctttctttgctcagagaaatgctccaatttcaatgagtccatctgttgattattggggtacactattccataggctacaggagtcctgttcaggaagctcttgccaggagctataacttgaaatgcattccctattgttttcctccgggagtttctgcactttgggttttcaggtgaggtctttaacccacttcacaggtatctttgtgcagggtgagagatgtacttataacttatttcctttgcaggcagaggtcagttttgccagcactgtttcttgatccctttattaaaaattaggtagccatagccgaaagtacagcgtttggcaataacaaattcttgctttccttagcatcgcatgtatcccctccctctgtgtaatgatctggatatttaagctagcatgatttaattgcttaaattttacttgttttgacagaaacagtaaattacaataaattagttggtttgaatatttcactttaatgttcaactcagggcctcttgattgtaacttgtttagacgcttgtaaaatgaaagagaaatacacagataatttaattcattaaggaagactggaagggcttatgtgcctatatagtgtttttctgtagaagctgcaaataccctaacatttggctacacagtcagcaacagttatcaaatcaattaaaacatatctgaaacaaagatggcaataatcctgttttctacttttctttctttgctgagacaaagtctcactgaactcctggccattctctcagttttactctcctgagtgctaagattacagctgtgtgccatcctgtccagcaatgacagtgatctgaggcattgctgccctagtgacagacagtgggtgaatgctaaagttatggctgatttcagtggctcatttagcatttgatttacctgtctatatcagacctttgataatgaaaacacctacggcaacttcactcttccccttaaggaagtaaagcatgcctgccatttaaaaagcataatctttattggaaaatgtcctataatttaaaggagaatgtagcatgaaattcccttagaaacactcagaatgtcatcatcaacttcccccacccccaagactcagggaaagatgcaggaggcagaaggagcgtaagagctcgagggtatggaggatatctaggaaacagggtctccagacacaacagggcagatgcacacgtgaactcacagagactgtcagcacacatagggcctgcacaggttaaagccagatggggcctcagaggtgagaggggattggacacaatctctcattccttttttttttttttaaggtatgttttctaatatttattatatgttaagtacactgtagctgtcttcagacactccagaagagggcatcagatctcattacggatggttgtgagccaccatgtggttgctgggatttgaactcaggacctttggaagagcagtcagtgctcctaacggctgagccatctcaccagtcccacaatctctcattcctaacccagaacctgtctccaaatgacagcttgcttgccaagaagagtcagttttttccagcggagtctcactggtgtacaaatcacacttaaggacaggcaggcctgataccccatagtagactcacacaaaatgaactcaggggtacttctgtaggaatttttgtttgttttatttttattttttctcatatttcttgtttggacacttaagaaacctcactgggcttttgcttgtaacttatggtttttgattttgtggtttttatgggttttgtttgtatgtgttccttgtgccttttctttttgtaaatcctactctcttttatttgcttgtttgtttgagagagagagacaggggggagagaggaggcatggagctggatgggtgaaaggtgggggttatgggaggaaataagggaggaaaagtaatcaatatatcatttgaaaaatttattttcaataaaatagtttttaaaaaaaacactctagaaagtaattttccaactttttaaaagagccgttgtatccactttggtaaatgtacatgtattgtgttaggcccatgtttcctggtcattcggctcttgagatgttccaaactaatcattgcattagagaaactctgtttagtcaccattatatctttgagaaggcgtgaataatgatggcagcctttgagatgaagctacattttctagtgagaaaggccagggaaagatttgtttaaatagttctggtacatcatagatgggggacatttttcaaacaaaatacaaattggaagtcaattaagaaaacccaaacaatctgattctctttactcgggctttcaagtggaagggttagtgagctgcacacagcgtacggggcatcagcgcggtgttatcactacatgggacctctgaaggatgggctgcttcaacagccaccacctttgaaggactttctaatgaacttcagagcatgaaaccttcagagaggagaaagtctctaagttgaatagttttagaggctgagtaagtggatttttcactcaaggatggaactgatacagtttttttaaagatatgtcgtatatgcatgctactatgaacatgtgcatgtgcatatgtatgtgtactacccctcctaggaaaaagagcgtgtctttacttacttagaaaccaggggagtaaacaagactaaacaatgcagcccacttcaaaaacctacaagccagtgtgagcccttgttatctggcaactttgttaaataaaaagagttttattgtttgagatgctaaaggttaaaaccaggtcctctcagatactcagagtctaacaccaaccggtttgcagctcaggtctgttattctgttattcaagaaatgcacaacatctttcttgtccttttgtggagtcacaaacagctgagatgtttaaaatttttattttagagtgtaactgcaagccaggtgtgacacacacctttatacttttaatcccagtatttgggaggcagaagcaggtggatctctgtgaccttgagtccagcctggtctacggagtgagttccaggacagccaaggccacggagagagcccctatctaaaaaaaaaaaaatcaaacaaacaaataaacaaaatctaccctctgtcagaagatagtttctgggagtttaatttctgggagttcgaggctagactgatctacatagtttctgtccagcaaggggtatatagtaagactttgtctcacaaaaaaccaaaccaaaccaaacaaacaacaaaacattgaaatcataagtatgtttatttaagtgagaaagccttttaaagagctcaatagctatagacaaagttaaattgaatttataaagaaagtttctttaataaaaactgggaacaaataatgtgccgcattattataagggtcatgacagcaccctctctgcagacactggctggcagtttgggaattaaagacaagaatatatatatatatatatatatatatatatattcttcatagccattgcaaaggagcttgcttgaacctaagtgaaaagactaaggagaccgctgggtagttgtgacacaggactttgacctcggcactctcgaggcagtggcagaagcaggcagatctctgtgagtttgaggtcagcctggtatataaagcaagattcaggatagccaagggcaagactttaatcccagaactccagaggcggagcagaggtagacagacctctttgagttcaaggctctggccttcagagcaagttccaggccagtcagaggctatacagagaaacgtgtctagaatccctgcccccttcccccaaaacacaaacttggggcatctgttacacagagataaaaatgttaaaaaaaacaacactactccaaagttggttgtgtctttggatttgcagaggtaaaattttgtttatgggagtgttattaatggatttgtgtacttttccttgagggtccagacgtttagacttcagtgtgtgatcttcattacggagaaaaattgggtattattagaaaaagcaaggcacagaacattttctacatagacgcacaccacagcagggaaagccagctgttattctcaaacccaagaagtctttacaaatgggactctctgaaattgtgagtcttgttagtctggactagtacaggaactcctaagccattcaaagtttggggttctcgtatgtttgatggaaactatcaatccctttcttgggaatatgtgttcattcacatagtggccatgtaggcagggcttctgttctgcataggagccaaaggacaagagcttaaacagtagtcccaggtcatggtaggaaaaccggagttcacccgcactgtccctccgtcgtatacctccagattactcaatttagcagacaagctcttttggggctggcgccggcttgcttagtcagccccatctcttgtcctttctgccatacatcccaagtagaaatcacactgcagcactagtaagtgttcccagtgtgcgcacacacgttcatgttcccctggggctctttctgacccatacaccattttactactgtctcatgcatgacacagccacaatgctgcgcggctctcctgcgctcccacctaccagctctgctgctgacattgtactccctgtccagtgaggtcacatgacctgttatcaacagctatgggtgtggataagactcaggtgaaatgttgccgaggactcttcccggcatcagctgtactttcttgaaccacatatgtgaagagatattttttttcctaaagaactttaacacatgcaatattaatagagccatatgccaccactttctcggcatcaagaatcacactgataacactgaaaatatatgcctgtttgaaaagaatcacatgactctgataactatatcccttgtgggaacgtggtcctctgctaacacaaatgcatgtttgattgggcagttgtttcttaggaatcaacagatctatttttttttttatgacttagaggggaaaatattaagttaaattttaggtacaatttttaaaaacagtaacagtatttatacatattaaaatgagagttcatagcgcttaaatagttccaagtatttgtgttaacaatgatactgtcatctaagcataatgaataaaaatggtgttgcagaggtaacttagaaatatataacccaccctgaacacacacacacacacacacacacacacacacacacacacacacacacagagctaactctaaaaagaacatatctttataaaagggaacagaataagggtatcccaaattcatacaatttttgtattttcaaaacttcatatttattatatgttgaaatattgtcacagcttaaatgttctcttccccccccctccccccaggccaaatttacggatgactgtaagttcagggagagattccaagaaaacagctataatacctatgcgtccgcgatccacagaactgaaaagacaggccgagagtggtacgtggccctgaacaagagagggaaagccaagagaggctgcagcccacgggtcaaaccccaacacgtctccacccacttcctacccaggttcaagcagtccgagcaaccggaactttccttcaccgtcactgttccagaaaagaaaaagccaccggtgaaaccaaaggtgcccctgtcgcagcctcgcagaagtcccagcccagtgaagtacagactgaagtttcgctttggatgatgctcgtccatcctggccttgtgggaaacaactctctatacaggcgtcatcggagccctgaaggaaactcggatacagcatccctctgctgtgcctacacgtgtggaagtcaggtcattttgtttcgctttgactggaactaaactgctttctaaaatttaagtcgaaacagaagtgggattctctgtagcgatccagggagctcatctcttcagatcaccgaggatataaaggcttcgtgatttgaggatggttagcattctgcgttttcagaccagtttgatagcctggaactatgtacttttctcatttttacagatcaaccggaaagaacatacatgatacatgtttatttttgttttccaaagaatattttgatgcagataaaatattttataaacttttgtttttttaaggtacctcagcattgagcatattttcttacttttattattttaattaacgtgacacaagcagttggtttattgctgttcatggattataaacattttaatagtttgtgtggtaggatctggatctcctttgcgtttttctctctactacagcatcgtttactttattttagctatacctcaagtcgtataaatttagttctacattttaaaaaaaatttttaaatgtgctttcgaagccccaaaaggctcagcttggaggtgtgcattgtgtatgaagttatggcattatgtggaatctggccatattagtggctgggctcaatgatcagaaggaggaaaatatgaggacgttttgatggatttaaaggctttatgtaaagaaaaggacagaggccaccgcacactaagtgtgcagcgtccacagagatttaactctgtcttttgcttcttctccttttatctgccccctgccctcattcaagaccagctgaaggaataagttttattctgtccaccaagcatacactaggaaactggagtgcttaaaaatacttctataactccctgttatccttactgtatggacccacagggagtaactaatcagggtgtgtgtgtgtgtgtgtgtgtgtgtgtttgtgtgtgtgtgtgtgtgtgtgtgtgtgtgtgtgtgtgtagctgaaggagatgaatcactaaccaagttttcatgtcaagtctcatggtcaaaaatacttctactattcagtcaaataccctttgagctttctaccctaaaggtaatgactggaatgagtgcatctgctctgctctaagaaaacctggtgcaccctagaagcttctgcccttgcgacccaggagcttaattcgggaatgtgatgagctgaaaatgacacttcattctcaacccaaattccaaaccctcaacagaaaccacagacggtttagcttacaaagagttacaaaatgtattttcttggataatcctttttatggagatctatgaagtataagtgttcaccttatattcctaaatgctgcaataaagaggcgtagatgaccata

SEQ ID NO: 35 - DNA, 38817 bp, Homo sapiens
agcgccatgcgcagactcagttcctggagaaagatggcgacagccgagaagcagaaacacgacgggcgggtgaagatcggccactacattctgggtgacacgctgggggtcggcaccttcggcaaagtgaagggtgagaaccccgcgggactaggcttggccccagctgaggagccgcacgacttccgctttccgcacctcttcatcctcccccgcccgctgcgtcccttctttccagggctgggcagcccctgtcccggatcctgcgggagctctccccagccgccgcggggctgcggcgcggccagcacaggccgggtgggggtgggggtggggtaggggccagtcgccatggcgacggcgccgcggcctgaggggctggtaggtacgaggggctgggatgcgaaggtgcaaactttcccaggtggggcaggcgggcggcgcggcgcgctctgggtgctgggagggggcgccgggcgcgatccccggggaggcggcatcttgtgcgcccgggttgtgctcccttggctcagggccagcccatcgcttccttggcggtccttggcgttgtcggtatttccgtcctctgtaggaggctgtcgatttaccggcccctgctgtttcccgagtgcgaaatgtgtttccgcagaagtaaggtttctttgtgggtagccgacatcattttttttaaagaccatgtcgtcggaaaggatcactggtttccttcggagcagttaatgagtataaactggttcagtatttgcgatgcatggtttacgttctgaatgagactgtgcctttagtgtttccgaattaacaggagtttctccgtgcgaaacttcgttgttagttcagatgttgcctccagatagtatttattactttattagtacagttcatttccacttattttcaaaggttatttgtattctaataaactctttaagtgcacatcattcgaacttttgttttaagaaaggtgtattgggtgcattgtacagcattcgggtgacgggtacactaaaagcccagacttcaccactatgcagttcatctatgtaaccaaaagccacttgtacccctaaagctattgaaattaaaagaaaagtgtggactctttcaaaacactattctggaaataaacttgctctacagtccaccaattctggcaaaaaaacgtttaattgcaagttttgtaaggcatgattttttttttctttaacatatttgactttgttataagggatgcagagaaaggaagtttggaactgataaaaataattcatgcattggctttggataaataatagactgacttgcatatactaagttcttggtaaatatttgacttgaaagaaaaaaagtttgccaaagtctgtacggtaactcaactgagccttactcttccagagctaaataaacagtttctgattttatttagggttagaagagaagaacgcttccttctcttgccattttctgagtcatagaattggaaaattgttgtatatcccacagggaagcaactgcctgaaccttcttatgaaaatctgcaaggcggacaatgtcaggaggaagtaagaagcaaatgccagaattgggtaataacagctattaggacaggtccatataaggccagtaagatgtttctgtgccatggaagttttaactttatctttggctatgatatttcttgttagcaattacaaactgctttttagtttacaagtgtttgtaaaaaaaaaaatgttcatttttgcccccatcccttcccagagttctgcctggattagggtgttcatcattcccctaatatagacttgaatgcttgaataaagtcaggtctatttttttttcttttttcttttttcttttcccgagatggggtcttgctctgttgcccaggctggagtgccgtgtggtgtgatcttggctcattgcaacctccgcttcctgggttcaagcagttctcctgcctcagcctcctgagtagctggaattacaggcgcccaccaccacacccggctaatttcatatttttagtagagatggggtttcaccatgttggcccggctggtctcgaactcctgacctcaggtgatctacccacctcagcctcccaaagtgctgggattacaggcgtgagccactgtgcccggccaggtctgttttcgtatttgctaagtggtttttggcatggcaggtagtaaagcaggaagagatttttcatcttctggatttgatctgtgatatggctgtgacacgaatgtctccagtgactttgctgtttcttaaccttcacttccccacccacactaacttctcttggagtaccatattctgttaaagtcaacaaactctccaaatgtacaaaggccaatattagtccaaggatcataggtttcatagatatggttaaatttgttcatgatcacatttgttgatgttgatcagaatctttaacctgttcattttttaagttaacagttgggatgctttttgccacaagtaatagaaaatctagctttgcctagtaaagaacttatctgtggttctctttccacagataagtccttccagcagggaaggccagcatatctcttatgagtctcattggctcatccagtccctctggctaggaatgccatgtgccagttggcttatgcttgtattcctaagcaggcattagcaagggggatggcattgcccttggaggagtatgacccaccctttgatgtgtgtgtgcaacagaggtgggtgggtgggagacatcttttttttaaaatttgttttattttttaaatttttctttaagttattggggtacagatggtatttggttgcatgagtaaattctttagtggtgatttgtgagattttggtgcacccatcacctgagcagtatacattgcatcatatttgtagtcttttatccctcacccctctcccactcttccccctcaagtccccatagtccactgtatcattcttatgcctttgcgtcctcatagcttagctcccacatatcagtgattagaacatactgtgttggttttccattcctgagttacttcacttagaataatagtctccactcttatccaagtcactgcaaatgctgttaattcattcctttttatggctgtgtagtattccattttgtgtgtgtgtgtgtgtgtgtgtgtgtatatatatgtatacaccacagtttctttatccatacattgagtgatgggcatttggattggttccacgattttgcaattgtgaattgtgctgctataaacatgcatgtgcaagtatctttttcgaataatgacttcttttcagaagagattgctggatcaaatggtagttctacttttagttctttaaggaatatctacactgttttccatagcagctgtgctagtttacattcccaccagcagtgtagaagtgttccctgttcacccttttcaacaaattgtgctgggataattggccagccacatgtaggagaatgaaactggattctcatctctcaaccttatataaaaatcaactcaagatggattaaggacttaaacctaagacctgaaactataaaaattctagaagataacattggaaaaacccttctagacattggcttaggcaaggatttaatgactaagaacccaaaagcaaatgcaataaaaacaaagataaatagatgggacctaattaaattgaagagcttttgcacaggaaaaggaacagcagagtaaacagacaacccacacagtgggagaaaatcttcctaatcaatacatctgaaaaagtactaatatccagaatccacaatgaactcaaacaaataagtaagaaaaaacaaatagtcccatcaaaaagtgggctaaggatatgaatagacagttctcaaaagaagatatacaaatggccagcaaacatgaaaaaatgctcagcatccctaatgatcagggaaatgcaaatcagaaccacaatgtgataccacctcactcctgcaagaatggccatcatcaaaaaatcaaaaagcagtagatagattttagtgtgcatgtggtgaacagggaacacttttttttttttttggagacagttttgctcttgtcacccaggctggagtgcattggcgcaatctcagctcattgcaacctctgcctcccaggttcaagtgattcttctgcctcaacttccctagtagctgggattacagacgtgtgccaccacgtcctgctaatttttgtatttttagtagagatggggtttcatcatgttggccaggctggtcttgaactcctgacctcaggtgatcccacccgcctcggcctcccaaagtgctgggattacaggcctgaaccaccgtgctgggctgggagacatcttctaagtacttggatagtgtggggggacagggtagacacctacacataaatggatgttgttaggagagagaaagggggacatggatactcagtgaacacacagaaatggccactattgtggtgatgttggtaattaaacaccaacagccttaattatgcaagaattcttgcaaataatagggttaaccatatgtttagacaatttggagtaaagaaagctttaaaaattacttatacatattggtaaatttaacatgaagagggatctaataaaatatatgatattgatatgcagaaaaagtctaagtatgatattccatgcttataggaaatttaattttgcggggagagtaggctggaagttcggagtgattgtttcctgttacaggccaaaaaatttgtttggttacttagtggtagcattttgagaggaaagtttacagaaaactagggttattttgtgattatgcttgaattgtctttattgtttccaaggcatcttttttttttccttctagttatcaagatgttaggttctgtgcccttgtgggccttccctctgcccaaaaaaagcatggatgagcagagtaatatcattaaaatggcagtctttgttagtttttctagagaagatggtctctttggtaggctgggtgtatcttcggcaaatgagttatttatacatataaactattaagttggcaagtatttcttttttttctttttctttttttttttttgagatggagttccactcttgtcgcccaggctggagtgcaatggtgcgatctcagctcactgcaacttccacctcccgggttcaagcgattctccagcctcagcctcccaagtggctgggattataggcgcccaccactacgcccagctattttttttttgtatttttagtagagatggggtttcaccacgtcggccaggttagtctcgaactcctgacctcaggtgatccacccacctcagcctcccacagtgctgggattacaggcatgagccaccatgcttggcctaagttcgtaagtatttctgtgtaaaactgcaatttcagctacataggtactttgtgaatgaatcatagtagaagttatttaaaaattcctttaagtaaaaattataaacatgaactagagctatatatatcagtgtgaatgaatcttaaaaatataaggttagacctcgaaagcaagttgtataagaatatgtatagtttgctgttatttatataaattttagaaacctacagaaccactcatacaatgctggtagagtataaattggtatcctacctctacatgagagagtgacagcatttattaaaattaacctaacaattcaacttctaggaattattttatagatgtactcgtgtatgaaataatgggttattcgctgccatattgttgtaaatattaatacaaaactttcgaagtaacctttctaatagtaatagttatggtttatccatatagtgaaataccttgcaaacattaaggaagaaaaagggaggaactttgtatattttagagaacaatttccaaggtgtatttttaagaggaaaaagtagaacagtgtgttcaatatgcctaccacttatgtataaaaggcaggggcaaatctgtatcttaaatgtgactgcttttatatatagagtatgtctctttaaagatacacacaagactggttacgttagttgctcagtataggggactaggtaaaggaggacattgtgttgcaccatagatgcttttgtacttttgaactgtgtgtatagtgcaggtattgtgttatcaaaatatatgcaatgacatttgtaaaaataaatatgaaaaataatgttactatattttttatggattcctacccatgtaaaaatatttaaacgtgggaaacacaaacaccaaattcaggatagtggttacttctgaggacagatgaaggataagggaatctgggaggagtcatgcagggcttgagttgtatttgtaatgttttattgcttaagctgatggtggctcatgggtatttggaatgcccttggtgtgcttgaaatgtttgtttgctttcttaaattacgatctatagcttttaaagcccacccttccccaggattaagctatttccttaacacgtttttattctttcaattttaaagtgggaatgaaatggttaggtgtctagaatatctttagtagatatttctatctttgctgcttctctgtcctattaaaatcctctgtttcaaagtatgatcttgtttcccttcaggattatatatctaattagaagagcatttgttacaatgttatgcagttagacaaagttccctttagatagcaatagcatggttgttagctaatatttagttgactaatctgctattcttgtgagggggacattgtgaatgctggtaatatttgctctgagtaatgtgcaagtcttccgtggccaaaatatctgtcttccgtttcatttaaaagcaaaaccttagcactattctaaaaactgacagtctgaagaataaagtttgaattttgaaaaaggggggaatcccttagtagtgcatatgcctgacagagtccatttactacattcattgattgactatggaacagcatttagtttggctacaactgagtttactcactggggagaatatttagcctggttttgagaaaacagtttagtttctgataccatgccaagccctttgtccctctcactgcacagtgatggtggggagagtggataggtcaaaagacttgggagtcggaagacctgtcccaacttgatcacaatagctttacttccacaacttacagaatctcttagagcctcagtttctttatctgtaaaagacaatacctccatcataggtttatgctcaaatgtgataatgtgagtgtctcctaagctattagatgccatattttaaaaagtattatgctactgaaggccgggtgtggtggctcacgcctgtaatcccagcacttttgggaggctaaggcgggcagatcacgagctcaagatattgagaccatcctggccaacatggtgaaaccccatctctactaaaaatacaaaaatcagctgggtgtggtggcatgcgcctgttgtcccagctactcgggaggctgaggcaggagaattgcttgaaccccggaggcagaggttgcagtgagccgagattgtgccactgcactccagcctggcgacagagcgaggctccatctcaacaacaacaacaacaacaaaaaaaaaaaaaaagaaagagttgactcctgatagactatgaaggctgggatacaaattcaaaaagcggaaaaccacacgagctggaacactataggctgggagcaaaaagccctatcctgctaaataactcccactgctgtcactgtgtgagggtataaggagcagttgatactcataagttaacatttgtttggttcccagtcttcatgtacatgtgttccatttaagaagtcatgatcatgtgtagtacaattagaaaacctgttttcaaaaaatattacttctgttaacttgttaattttaatggtgaatatcatagtttagaaaatccaccctccttttcttgtcagggactgagtgtgtggtcctgctcctgttatgtatggaggcaaagggaaagggctccggccccctcaaaatcatgtctttggtgccagccggttctgttctcagtcacctggatactgaactttcctgagcagggcagaactgagatccagtgggcttctccccaggatgcttacgctttttcatttgatttcaggtctcctctttcgcttcctattgcaaccaatgaaggccattcctaccataagtaaataaaaaagaaaatctatctttaataaataacaattgtatatatttatggggcacaatgtgatgttttgatacatgtatacattctgcactgatcaaatcaggccaagtagtatatccatctcctcaaatatttatcatttctttgtggtgagaacatttaaagttcccttttttaactcttttgaaaaattaatatatttactgtaatcatgatgctatgcaatacaacaccaggatcctgttcctcctgactgtaattttatgtagccattgaccaatatcttccttttcccctccagccccacttaccccagctactggtaatcaccattctactctctacttctgtgagtttgacttttttagattccaaatataagtgagtctcagacacctctgacatactgatttcaattcctttggatatatactcagtaatgggattgctggatcatatagtaattctatttttagttttgtgaggaacctctacactgttttacaaaatggctgtatttatagtttcaccagcagtgtataagtgttccatttctctgtgaccttgctaacacttatctttcacctttttgataatagccagtctaacaggtgtgaggtgataccttattgtggctttaatttgcatttctcttatgattagagatgttcagcattctttcatctatctgttggccatttgtttgtctttttttttatttttatttttgagacagtgtctcactctgttgcccaggctggagtgcagtggcatgatcatggctcactgcagccttgacctcctgggctcaagcgatcctcccacctctgcctcccaagtagctgggactacaggcatacaccaccacgcctggctaatttatgtatgttttatagagacaaggtctcactgtgttgcttagactggtcttgtattcttgggctcaagtgatccacccgcgtcggcctcccaaagtgctgagattacaggcatgagccaccatgcctggccggatattagctatatatctgatgcatgatttgtaaatacgttttctcagtctttgggttgtctcttcactctatttgtttttgcttgtttgtttgtttttttgagatgcagtctccctctgtcacccaggctggagtgcaatggcgtgatcttggctcactgcagcgtccgcctcccgggttcaagcgattcttttgcctcagcctcatgagtagctgggactacaggtgtgcaccactacgctcagctaattttgtatttttagtagagatagggcttcaccatgttggtcaggctggtctcgaactcctgaccttgtgatccgcctgcctcggcctgccaaagtgttgggattacgcgtctggcctgtttgtttgttttttgctgttcagaagctttttagtttgatgtcatcccatttgtttattattgcttttgttgcctgtgcattaggggatcatatacaagaaatgattgcccaaacctgtgtcatggagcttctcgcctaagttttcttctagtagatttgtaatttcaggtcctaaatttaatccattttaagttgatacttgttaaggggtgagataagggtccatttccattcttctgtatgtggctatccagttttccaaatgacattattgaagagactgtcctttccacattgtgtagtcttggcacctttgtcaaaaatccattgattatagatatatgcatttattctgggctatccatcctattccattggtggacatgtctgtttttatgtcagtgccgtgctgttttaattactataggtttgtaatatattttcaaacatggtagtgtgatgcctccagctttgttctctttggacctaaagtctattttgtctgaaataaatatagctatctctgttctctttttgtttgcatttgtatggaatatctttttcagtcccttcattttcagtctatgagtgtcctttatggtgaagtgagtctctttataggcagcgcagagttggatcttgttttttatccatttagccactctatgcctgttgtttggagaatttaatctgtttacattggaagtaattattgataggtaaggacttagtagtgccattttgttaattgttttctagtgtttctgtagaacctttgtccctttctctattactttccccctttgtggctcgattgctttctgtagtggtccactttggattttttctttttatcttttgcaaaagcaaaggcttttgctttgtagttaccctgtggcttacacaaaacatcttataactggtatataagctgataacaagttaactttgatcacatacacacattctacatttttactccccctcttccatgttttatgttcatgatgtcacgatatacatttaaaaaataatttgtatctttaacaaattattgtagctttattattattattattattattattattttgagatggagtttcactcttgttgccgggactggagtgcagtggcgtgatcttggctcaccccaacctccacctcctgggttcaagctattctcctgcctcagcctcgtgagtagctgggattacaggcatgcgccaccacgcccggctaattttgtatttttagtagagacggggtttctccatgttggtcaggctggtctcaaactcccaacctcaggtgatatgcccgcttcggcctcccaaagtgctaggattacaggtgtgagccaccgcgcctggctagctttaactatttttaatagttttatcttttaacctttatactagatatataattcatttacttaccaccattacagtattagtgtgttttggggttgacagtatacttactttttccagtgagttttatacttttcatgttttcctgtcactcattagtgtcttctttattcagcttgaagaagtttctttaccatttctttttctgtttctttttgtttgtttgagacaaagtctcactttgttgcctaggccagagtgcagtggtgagatcttggctcactgcaacctctgcctgctctgttcaagtgatccttccactcagcctcccaagtagctaggattacaggcgtgcaccaccactggcagcttttttttttttttttttttttttttgtatttttagtagagacagggtttcaccatgttggccaggccagttttgaactcctaacctcaagtgctctgcctgcctcggcctcccaaggtgctgggattacaggcgtgagccaccatgcctgaccactgtttttcattctttatccttttttcttcttcagattgtatgatttccagtggcctgtcttctaattactaatcttttcttctgcttgatgtagcctgtggttgaacccctttattgaatttttcagttcagttatactattcctcagctctatgattactgtttggtacttctttagaaaatccacttttcaactgataaactaactatatccatttctagggctgccgtaacaatgccacagactcaatgacttacagcaacagaaaattattctttgccagtactggaggtgagaaatttgaaatcaaagggccatcagggccatgtttcttctgaaggctctagtggagaatctgttccttgcctcttccagctgctgctgcttttttttttttttttgagacggagtctcactctgtcacccagaatagagtgcagtggcatgatctcagctcactgcaacctccgcctcctgggttcaagtgattctcctgcctcagtctctcaagtagctgggactataggtgtgttccaccactcctggctaatttttctatttttagtagagatggagtttcgccatgttggccaggctggtctcgaactcctgacctcaggtgatctccccgcctcggcctcccaaagtgctgggattacaggcgtgagccaccgtgcccagccctctttcaccttcttgtggctcctgatgttccttggtttgtgatagcataactccagtctctgcctctgtcttcaaatggctgcgctcgcttgctctctctctctctctctctctctctctctctctctctctgtgtgtgtgtgtgtgtgctctcctcttcttgtaaggataccaggcattagatatagggctcaccctaaatccagtaagatttcatcttcaaatccttcactagtcacgtctgaaaagatcctatttccaaataagataacaatcagagattctgggttgacatagattttgtggggacgttattcacttcactacacttgtttttatattttgtatacttttagttttatgctttctttcttagtttttgagtaacttttaaattggtttgatagaatgtattagtaaaatgtctgtgggctgggcgtggttggttaatgcctgtaatcccagcactttgggaggccgagggggggcggatcacctgcggtcaggagttcaagaccagcctgaccaacatggtgaaaccccatctctactaaacatacaaaaattagccgggcgaggtggtaggtgcctgtaatcccagctacttgggaggctgaggtaggagaatcgcttgaacccaggaggcggaggttgcagtgagctgagatcatgccattgcactccagcctgggcaacaagagcaaaactccgtctcaaaaataaaaaataaataaaataaaataaaatgtctgtggaatcctaagacattgaaattgatatgaggcaggttttcagtacactggattcatgttctgatacaggaaggaggtcatagtagcagtgcctggcacatagtaggtgctggtactcaaatatttcttgaatgaatgaatttgtatgattgaatgcatttctggataattcttattactacaaggaattcagtctattcttttcaaaactgtatatacattaagaatttctctgatatgtttaacttccatttatgttttattaaaaggatgtgtatttttacatgtcttctgaggattatctttttaaaaaaatcaaatttcacttaaccatgttcggaaaaagcataactttaagagtctgacctgggttgaagttttggcttttccactcattagctgtgtaactttgggcaagttatttcatctttctgtgcctcagtttcctgtaaaatgttgctaataatgccaagtcttccaggttggtgagagtgtgtcagtatgtttgggtacaaagtgagtatgctgcaaatattaactagtaagttgtatactttaattatgtattgtaaaggaactagatttatgttgtaaaaaattgtttttgttaaaaaaagagcccttgtttattaaaactcacatcaaattaagctgcttttttcctctgtgttcttctgtgaccaaacaagtgttcctgtagtaggtgaaatcactgtcaaggattggtgttatgtgtatatatgtctgatagtaatctgttgaacattaaccaaagtcaggaaatgagttgaactttggaaggtagaaatctgaggattggtggtagtggtggtggggtaggagtggtggagcgggttggagggattgaagtatatgggaatgggagctagatacattaaaatgacagctattatttatttagcacttatgtacctggataaaggaatgctattgcatctacatggataggtatcaccaatcagagctgagataaaactggctattcagagattaaaacaaataattcagggctgattagatacagatgggggaacaggtctgggagcagtggaaaataaataaccctaaataataaaggctaccatttatttatcaatcacttgctatatgccaggcattgtggaaagtgctttacaaacactattccatgtatctgttatagtcacccttatggagtatgtggtattcttattttaaagatgagtaaatagaaggttgtagtttctttaacttgcccaagtcaaacatctagtaagtaccttcaaacaggaataaaaccgaggtctgtgcgactataaaatctatgctttgtatacatactgctttcacatgtgcaattggaattaggggttcaaccctattcaactctacttccaaaaaaggtgaatctgctaatactacttccaattgtttttttcccctttggaaatttttttttttgagatggagtctcgctctgttgcccaggctggagtgcagtggcatgatctccgctcactgtaacctccgcctctcgggttcaagcgattctcctgcctcagcctcctaagtagctgggattacaggtgcgtgccaacacgcctggttaattttttttgtatttttagtagagatggggtttcagcatgttggccaaactggtctcgaactcctgaccttgtgatccacccacctcgtcctccaaagtgctgggattacaggcttgagccaccgcactcggccttggaaattttttttctaactgataagaatacaaagcagcaagtaaaattcaaaaaggatcacagtggaataacttttcattttagcatattaacatttttatatgatttttttgtgtagctaaaaaatgtaaaatgcatatataatttttttttatgtttgtaagaacattttctatagttttcctatgagagtctgttaggttggaataacaatgtattaaactgttctctgaaattggtcagccttttgttcttacataatacactgtaatgaacatatttatgcacatttttttcatcaacttttaaatcaaattcttagaaggaaaactacagattaaaaaagaaaagatcctgatcatgtaatttgtgtgtgtgtttatgaatttgaatgatctcttggcatggctgtcagggcactgcctctattcctgccactgtgatacgatcatacttttgtgatttcttctattacttcaaaagggaagaagttataccaccatactttaaaacaattaatttataatttgatgaaatgctcaagtattagaaaaaagttttatggtatatcttgattggttatggattttgttctgcttattatgccttcttttgggtggttggggggcttctgttatttacaggtggattaatattctgctccgtattactcatgagttaaattatactcaattccctattccgtagttaccaccttccctcctatttttgctaatttcctcctcattttttgttgtgtgttctataaaatttcccatcacattattattgctactacctactgttttctaaatgattttaattgtattgtaaaattcttcttgctctgctctaatttcatacctcctatattttcttatcactctgaaaatagttaataaattttgctaatacaatcatgcatttcatggatgagtttaatgtctattcatttttttgttttattcttttgtattataagactttttgctttttctcactttactgttatttttgtcatcattacaggccgggaaggtcccatagcccaggttgcttttggtcaatactgttttccccagcagcattaactggcatgtaggagatgctcagtacataatgccaaaataatgaatttgagagaatgctttgaattcctattccagttccttattaaatgacaggatatatgtccagagttttggataagctccagtcatttcttaaagttaattggggttgaagttcagttgagcagggtatcataggagtttggttggtttgtgatggtttgggagttcaggcccaaattggattctgtcttagtattctttccaggtcttgagtccaccagtattatccagtattgtggctatttcccagtcctgtttcagctgagcagctgtcaagagaaagtctgtgccaagccagagcttggagattcttggaggatgtgtttagcaccatgcttaggtttcaacatacttgttctaagaaaaaagatacttcctgaagcaagctttaacagtcaagttggctgctcttaatcacatctaattagtactggagattggagaaagccttattagaaattagaatgtgcttcatttccacagttgatttcagctgtgattatagggttgccttccttctttctcttatacatttcatactacacccccatcctcctaatatagttatatcgtacttttaataaaacctatatttggttttttcataattgtggctgtgtaaatactatttgctaagtcagtatctatgactatgttttatttcttacagaactttaattttactggcattcatgaattatctcatttttttcatttgtttaatttttttacctaaagcttaatttcttacatcttccagtgcctttgtaaaatccctcagaaataactatcttggattctctgtcacattcctgtctggatttgttgccttctaggccttctccatatgttactgtgactttgcttcaccattttgagattctcttagtttttctcctatattggatcccttctttgctggattccatgccatctttcttgggtttcttcctgattttgatggaatatatattctccagtaggttcctgagaaagggtgcacaaaggttaaatttttggagacttagcctcatgactgtctaaattctactggtgatcatatccccaaaagaccaaatccctaatgccataatcccaaatgttgaaatactgaaagatcaaaatctctaaaaatcagaatccctaaattctaaaaatctcacacatctgaaatcctgaaaatcagaatcatgaaagattaaaatcccaaatgttgaaatgctgaaagccaacacctggggtagaaattagtgcacattcggttgtatgaaagatagttgcatcattttacttgcatcatattaggtggaaccgattgcctttttattgtatttatttggaaattaagtatggtttaaggagatggtttatgggtgccaaattgacgaggggtggattcatggatttaattttaggtgtcaacttgactggattaagaaatacctagaaacttgttaaagcattattttgggtttgtctgtgaggagattagtatgtgagtctgagtggactaggtggggaagatctgccctcaatagcggtggccaccattaaatctgctgggggcccagagaaaacaaattgttgcctttctgagagctggaacggacttttcttctgctgaattgaacatcagaactccaggcttgttggcatttggactctaggacatacaccagcagccccctgggtcctgggctttcagcctcagactgagacctggtttggcttggttctgaggtctttggactgagccaagctaccagcatgccagggtctccagcttgaaaatgacctgtcctggaacttatcagccactataatcgcatgagccaattcccctaataaatcgtctctcatatatctatgtatatatatatcttattggttatgtctctcaagaatgctgtctgtcgagaattatgtctgtcgagaatgctgactaatacggatttggtattgagaaagccaaatatcattccttcttactgtattccttacagcacagtggaagagacctgtgaaattgttcccttgcaaaaaggctgtgataaattaagtataccaggctacttaatgctgaaagagaaaagtttaaaagctaattattattggtgttgtgaagacagaaaatcacttaattgcaatggccaagcaataaccagatttctaaatggtcagcatatacttacaaaatatttagaccacaaccgctctagtctaaacacaagtgaatgttttgaagatcatagaagtgaatatgcaggtgaaaaatataagaaagctcccctgccaaattattcaatcaggtatgacttctgccctttcacacatagtgccaatttgctatgctatgtattttatctttgcatcatttctaatactgcaggtataaattctgtaaaggcttttagagaattctaattcattttatgcactttttttttgcatatttgactccatgaaagtgcattatcacaatgtgacgtaatgtgtaagcattgtgcatgtacataaaaatgttgaaacttgctcagtaaatgaagagatgtccgttttgttcatctgtatttgtgaaagataaaatttctcaagatcttggctctttgggtgactctattgcagtttttgtgcaaacggtagtgacccattgcagtttttgatcgatcttgtcagaagattcaggttgtctggtatttcagatgaccgcagttatgaatctgggtgcacctgattaccaaccatagtgatacgtgtttatccattttgctttttaatctatttcttcatgaatacattttctctgttcctattatacccatgcaatggttgttagtatacctgagtatttatgcttgcaaaaatatgttattagtgcctattttattgtgtaaaggggcctatgaactgttccgttgtgtttttatgtttctcaaataaatcttttaaaaatggaaataagtgtcttttagagaactttttacaaattatttttccagaattcaattttttggattttgttcttttgggattgtgatttttggaattttagattttagggattttgatcttttgggatttcaacatttgggattatggcatttgggattgtgtcttttgggattatgtcctaaacccaaattctgtcaccaccgactgtctagtgataacatttaaaatggaaagataaaatgacttgattttttttttccctttatttttaactgcatttaaaaaaatagaggctgggcatggtggctcacacctataatcctagcactttgggaagttgaggctggtggattgcttgaactgaggagtttgagaccatcctggtcaatatggtaaaacatcatttctacagaaaaatacaaaaaaattatctgggtgtggtggggcctgcctgtagtcccagctacttgggaggctgagatgggaggatcacctgatcacctgagcctggggaggttaacgctgcagtgagctctgattgtgacacggcactccaccctgggtgatagagtgacaccctgtctcaaaaaaaaaaaaaaaaaaaaaaaaattaaaaaacaggaaaaaaaatttaaaacacagagaaaccaaaaaaactagaaaccacatgcacatgaaccagaatttcaaaggtataagaggttatggatggggaaatgtatctatgacatgagagagtcttttgggatgatggaactgttctgtatctgactatataatgctggttacaccaatttctatatgttttaatatccatataaatgatactaaaagaaaaattttagtctgtgtgtatgataggttaaaaggtgaaaaattaaaagaatttaaaaatacgaaaaggtatacagcaaaaaagtctccttcccctcttcctttagtcttctagctttctcttctggaagaaaccactgttaccaatttcttatgtattctcctatgtaatcactcttaaacatctgaacatttgggatgaatctggcaaaagagaaaataacttatatttgcttagctattttctgaggatgctagatgactactcttataatatgtctaaatatattattatttttattttgttgaggcagagtctcaatcatcaccccagactggagtgcagtggtgcaatctgggctcactgcaacctctgcctcccaggttcaagtgattctcctgcttcacctcccaagtagctgggattacaggcatgtgccaccactgcacccagctaatttttgtatttgtttgtttgtttgagacagagttttgctcttgttgcccaagctggagtgcagtggtgtgatctcggctcactgcaacctccgcctcctgggttcaagcgattctcctgcctcagcctcccgagtagctgggattacagctgtgtaccagcacgcctcgccaattttttgtatttttagtagaaacggggtttcaccatgttagccgggctggtctcgaactcctgatctcaggtgatctgcccgcctcggcctcccaaagtgctgggattacaggcatgagccaccgctcccggccattaatttttgtattttttagtagagatggggttttgccatgttggccagattggtttcgaactcctgacctcaagtgatctactcgcctcggcctcccaaagtgctgggattacaggcatgagccactgcaccgggccagaatatgtgtaaatatattattaatcatacttagtactaatttattaaattacttcttttacagttggcaaacatgaattgactgggcataaagtagctgtgaagatactcaatcgacagaagattcggagccttgatgtggtaggaaaaatccgcagagaaattcagaacctcaagcttttcaggcatcctcatataattaaactgtaagctctgtttatattaaatatagtccagtcatcttttcatcttttttgttaacctacttaatgtgacaagtgagaaaaatgactgacacttctttttgtttcctaagggttttgaaaagtttcttcctaggctgtgtgcggtggctcacacctgtaattccagtactttgggaggctgaggcaggcggatcacctgaggtcaggagttcgagaccagcctggccaacatggtgaaaccctgtctccagtaaaaatacaaaaattagctgggcatggtggtgggcgcctgtaataccagctactcgggaggctaaggcaggagaatggcttgaacctgggaggcggaggttgcagtgagctgagatcgtgccattgcactccagcttgggcaacaaaagcgaaactctgtcccaaaaaaaaataaaagtttcttcccattcatgtatttttctaaccccattgatggtcatttaagcctgtgttcatgttttgcccttgtgcttatcagctgttatcttctcattctttcctgtctcctggaaagatgctcttctggtaatgtttggtgccccattgctgtaaaaccaacagtgatctgctagtaaaaactcttgacctccaaatgcccacatgatgtcagttagcctcactagtgagaatgcggtagtagaaagggtttttccccatcctgcttatacctgaacatatagataacaaaatttcaggaatccaaggtttcaaaagggcagtaatcttactgttgttttacagttgccagttatagagtctacaaataactatttcctgctcagcttctgctttgttatgcaggcaataacttaaagatgcttaggtttttctcctgaactggctgactcaaacttgtttcactcttacctcttctcatttgttgagtgctaggttttaaataccatccatatgctgaccacccctaaatgtacatctcttgctttaagatctcttcttacaccagacttatttgctcactgctgactttacatttccatttggatgttcgcaagacatttaaaactcaacccggcccaaaatgaactctttattactctcccaaacctgctcttcccacagttttcaccatcttggctaacagccaatgacccagggctaaaacttaggaaccatttttaacttccctgtttctttcactttctaccatgcatttcatttcttccttcacaatcaagctaggatttgattgcttctcagttcctttattgctgtcaacctggtctcagccaccatctgtctcatgaaatcctgaagtaacctcctgtggctacctttactgttgacagttaattcttcacattgctgccatagttttacttttaatatgccagatcacatgactgcttaaaacgtacgatagcttttcatcttccttggagtaaaagccaaagccttatcatggcttgtaaaattctgtgtcttctggcctgcagttaacacctttgactctacatcctatttctctctaatattcctcgaacatgccaagcaggcttctacttggggacctttgcagttgctattccctctcccagtttcgctttcctcctagataattacataatttgttcccattcttcttttaggctcagctcaaatgttactttattagaggctttcctttagcactctgtatacaaagattccccttcatttgctttatttttcttcatagcatgttccaccacctgagatattgcttatttatttagtgtctgtttcctggttcctggaacatgaactccatgagagcagagaatttttgtttcctgcagtttttctagctcctagcctagtacctggtatactataggtgcttagtaaatatttattgaatgaatgaatatatgtgttttaatatttgtagacaatgttttctctcaccaggtaccaggtcatcagtacaccatctgatattttcatggtgatggaatatgtctcaggaggagagctatttgattatatctgtaagaatggaagggtaagctgttctgctttaattctgtatgtattttgtaactcccctttatcctttactagcatcaaaatgtcagcaaccaattttaagaggtctatttaataaccagttcccttagtcatatatttgtttagaatcataaactatgtagaactagaaaggatcttaaagattatctccttagcctgtttatacagatgtggatactgagcctcgcggcttatatgattgctcacagtaacgtgatttattaatgacggaattggcttgagcccccagaactcataatcctcagacttatgcttccagggtatacaaatactttgaatatgtatcttaatgtaattaatcgttacaaaatatattattattacttaaagatctaggccttgctagtcaattctagccacatttaaattgcattcattttttggtttcagaaatctgatgtacctggagtagtaaaaacaggctccacgaaggaggtaggaattagatataaagaatttacagctggaaggaactttgtaggacattttgaacactaccttaagttacagatacaaaaactcaacactgccctctgcccatactttttctcatacccaggttatgtggtatgcaaaagcccctttgtgggagagctgtagctagccctgaaaagagagcttttctctcaattttaagttatttacattactcattcatttgttctatatagcatgtctatttacttttatcaaaatcaaacttattaaccaagttaattttgattttactatttcttaacatgattcatttctatttcaggtactcccctttactcctgcttctccttaccaaaaaaaaaaaaaaaaaaaaaattctgcctggagaaatgggaaacaggcacaattgatatatatttttcttatcttttctgttgttgtttatttcttggttttaccttgtgggtatttcttcagttttaccagttgaatattaaaatttcagcacccgtattttctatttcaaaagtttcttattttctgaaattttcatttttttagtctgctgttatttgcctcacagatataataacctagtctgaggatggcattttaaaaaaagtcttcctctgttccgtcttgttctgtaccttctgtgctctctgcattcattttattcatttttgtctttgatgcatggcccttcttcagatatttggtgattcttggctgtccactaaatatttaagaatagggtattaaatgccaggctcatgtgggtaggacttactgattgctgggttttctcatagcttgaataggtagggacttgtctgttttattactgtataccaaatgctaataataacaaatatgttttcttggatcagatatttgctccagaagaaaccttcccatttccttaaaggccttagcttagctgccagtgctccaggagctgagtggagaaaagagatgcaagtctcactagttagtatgttgactttgtcttagcccccatgttttccttaggatgccttatccctgccttggtgtccttgagagcagagctggttcagccttactagagtaaattataggtcttattccccaatatgggtgagtttaaaagcttcttacttcaagcacttgtcctgttttcagctcatctctcacttctaccttgagcagttccctgtgtttccaatttctaaggcttcccaggctttgtatgcagatgtttattttttactggtttctacccctataggcttaggttttagctttctcttgtaggcttagtctttattactgtttatctattgtcatccttggtgactcctcttgattactgctgtctcttttgttctttttgtctttatatgcctgttttattgctgatgtcattttagtgatgtttcaagagttggagacaaaagatttaatctgttacatttaattggaaatgtattttgacttttctaaccttcctttatagacatccctttctccatcctttgtaattgtacttgttactaatacagtataattttcatttttgtagcctgtctattttactttttatattttgtttaatcaagttttctcctattttttcatatttgaacagatactcttttttttccccatgaacctacaaatctagaaataaaagtattagaatgctaaaggattagtatttttctagaggaatggtatcttataatagtttcttgtttcaaaataaattactgatttgtattttctcccatattatccatgccctttaaggtgtaagtctggttttagaatgctaatttgtgacctgtgttagagaattgcatattggagtccttcgcctagaggattaatagcttatttattaaatatgacttcttgggagcaggcatgtccaagtaatggctgtcacttatgttgaaaaaagtggtaataatatatggatacatagagaagtttaaaaaaaatacttcaggctgcatgcagtggcacatgtctgtaatctcagcactttgggatgctgaagcggtagattgcctgagctcaggagttcgagaccagcctgggcaacatggcaaagtcctgtctctatcagaaatacaaaaattagtgggcgtggtggcatgtgcctgtggtcccaactacttaggaggctggggtgggaggattgcgggaccccagggaagccgaggctgcagtgagccgtgatggcatcactgcactccagcctggatgacagaacgagactggatctcaaaatatagataaatttaaaaccccgcccccccaaaaaaacacaaaaaacaaaaatgaaaaggtagttgctatgtaagattttttttttagcaagcatattaaagataaaatgctatgatattttattaaatgaattaaggtgtttgttgttaaaatgtcttctattttaggacatatagcaacatagttgcttgctggtttatgaatagtgcttaaatattacttcctcatggtctaaaatagtgtccctcaccccactatcactcactgcacctatattttgctttatttttcttcaaaacagtatcactccttctgactatatttattagtctattttcatcaactagattagcctttgttttattcattgctgtgtaatgagtgtctaaagcaatgtgtagcacgttgaaggtattcagtaatttgttaaaagaatgaaagagtaaacatttgccgcttataaaaggaaatatgccaaatttcaagtagatattgaaattatttgaaataactcatgagatatagaggaaggcaagctgttacaatgtagtcatatgcaaatgataatattagaaacttgagttactgatttgggttccaagaccatcttagcatttctgttttgtgctgcaggtatctcctcctcatgtcaaaagtatctcataagtgaagttcattgggaagattttcatgtattttgacaattttataggttggagaattatagataggacaatttactttgaaagacacacctttaaaaagcctctctaacttttcttagctggatgaaaaagaaagtcggcgtctgttccaacagatcctttctggtgtggattattgtcacaggcatatggtggtccatagagatttgaaacctgaaaatgtcctgcttgatgcacacatgaatgcaaagatagctgattttggtaaggataattttatagtttcttaacgttcatttctaatgttcttatagtttcaatgaacctacctagaattcttcagataactgtaaaagattacataaagtaatagactgagtatatcaaagtattctgttttgtctatgaagatacaaaaagaagaaaagctaagaaatcatcttttcttagctttaaatgtctttattactattattttatagaggcagggtttcgctttgtcgcccaggctggagggcagcgacgtgatcatagctcactgcatccccaaactactgggccaggtgaccctcctgcctcagcctcctgagtagctgggactgcaggcgtgcactaccatgccaggctgttttgtctttttgtagagacaagttctcactatgttgtccaggctgctcttgaactcctggcctcaagtgatcttcctaccacagcttcccaaagtattgggattacaggtgtgcaccactgcacctggctctttaaatatctttaaaattaaattttaaacaacttaagttggtagtattagagagactatttgaaaagagtattatttgtgaaagagaaggtagcagctttatttccagtatgttcaaaagaatcaagtatggagaagaaggaaagtgagtgggatggaattatttaaaaccttaaaaaccagaagtgaactatgtgaatttaattatttaaaattatttaaaacaattttttaattaaaaaaatttatttaaaaatttaaaaatgttttaaatgatagtaaattataatttgtttaaagaacattttgattgttaaaaatgaatttattttggctgggcgtggtggcttatacctgtaatcccagcattttgggaggccgaggcgggcggatcacctgaggtcaggagttcgagcccagcctggccaacatggtgaaaacccatctctactaaaaatacaaaattagctgggcatggtggtgcgtgcctatagtccccactaccctggaggctgaggcaggagaattgctggaacccaggaggtggaggttgtagtgagttgagatcgcctgtccggcctgggcgacggagtgagacacggtctcaaaaaaaaaaaaaaaaaaaaagaatttattttttctgtatttcctatataaattgccattgaccttactaaacctaagagaaaaaggaatctcttcttttctttaggttggttttagttcaaatcagataacttttttttgtttgttttttgttttgagacagagtttcactctgtcacccaggctggagtggtacgatctcggctcactgcaacctctgccttccaggctcaagtaattctcccaccttggcctcccaagtagctgggaccacagatgtgggccaccacatgcagctatgttttttttaatttttggtggagatggggaatcactatgttggccaggccggactcgaactcctgagctgaagtgatccgcctgtcttggcctcccaaagtgctgggattacaggcgtgagccaccatgtctggcccagagaacattcttataaaaattttcctcagttttgactacatctatgtatctatatctataactatatctatttaaatgttcagagattaactggaaaatgccaaccaaacctgagctggttgttttggtgttttgtttttttttaaaatagtaattggctaaattatttgaatttcttattcctcagttgattatttttatagggtgcatttttgagggagcaacagtttctttttggagtaaaactgtgagggaactttgaaattcaaaattactgtttttttttttttttttttttttaaagaatcagaacaggcttaataggaactttgaattttaatccttctattcatctgttatagattattttccctagtgatttctgtattaataaaacttaaacatggcaagttttttctaataagcaaaataaccaacagcttaatatatttgtattaaactctaacagtgcactaactttaaatgttgaaatagattacacattttagggcataatggcagaatatttggctacaatagaccataggattttgttgaagcaaataacaaaatgatgatttatcattttaatgcaaactcaattttattgtttaatgggattttaatttttgtctttgggaaatcttttgagtagctgattttgtgcactttcaggtctttcaaacatgatgtcagatggtgaatttttaagaacaagttgtggctcacccaactatgctgcaccagaagtaatttcaggaaggtagtatttgataccctgcctccctcaatacatttgaaattgtctttttctcctagattttgttagtctatagtgtcatatttaattctaatgaaaggaaagaaagataaggcttattcttaaccacatttatatgtgaatgagggttaaggactacaagtcaacattatattaaagttgttagaagagagtacattaatttttttcccaggtggaagaaatggaaagtttaaaactagggtgtttaaaaagtaggtaagacactggaaacttgaataatacagaaatatctagtagttagaaaaggattactatttacttagaggaaaaattaaacatgtaatgtgtagctttaattttttacatagatggcattttgtagtacctttatgtttcatgataaaatgtcttggggaactgggctgaagtaatctttagacttcatttatgttgaatctttgttctttaaaccttttagagactgcaatattataagaattttaacctctcaatttactaactaccagcattgagaacatgaagatatttgtacagtgtcgctttttgaatagtttggaaaacaggagaatttaatatttttaagaataactctttgtccttcactatactactgaaattgaaaacagaagctgaagtttgctagatttataatgaacttttaataacttttcacccaaaccatgcttatttgtgtgaatgttttgcatcttgattaactcaatgcagaaatactgtagtattttctatttttataagcttgttggcctagactgctcaaagaaatgagatttgtgtaaaaatatggctgtgagtaaggcaggagtacctaattttagatttgtcaagtttcatcttttttttaaatattaacttaatgtcaaaaattatttaaaaaatttttaaaaaaatggtgttgtctatcttaattcttttaggaataaaacaattcaggacatggagactgtggaaagttgttatttaaataaataaaaagaaatgttataactgtgcatatatgcaatgggctattactgaaatttaatttttctagtttggataaagtctttcttcaagctcttggtgtatgagaacttttactttcaaaataatatttatcgatcagttcagcagtacataaatttaaagaaatccttttcctgaatccaggctttgaatgggtgatctaactagtctgcagctagttaaggcacttgactacaatgcactgcaaacgggatttaaaaactctgtgaaccaatttgcctggctttctttcacagcctcaggatcctttcaccttggtgtaaggggtcttgtgttattgggattgtgggctcagagtccattactaaagaacattctcagttgatgaaatatcacttaatctctcctctgtaacaaaaaccaatggttttaaattgaatagtgatatgtttgttcaagatttggccctattgtcagatcccatcagggccatagtaaatagtagaacagaattttagccatggtgtgtaatttacaaacttcttgacttttgttttcaaagataatactgatggaattaacgttgtaacatgtagtagtggctataaaaaccatattctgcttaagaattctttatgaaatatccatatttgaagtttttgatgaactgaatcttaggttaaaatgattctttaatccaattgttatttcctgttacagattgtatgcaggcccagaggtagatatatggagcagtggggttattctctatgctttattatgtggaacccttccatttgatgatgaccatgtgccaactctttttaagaagatatgtgatgggatcttctatacccctcaatatttaaatccttctgtgattagccttttgaaacatatgctgcaggtggatcccatgaagagggccacaatcaaagatatcaggtaataaagcagtttggaagttatcagatctgatagtatccatgataaaagttatgtgaaaaaaaaaaagttgcagaacagaatatacagtgtaatcctgtttttatgtgaaaaaaatagagtgtatagacacatttattttattttgttattagaaatacatagtaaactggttaccttagggaagtaagattcgtaagagggagggctttcactttttacttacacatctttgttttgaaatttttacagtgaacatcatattactttttaaattaacaaaaaagctaatgaaagattggtgctgtggctcacacctgtaattccagcactttgggaagctgaggaaagaggatcatgtgagctcaggagtttgagaccagcctgggtaacatagcgaggccccatatatatgtatatcttttatttttatttatttattttttttgagacaaggttttgctctgtcacccagcctggagtgcagtggtgtgatcatagctcactgtagccagtaactcctgggtcaagtgatcctcccactttagcctccctagtagttgagactacaggcatccaccatcatgcctggctgttttttgttgttattgttttgctttttgtttttgtttgtagtgacaggtcttgctatttttgcccaggctggtcttgaactcctggcctcaagtgatccttgtgcctttccctcccagtgttgggattacaggtgtgagccagtatgcctggcgttaggattaatacttttcagtagtaaatttgtgggtggctattttatttcttatctcatgaattattgtattttttttctttttttaatcccaaggaatgagatttaattgacatgtttttcctggtagtatacattgaattacatgcaaaattcctgttttgtaggtaaaagtcagtataaccagtttcatctggttcaacctaatagtttaaattagacaaaaatgacgatgacaaattttcttctcaaattagagtgagccatttctgatgaagacttaaacaattttattgcaagccttgtttcttttttttcccccctgtggaaattttggtccttttggtcttctaatggctagactgcacatttatctgagaaggaagaaagaaatcagatatggatctaggaatagtaaatatgaaagcattagtataatgaagaagaaggaaagattatatgtggaacttgaagcttgattactttccacttactacacgttttagactagctaaaaaagagaccatgaatggcacggcatgattttatcaccaaagggaaaggacaaatcattctctaaaatttatattttaagatatctaggtaagaaatgtttttgtttgtattttacctattttcttccaattaaaatataatacatgacaattgaaaaaacttagaaaaacaccaacaatagagaagagaataaaaaattatctttaatcccatgacccagaagataaccattgttcttttcttgttttttttttcgtctctggattttatttagttttagcaaagtgacatagttcaggtcaaacatattcttaaatatacgaagttagggaattagaataggaaatcattcagggcatggcctttccagtcacacagaactgggtcataatcctggttctgtcacttactgtctttgtgaccttgagcatgttccttgattttttttttaacctcaattccttcatttaaaacaaagagatattatcttcatataattgtttcgatgatgaggggagatagtgtatatgaagtgtttagcataaaacttagcatatagtaagtactcagtagttgtctactatttttcttgttgttacattatcttcacttaacattatatcaaaagagtattataatgaagctacctaatatgttctctttctaagctggaaataagctgttcttttcattgtttgtcgctgtcatttgtcccataacttttttccccccattgctgtgtcaatacattctccctcttaaaactggagggaaattggagcatttccctcaacatacacaatgaagtgcgagctagaagaggaaaatttcagtgcaaaaagtgacaataatacagtatgaatataaatataaattaagtcatattctaaattccctaaactgttactttcagtctcagctctattcaaagtccttctcctgatcctgccatttttctctcagggaacatgaatggtttaaacaggaccttccaaaatatctctttcctgaggatccatcatatagttcaaccatgattgatgatgaagccttaaaagaagtatgtgaaaagtttgagtgctcagaagaggaagttctcagctgtctttacaacagaaatcaccaggatcctttggcagttgcctaccatctcataatagataacaggagaataatgaatgaagccaaagatttctatttggcgacaagcccacctgattcttttcttgatgatcatcacctgactcggccccatcctgaaagagtaccattcttggttgctgaaacaccaagggcacgccatacccttgatgaattaaatccacagaaatccaaacaccaaggtgtaaggaaagcaaaatggcatttaggaattagaagtcaaagtcgaccaaatgatattatggcagaagtatgtagagcaatcaaacaattggattatgaatggaaggtaagaaagaaataacattttgattattagcatatttggcaaacccatagtctataaaatgttttatagaagaattacttttgacttggtttttgttataccatgtgctaggttgtaaacccatattatttgcgtgtacgaaggaagaatcctgtgacaagcacttactccaaaatgagtctacagttataccaagtggatagtagaacttatctactggatttccgtagtattgatggtatgtacatcacacaaaacaacatagattagaccttgttactaacttggtattttacgccttgattcttttgaggcttcttgacttgttcctagtaattcaactgcaaaggaataaaaaatgtgatttcttgtgcctttgcaatattaacatttatgaatcttatttttcttgtaatcttatagcatattgtccttttaagattatcatcttgtaaaatccttaaagccaggtgtagtctgatcctaaggtgatagttttctgctgcatttgtttttttggtgtagttcattttgataagagacaatgttttatttagaaataaatattgactcttctgtaagcttttatttattattaaataagttttcagttaagaatgaagttatggcaattcttcattggccaattcaattgcattaagctacgctgttgagtgcaggtgtggtggcttatgcctgtaaacagcccagcactttgggaggctgaggtgggaggatggcttgagcccaggaatttgagaccagccttagcaacatactgagactctgtctttacaaaatattaaaatatatatatatagtatcacctttgcttatggaaggttgcatagaattattagatgaggttcacgtttgaatttttttcttctttataaactcaaagatagtacacacatagtagcagaaagacacaggtttgagccatgatatgttggccaaaccagtttgtctggttatctttaggtccatatagtacgtatctgctaacatatactaatgcagtctgaaatacggaatgagttttatttttcttgtatttggatcaaatttgcaaccttagatttactagtactggggtataccaattgaatgcccattttgtttttgtactgtgttcccaaccttagtttttcttcgatttttattcattggaattgttgctcttttatgaaatactaaatgaaatatgaagggaaagtggaaagtaaaaagcactgagctgagacttaggagagttgggttctagacttacctttctgttcatttgttaccttgggcaagtcatttctctgggtttgttttcttatcaataaagtgaggggctggatgagatggtttccagtataccctccaaattttaagtgcatcgattctatgattttaatatagagggattactttttattgctatagaataatatttattaatccctagattgttggtttactgggctcttaaccttggattgcaactgatgagtagctatactgtacccaactttggttagctatcttgagaatacatactatatgtaaaaaagatgaatagtttaatacaggctcattgactgttttagaaggtatttagaataagcgtgctcttgatagctggccagcagccccacttaaagaagcaaattcaatactgttacaaaaatttttgggagaaggtcatagactataataaattgaaattctttttacccagatgaaattacagaagccaaatcagggactgctactccacagagatcgggatcagttagcaactatcgatcttgccaaaggagtgattcagatgctgaggctcaaggaaaatcctcagaagtttctcttacctcatctgtgacctcacttgactcttctcctgttgacctaactccaagacctggaagtcacacaatagaattttttgagatgtgtgcaaatctaattaaaattcttgcacaataaacagaaaactttgcttatttcttttgcagcaataagcatgcataataagtcacagccaaatgcttccatttgtaatcaagttatacataattataaccgagggctggcgttttggaatgcaatttgcacagggattggaacatgatttatagttaaaagcctaatatgcagaaatgaattaagatcattttgttgttcattgtgcagtatgtatatagcataatatacacagtgaattataggtctcaggcttacttgatttttggctattttatatttagtgtacacagggctttgaaatattaatttacataaaggccttcatatattattacgtgttatatattacgtgttataaatttattcaataaatatttgcctagaattcccaagacctttataggtgattttgttttctgggctccttaacttcataaatagctagtatcttccagcagtagtaacagtctggataacttcttccatatccctccctctttgtttttttgagacagtgtcactttgtcacccaggctggagtgcaatggtgtggtctcggctcactgcaacctccacctcccgggttcaagtgattctcccgcctcagcttcctgagtagctggaactacaggcgtgtgccaccacacccggctaatttttcgtatttttagtgtagacggggtttcactatgttgcccaggctggtctcgaactcctgaccgcgtgatccaccacctcagcttcccaaagtggtgggattacaggcgtgagccaccgcacccggcctccatatcccccttttaaaattctgtagtgtatggtaagtcatatcagatatcagacctaatttaaatttcattttagctttacaagtccaaaaacacagaatttatatattcagatactctagcactaattttagtcttaaaatattcccacgatattctgtacacaaaatgttctttttgttacaagagctgagttgcatatactgtagataaatcatattatttttgccaatttcacaaattcctctggcccatcatgtcagtcattattgagtatatgcacacattgctacttatttgattatgtatcttttaaattgattcagtgcatagaaaactatctcttacaaactttaagtgctctgatatgacttcccccccaaattttattatgaacatttttaaaaacagaaaaattgaaaaactgtttggtaagcacatgtatatctaccatttagattcagcagttgttaatgttttgtcatttgttttctctatacctatatatgtatagatacagctagttatgcatatatatgcatatatgtgtttgtttgtgtatgtatatatgcttttttccccctgaaccatttggatgttacagacatacttatcaccgtgaaaatacttcaagtatctcctacagataatgacattctcctaaaaatccgtaataccattgtaaaagtaataattccccaatatcatctaatcaagccatatttaaatttctgaagttaactccaaatttctttatagctgattatttcaaactaggatccaattaaagtttacatatgacacttggttataactctttagttggatataacattattattattttgataaaatatggaacaaatcaattctattaataagtggtcacatttgttttgggcttaaattactttttaaagatactggattttcctaagatttctgatttacactgatatttttttttgtcattcttaattgcatcacacaatagatgtaaatgaagatgtagtcacctcagataaaattggtatcgtgtatgataatattgtatcatttatatttgccttatgttaactttaagaaattgatttttttgtattaatcattttcccattgcaacagagctatattttttctattttaagaatcatattttaggattatttttggcaaatacagtgagcacttatgtaaccagatgataatgaactcaaatgtcatgatagcttgcataaatggtgactctagtagatttgactcaagcacttctagaatcatgcactgaattcaaaagaaaaatcttgctgctttttgtccagggcttgttctattcaacttctaatttgaaagctgtacaaagtaatagaagttccatttaaatatgagttcaaaactgtatttactttttatgtggccctctctttaggggattctaattttacttagggtctctaagtgcagcataatgttcctgatgttaacagaagactgtatttttaaagttacaaatttgtatatggaattaagtaatggcgctatatacgctgttgtggggaggggggaagaaaaggaggaaccaattaaataggaccttttaaaaattgttaattttgtaaactttgcttctcttataagttattgtgattcattttagttactgtgttttattttgaaaatatttaaatattgcacttctataaatagtatgataaatgcacagacaattgcagtaaattcttttttaagctaggatatttgaaatgacaacctttggttaagtgtgtcaaggttgcaacagaattttcacaatttttttgttgtttgcaaattgttactaatattgaagaggtaagggaggcaatgcaaatgatttttaatctttttttattatcttttcagcagtttatattttttgtgactttatgcaaccatatttttactttgtcttgacaactgaaagatgtataaggttttttgccagaaatgtactgtatacatagttttaagtataacagattttactgatatgtaaaaattttgccattaaaataaatgatttctcactgagaggaacttttctaccaggttggggcatatgggagcttaatatatcatatctaatttaaaataatttcactgaaataaactccattgcttttacctaatttttttcttgagatgcttttgtagtttttcagagttttagatgattttatacaaaatcctctgcctagcactgctctttttgatgttgtagtgacaccatttacattgaattaatgcttggtagcctggggctagatgtggaactccatggatctgtgttctgactggcacctttggaatgaaagaaaagtgtgtgctgtccaaattttttccccttaattctttccctcatcttctcacccataatagaaattttatttccattgtgagttctgacaagaatgaaattccacatacaacataactgtaaattgttggtaggtagaagttaatatttgtggttcatgtatattttgaccagagtatatttaagtatataatttcagcttccttgatttagaaatatgatataataaagaaaaactccatttatcatctgtta

SEQ ID NO: 36 - DNA, 39241 bp, Pan troglodytes
  misc_feature (141)..(343): n is a, c, g, or t
  misc_feature (12935)..(12935): n is a, c, g, or t
  misc_feature (13090)..(13090): n is a, c, g, or t
  misc_feature (13116)..(13353): n is a, c, g, or t
cccgcagcgccatgcgcagactcagttcctggagaaagatggcgacagccgagaaagcagaaacacgacgggcgggtgaagatcggccactacattctgggtgacacgctgggggttggcaccttcggcaaagtgaagggnnnnnnnnnnnnnnnnnnnnnnnnnnnnnnnnnnnnnnnnnnnnnnnnnnnnnnnnnnnnnnnnnnnnnnnnnnnnnnnnnnnnnnnnnnnnnnnnnnnnnnnnnnnnnnnnnnnnnnnnnnnnnnnnnnnnnnnnnnnnnnnnnnnnnnnnnnnnnnnnnnnnnnnnnnnnnnnnnnnnnnnnnnnnnnnnnnnnnnnnnnncattctggggacacgcgggggtggcacttcgcaagtgaaggggagaaccccggggactaggcttggccccagctgaggagccgcacgacttccgctttccgcacctcttcatcctcccccgcccgctgcgtccttcttttccagggctgggcagcccctgtcccggatcctgcgggagctctccccagcggccgcggggctgcggcgcggccagcacaggccgggtgggggtggggtggggtggggtgggggccagtcgccatggcgacggcgccgcggcctgaggggctggtaggtgcgaggggctgggatgcgaaggtgcaaactttcccaggtggggcaggcgggcggcgcggcgcgctctgggtgctgggagggggcgtcctgtgcgcccgggttgtgctcccttggctcagggccagcccatcgcttccttggcggtccttggcgttgtcggtatttgcgtccgctgtaggaggctgtcgatttaccggcccctgctgtttcccgagtgcgaaatgtgtttccgcagaagtaaggtttctttgtgggtagccgacatcattttttttaaagaccatgtcgtcggaaaggatcactggtttccttcggagcagttaatgagtataaactggttcagtatttgcgatgcatggtttacgttctgaatgagactgtgcctttagtgtttccgaattaacaggagtttctccgtgcgaaacttggttgttagttaagatgttgtctccagatagtatttattactttattagtacagttcgtttccacttattttcaaaggttatttgtattctaataaactctttaagtgcacatcattcgaacttttgttttaagaaaggtgtattgggtgcattgtacagcattcgggtgacgggtacactaaaagcccagacttcaccactatgcagttcatctatgtaaccaaaagccacttgtacccctaaagctattgaaattaaaagaaaagtgtggactctttcaaaacaatattctggaaataaacttgctctacagtccaccaattctggcaaaaaaacgtttaattgcaagttttgtaaggcatgatttttttttctttaacatatttgactttgctataagggatgcagagaaaggaagtttggaactgataaaaataattcatgcattggctttggataaataatagactgacttgcatatactaagttcttggtaaatatttgacttgaaagaaaaaaagtttgccaaagtctgtacggtaactcaactgagccttactcttccagagctaaataaacagtttctgattttatttagggttagaagagaagaacgcttccttctgttgcgattttctgagtcatagaattggaaaattgttgtatatcccacagggaagcaactgcctgaaccttcttatgaaaatcagcaaggcagacaatgtcaggaggaagtaagaagcaaatgccagaattgggtaataacagctattaggacaggtccatataaggccagtaagatgtttctgtgccatggaagttttaactttatctttggctatgatatttcttgttagcaattacaaactgctttttagtttacaagtgtttgtaaaaaaaaaaaaaaaaatgttcatttttgcccccatcccttcccagagttctgcctggattagggtgttcatcattcccctaatatagacttgaatgcttgaataaagtcaggtctatttttttttcttttttcttttttttttccccgagatggggtcttgctctgttgccaaggctggagtgccgtgtggtgtgatcttggctcattgcaacctccgcttcctgggttcaagcagttctcctgcctcagcctcctgagttgctggaattacaggcgcccaccaccacacccggctaatttcatatttttagtagagatggggtttcaccatgttggcccggctggtttcgaactcctgatctcaggtatctacccacctcagcctcccaaagtgctgggattacaggcgtgagccactgtgcccggccaggtctgttttcgtatttgctaagtggtttttggcatggcaggtagtaaagcaagaagagatttttcatcttctggatttgatctgtgatatggctgtgacacgaatgtctccagtgactttgctgtttcttaaccttcacttccccacccacactaacttctcttggagtaccatattctgttaaagtcaacaaactctccaaatgtacaaaggccaatattagtccaaggatcataggtttcatagatatggttaaatttgttcataatcacatttgttgatgttgctcagaatctttaacctgttcattttttaagttaacagttgggatgctttttgccacaagtaatagaagatctagctttgcctagtaaagaacttatctgtggttctctttccacagataagtccttccagcagggaaggccagcatatctcttatgagtctcattggctcatccagtccctctggctaggaatgccatgtgccagttggcttatgcttgtattcctaagcaggcattagcaagggggatggcattgcccttggaggaatatgacccaccctttgatgtgtgtgtgcaacagaggtgggtgggtgggagacatctttttttaaaaatttgttttattttttaaatttttctttaagttattggggtacagatggtatttggttgcatgagtaaattctttagtggtgatttgtgagattttggtgcacccatcacctgagcagtatatattgcatcatatttgtagtcttttatccctcacccctctcccactcttccccctcaagtccccatagtccactgtatcattcttatgcctttgcgtcctcatagcttagctcccacatatcagtgattagaacatactgtgttggttttccattcctgagttacttcacttagaataatagtctccactcttatccaagtcactgcaaatgctgttaattcattcctttttatggctgcatagtattccattgtgtgtgtgtgtgtgtgtgtgtgtgtatatatatgtatacaccacagtttctttatccatacattgagtgatgggcatttggattggttccacgattttgcaattgtgaattgtgctgctataaacatgcatgtgcaagtatctttttcgaataatgacttcttttcagaagagattgctggatcaaatggtagttctacttttagttctttaaggaatatctacactgttttccatagcagctgtgctagtttacattcccaccagcagtgtagaagtgttccctgttcacccttttcaacaaattgtgctgggataattggccagccacatgtaggagaatgaaactggattctcatctctcaaccttatataaaaatcaactcaagatggattaaggacttaaacctaagacctgaaactataaaaattctagaagataacattggaaaaacccttctagacattggcttaggcaaggatttaatgactaagaacccaaaagcaaatgcaataaaaacaaagataaatagatgggacctaattaaattgaagagcttttgcacaggaaaaggaacagtcagcagagtaaacagacaacccacacagtgggagaaaatcttcctaatcaatacatctgaaaaaggactaatatccagaatccacaatgaactcaaacaaataagtaagaaaaaacaaatagtcccatcaaaaagtgggctaaggatatgaatagacagttctcaaaagaagatatacaaatggccagcaaacatgaaaaaatgctcagcatccctaatgatcagggaaatgcaaatcagaaccacaatgtgataccacctcactcctgcaagaatggccatcatcagaaaatcaaaaagcagtagatagattttagtgtgcatgtggtgaacagggaacacttttttttttttttttttttggagacagttttgctcttgtcacccaggctggagtgcattggcgcaatctcagctcattgcaacctctgcctcccaggttcaagtgattcttctgcctaagcttccctagtagctgggattacagacgtgtgccaccacgtcctgctaatttttgtatttttagtagagatggggtttcatcatgttggccaggctggtcttgaactcctgacctcaggtgatcccacccgcctcggcctcccaaagtgctgggattacaggcctgaaccaccgtgctgggctgggagacatcttctaagtacttggatagtgtggggggacagggtagacacctacacataaatggatgttgttagaagagagaaagggggacatggatactcagtgaacacacagaaatggccactattgtggtgatgttggtaattaaacaccaacagccttaattatgcaagaattcttgcaaataatagggttagccatatatttagacaatttggagtaaagaaagctttaaaaattacttatacatattggtaaatttaacatgaagagggatctaataaaatatatgatattgatatgcagaaaaagtctaagtatgatattccatgcttataggaaatttaattttgcggggagagtaggctggaagttcggagtgattgtttcctgttacaggccaaaaaatttgtttggttacttagtggtagcattttgagaggaaagtttacagaaaactagagttattttgtgattatgcttgaattgtctttattgtttccaaggcatcttttttttttccttctagttatcaagatgttaggttccgtgcccttgtgggccttccctctgcccaaaaaaagcatggatgagcagagtcatatcattaaaatggcagtctttgttagtttttctagagaagatggtctctttggtaggctgggtgtatcttcggcaaatgagttatttatacatataaactattaagttggcaagtatttcttttttttctttttctttttttttttttttttgagatggagtttcactcttgtcgcccaggctggagtgcagtggtgcgatctcagctcactgcaacttccacctcctgggttcaagcgattctccagcctcagcctcccaagtggctgggattataggcgcccaccactacgcccagctattttttttttgtatttttagtagagatggggtttcaccacgtcggccaggttagtctcgaactcctgacctcaggtgatccacccacctcagcctcccaaagtgctgggattacaggcgtgagccaccatgcttggcctaagttcgtaagtatttctgtgtaaaactgcaatttcagctacataggtactttgtgaatgaatcatagtagaagttatttaaaaattcctttaagtaaaaattataaacatgaactagagctatatatatcagtgtgaatgaatcttaaaaatataaggttagacctcgaaagcaagttgtataagaatatgtatagtctgctgttatttatataaattttagaaacctacagaaccactcgtacaatgctggtagagtataaattggtatcctacctctacatgagagagtgacagcatttattaaaattaacctaacaattcaacttctaggaattattttatagatgtactcgtgtatgaaataatgggttattcgctgccatattgttgtaaatattaatacaaaactttcgaagtaacctttctaatagtaatagttatggtttatccatatagtgaaataccttgcaaatattaaggaagaaaaagggaggaactttgtatattttagagaacaatttccaaggtgtatttttaagaggaaaaagtagaacagtgtgttcaatatgcctaccacttatgcataaaaggcaggggcaaatctgtatcttaagtgtgactgcttttatatatagagtatgtctctttaaagatacacacaagactggttacattagttgctcagtataggggactaggtaaaggaggacattgtgttgcaccatagatgcttttgtacttttgaattgtgtgtatagtgcaggtattgtgttatcaaaatatatgcaatgacatttgtaaaaataaatatgaaaaataatgttactatattttttatggattcatacccatgtaaaaatatttaaacgtgggaaacacaaacaccaaattcaggatagtggttacttctgaggacagatgaaggataagggaatctgggaggagtcatgcagggcttgagttatatttgtaatgttttattgcttaagctgatggtggctcatgggtatttggaatgcccttggtgtgcttgaaatgtttgtttgctttcttaaattacgatctatagcttttaaagcccacccttccccaggattaagctatttccttaacacgtttttattctttcaattttaaagtgggaatgaaatggttaggtgtctagaatatctttagtagatatttctatctttgctgcttctctgtcctattaaaatcctctgtttcaaagtatgatcttgtttcccttcaggattatatatctaattagaagaacatttgttacaatgttatgcagttagacaaagttccctttagatagcaatagcatggttgttagctaatatttagttgactaatctgctattcttgtgagggggacattgtgaatgctggtaatatttgctctgagtaatgtgcaagtcttccgtggccaaaatatctgtcttccgtttcatttaaaagcaaaaccttagcactattctaaaaactgacagtctgaagaataaagtttgaattttgaaaaaggggggaatcccttaatagtgcatatgcctgacagagtccatttactacattcattgattgactatggaacagcatttagtttggctacaactgagtttactcactggggagaatatttagcctggttttgagaaaacagtttagtttctgataccatgccaagccctttgtccctctcactgcacagtgatggtggggagagtggataggtcaaaagacttgggagtcagaagacctgtcccaacttgatcacaatagctttacttccacaacttacagaatatcttagagcctcagtttctttatctgtaaaagacaatacctccatcataggtttatgctcaaatgtgataatgtgagtgtctcctaagctattagatgccatattttaaaaagtattatgctactgaaggccgggtgtggtggctcacgcctgtaatcccagcacttttgggaggctaaggcgggcagatcacgagctcaagatattgagaccatcctggccaacatggtgaaaccccatctctactaaaaatacaaaaatcagctgggtgtggtggcatgcgcctgttgtcccagctactcgggaggctgaggcaggagaattgcttgaaccccggaggcagaggttgcagtgagccgagattgtgccactgcactccagcctggcgacagagcgaggctccatctcaacaacaacaaaaaaaaaaaaaaaaaagaaaaagaaagagttgactcctgatagactatgaaggctgggatacaaattcaaaaagcggaaaaccacacgagctggaacattataggctgggagcaaaaagccctatcctgctaaataactcccactgctgtcactgtgtgagggtataaggagcagttgatactcataagttaacatttgtttggttcccagtcttcatgtacatgtgttccatttaagaagtcatgatcatgtgtagtacaattagaaaacctgttttcaaaaaatattacttttgttaacttgttaattttaatggtgaatatcatagtttagaaaatccaccctccttttcttgtcagggactgagtgtgtggtcctgctcctgttatgtatggaggcaaagggaaagggctccggccccctcaaaatcatgtctttggtgccagccggttctgttctcagtcacctggatactgaacttccctgagcagggcagaactgagatccagtgggcttctccccaggatacttacgctttttcatttgatttcaggtctcctctttcgcttcctattgcaaccaatgaaggccattcctaccataagtaaataaaaaagaaaatctatctttaataaataacaattgtatatatttatggggcacaatgtgatgttttgatacatgtatacattctgcactgatcaaatcaggccaagtagtatatccatctcctcaaatatttatcatttctttgtggtgagaacatttaaagttcccttttttaactcttttgaaaaattaatatatttactgtaatcatgatgctatgcaatacaacaccaggatcctgttcctcctgactgtaattttatgtagccattgaccaatatcttccttttcccctccagccccacttaccccagctactggtaatcaccattctactctctacttctgtgagtttgacttttttagattccaaatataagtgagtctcagacacctctgacatactgatttcaattcctttggatatatactcagtaatgggattgctggatcatatagtaattctatttttagttttgtgaggaacctctacactgttttacaaaatggctgtatttatagtttcaccagcagtgtataagtgttccatttctctgtgtccttgctaacacttatctttcacctttttgataatagccagtctaacaggtgtgaggtgataccttattgtggctttaatttgcatttctcttatgattagagatgttcagcattctttcatctatctgttggccatttgtttgtcttttttttatttttatttttgagacagtgtctcactctgttgcccaggctggagtgcagtggcgtgatcatggctcactgcagccttgacctcctgggctcaagcgatcctcccacctctgcctcccaagtagctgggactacaggcatacatcaccacgcctggctaatttatgtatgttttatagagacaaggtctcactgtgttgcttagactggtcttgtattcctgggctcaagtgatccacccgcgtcggcctcccaaagtgctgagattacaggcatgagccaccatgcctggccggatattagctatatatctgatgcatgatttgtaaatacgttttctcagtctttgggttgtctcttcactctatttgtttttgcttgtttgtttgtttttttgagatgcagtctccctctgtcacccaggctggagtgcaatggcgtgatcttggctcactgcagcgtccgcctcccgggttcaagcgattctcttgcctcagcctcatgagtagctgggactacaggtgtgcaccactacgctcagctaattttgtatttttagtagagatagggcttcaccatgttggtcaggctggtctcgaactcctgactttgtgatccgcctgcctcggcctgccaaagtgttgggattacgcgtctggcctgtttgtttgttttttgctgttcagaagctttttagtttgatgtcatcccatttgtttattattgcttttgttgcctgtgcattagggggtcatatacaagaaatgattgcccaaacctgtgtcatggagcttctcgcctaagttttcttctagtagatttgtaatttcaggtcctaaatttaatccattttaagttgatacttgttaaggggtgagataagggtccatttccattcttctgtatgtggctatccagttttccaaatgacattattgaagagactgtcctttccacattgtgtagtcttggcacctttgtcaaaaatccattgattatagatatatgcatttattctgggctatccatcctattccattggtggacatgtctgtttttatgtcagtgccgtgctgttttaattactataggtttgtaatatattttcaaacatggtagtgtgatgcctccagctttgttctctttggacctaaagtctattttgtctgaaataaatatagctatctctgttctctttttgtttgcatttgtatggaatatctttttcagtcccttcattttcagtctatgagtgtcctttatggtgaagtgagtctctttataggcagcgcagagttgggtcttgttttttatccatttagccactctatgcctattgtttggagaatttaatctgtttacattggaagtaattattgataggtaaggacttagtagtgccattttgttaattgttttctagtgtttctgtagaacctttgtccctttctctattactttccccctttgtggctcgattgctttctgtagtggtccactttggattttttctttttatcttttgcaaaagcaaaggcttttgctttgtagttaccctgtggcttacacaaaacatcttataactggtatataagctgataacaagttaactttgatcccatacacacatgctacatttttactccccctcttccatgttttatgttcatgatgtcatgatatacatttaaaaaataatttgtatctttaacaaattattgtagctttattattattattattttgagatggagtttcactcttgttgccgggactggagtgcagtggcgtgatcttggctcaccccaacctccacctcccaggttcaagctattctcctgcctcagcctcgtgagtagctgggattacaggcatgcgccaccacgcccggctaattttgtatttttagtagagacggggtttctccatgttggtcaagctggtctcaaactcccaacctcaggtgatatgcccgctttggcctcccaaagtgctaggattacaggtgtgagccaccgcgcctggctagctttaactatttttaatagttttctcttttaacctttatactagatatataattcatttacttaccaccattacagtattagtgtgttttggggttgacagtatacttactttttccagtgagttttatacttttcatgttttcctgtcactcattagtgtcttctttcttcagcttgaagaagtttctttaccatttctttttctgtttctttttgtttgtttgagacaaagtctcactttgttgcctaggccagagtgcagtggtgagatcttggctcactgcaacctctgcctgctctgttcaagtgatcctcccactcagcctcccaagtagctaggattacaggcgtgcaccaccacttgcagctattttttttttttttttttttttgtatttttagtagagacagggtttcaccatgttggccaggccagttttgaactcctaacctcaagtgctctgcctgcctcggcctcccaaggtgctgggattacaggcgtgagccaccatgcctgaccactgtttttcattctttatccttttttcttcctcagattgtatgatttccagtggcctgtcttctaattactaatcttttcttctgcttgttgtagcctgtggttgaacccctttattgaatttttcagttcagttatactattcctcagctctatgattactgtttggtacttctttaggaaatccacttttcaactgataaactaactatatccatttctagggttgccgtaacaatgccacagactcaatgacttacagcaacagaaaattattctttgccagtactggaggtgagaaatttgaaatcaaagggccatcagggccatgtttcttctgaaggctctagtggagaatctgttccttacctcttccagctgctgctgctttttttttttttttttttgagacggagtctcactctgtcacccagaatagagtgcagtggcatgatctcagctcactgcaacctccgcctcctgggttcaagtgattctcctgcctcagtctctcaagtagctgggactataggtgtgttccaccactcctggctaatttttctatttttagtagagatggggtttcgccatgttggccaggctggtctcgaactcctgacctcaggtgatctccccgcctcggcctcccaaagtgctgggattacaggcgtgagccaccgtgcccagccctcttccaccttcttgtggctcctgatgttccttggtttgtgatagcataactccagtctctgcctctgtcttcaaatggctgcgctcactctctctctctctctctctctctctctctgtgtgtgtgctctcctcttcttgtaaggataccaggcattagatatagggctcaccctaaatccagtaagatttcatcttcaaatccttcactagtcacgtctgaaaagatcctatttccaaataagataacaatcagagattctgggttgatatagattttgtggggacgttatttacttcactacacttgtttttatattttgtatacttttagttttatgctttctttcttagtttttgagtaacttttaaattggtttgatagaatgtattagtaaaatgtctgtgggctgggcgtggttggttaatgcctgtaatcccagcactttgggaggccgagggggggcggatcacctgcggncaggagttcaagaccagcctgaccaacatggggaaaccccatctctactaaacatacaaaaattacccgggcgaggtggtaggtgcctgtaatcccagctactggggaggctgaggtaggaaaatcgcttgaacccaggaaggcgagggtgcagngagctgagatcatgccattgcactcnnnnnnnnnnnnnnnnnnnnnnnnnnnnnnnnnnnnnnnnnnnnnnnnnnnnnnnnnnnnnnnnnnnnnnnnnnnnnnnnnnnnnnnnnnnnnnnnnnnnnnnnnnnnnnnnnnnnnnnnnnnnnnnnnnnnnnnnnnnnnnnnnnnnnnnnnnnnnnnnnnnnnnnnnnnnnnnnnnnnnnnnnnnnnnnnnnnnnnnnnnnnnnnnnnnnnnnnnnnnnnnnnnnnnnnnnnnnnntgccattgcactccagcctgggcaacaagagcaaaactccgtctcaaaaataaaaaataaataaaataaaataaaatgtctgtggaatcctaagacattgaaattgatatgaggcaggttttcagtacactggattcatattctgatacaggaaggaggtcatagtagcagtgcctggcacatagtaggtgctggtactcaaatatttcttgaatgaatgaatttgtatgattgaacgcatttctggataattcttattactacaagggattcagtctattcttttcaaaactgtatatacattaagaatttctctgatatgtttaacttccatttatgttttattaaaaggatgtgtatttttacatgtcttctgaggattatctttttaaaaaaatcaaatttcacttaaccatgttcggaaaaagcataactttaagagtctgacctgggttgaagttttggcttttccactcattagctgtgtaactttgggcaagttatttcatctttctgtgcctcaatttcctgtaaaatgttgctaataatgccaaatcttccaggttggtgagagtgtgtcagtatgtttgggtacaaagtgagtatgctgcaaatattaactagtaagttgtatactttaattatgtattgtaaaggaactagatttatgttgtaaaaaattgtttttgttaaaaaaagagcccttgtttattaaaactcacatcaaattaagctgcttttttcctctgtgttcttctgtgaccaaacaagtgttcctgtagtaggtgaaatcactgtcaaggattggtgttatgtgtatatatgtctgatagtaatctgttgaacattaaccaaagtcaggaaatgagttgaactttggaaggtagaaatctgaggattggtggtagtggtggtggggtgggagtggtggagcgggttggagggattgaagtatatgggaatgggagctagatacattaaaatgacagctattatttatttagcacttatgtacctggataaaggaatgctattgcatctacatggataggtatcaccaatcagagctgagataaaactggctattcagagattaaaacaaataattcagggctgattagatacagatgggggaacaggtctgggagcagtggaaaataaataaccctaaataataaaggctaccatttatttatcaatcacttcctatgtgccaggcattgtggaaagtgctttacaaacactatttcacgtatctgttatagtcacccttatggagtatgtggtattcttattttacagatgagtaaatagaaggttgtagtttctttaacttgcccaagtcaaacatctagtaagtaccttcaaagaggaataaaaccgaggtctgtgcgactataaaatctatgctttgtatacatactgctttcacatgtgcaattggaattaggggttcaaccctattcaactctacttccaaaaaaggtgaatctgctaatactacttccaattgtttttttcccctttggaaatttttttttttgagatggagtctcgctctgtcgcccaggctggagtgcagtggcatgatctccgctcactgtaacctccgcctctcgggttcaagcgattctcctgcctcagcctcctaagtagctgggattacaggtgcgtgccaacacgcctggctaattttttttgtatttttagtagagatggggtttcagcatgttggccaaactggtctcgaactcctgaccttgtgatccacccacctcgtcctccaaagtgctgggattacaggcttgagccaccgcactcggccttggaaattttttttctaactgataagaatacaaagcagcaagtaaaattcaaaaaggatcacagtggaataacttttcattttagcatattaacatttttatatgaatttttttgtgtagctaaaaaatgtaaaatgcatatataattttttttatgtttataagaacattttctatagttttcctatgagagtctgttaggttggaataacaatgtattaaactgttctctgaaattggtcagccttttgttcttacataatacactgtaatgaacatatttatgcacttttttaaatcaacttttaaatcaaattcttagaaggaaaactacagattaaaaaaaaaaagatcctgatcatgtaatttgtgtgtgtgtttatgaatttgaatgatctcttggcatggctgtcagggcactgcctctattcctgccactgtgatacgatcatacttttgtgatttcttctattacttcaaaagggaagaagttataccaccatactttaaaacaattaatttataatttgatgaaatgctcaagtattagaaaaaagttttatggtatatcttgatcggttatggattttgttctgcttattatgccttcttttgggtggttggggagcttctgttatttacaggtggattaatattctgctccgtattactcatgagttaaattatactcaattccctattccgtagttaccccttccttcctatttttgctaatttcctcctcattttttgttgtgtgttctataaaatttcccgtcacattattattgctactacctactgttttctaaatgattttaattgtattgtaaaattcttcttgctctgctctaatttcatacctcctatatgttcttatcactctgaaaatagtaaattttgctaatacaatcatgcatttcatggatgagtttaatgtctattcatttttttgttttattcttttgtattataagactttttgctttttctcactttactgttatttttgtcatcattacaggccgggaaggtcccatagcccaggttgcttttggtcaatactgttttccccagcagcattaactggcatgtaggagatgctcagtacataagccaaaataatgaatttgagagaatgctttgaattcctattccagttccttattaaatgacaggatatatgtccagagttttggataagctccagtcatttcttaaagttaattggggttgaagttcagttgagcagggtatcataggagtttggttggtttgtgatggtttgggagttcaggcccaaattggattctgtcttagtattctttccaagtcttgagtccaccagtattatccagtattgtggctatttcccagtcctgtttcagctgagcagctggcaagagaaagtctgtgccaagccagagcttggagattcttggaggatgtgtttagcaccatgcttaggtttcaacatacttgttctaagaaaaaagatacttcctgaagcaagctttaacagtcaagttggctgctcttaatcacatctaattagtactggagattggagaaagccttattagaaattagaatgtgcttcatttccacagttgatttcagctgtgattatagggttgccttccttctttctcttatacatttcatactacacccccatcctcctaatatagttatatcgtacttttaataaaacctatatttggttttttcataattgtggctgtgtaaatactatttgctaagtcagtatctatgactatgttttatttcttacagaactttaattttactggcattcatgaattatctcattttttttcatttgtttaatttttttacctaaagcttaatttcttacatcttccagtgcctttgtaaaatccctcagaaataactatcttggattctctgtcacattcctgtctggatttgttgccttctaggccttctccatatgttactgtgactttgcttcaccattttgagattctcttagtttttctcctatatcggatcccttctttgctggattccatgccatctttcttgggtttcttcctgattttgatggaatatatattctccagtaggttcctgagaaagggtgcacaaaggttaaatttttggagacttagcctcatgactgtctaaattctactggtgatcatatccccaaaagaccaaatccctaatgccataatcccaaatgttgaaatactgaaagatcaaaatctctaaaaatcagaatccctaaattctaaaaatctcacacatctgaaatcctgaaaatcagaatcatgaaagattaaaatcccaaatgttgaaatgctgaaagccaacacctggggtagaaattagtgcacattcggttgtatgaaagatagttgcatcattttacttgcatcatattaggtggaaccgattgcctttttattgtatttatttggaaattaagtatggtttaaggagatggtttatgggtgccaaattgacgaggggtggattcatggatttaattttaggtgtcaacttgactggattaagaaatacctagaaacttgttaaagcattattttgggtttgtctgtgaggagattagtatgtgagtctgagtggactaggtggggaagatctgccctcaatagcggtggccaccattaaatctgctgggggcccagagagaacaaattgttgcctttctgagagctggaacggacttttcttctgctgaattgaacatcagaactccaggcttgttggcatttggactctaggacatacaccagcagccccctgggtcctgggctttcagcctcagactgagacctggtttggcttggttctgaggtctttggactgagccaagctaccagcatgccagggtctccaccttgaaaatgacctgtcctggaacttatcagccagtataatcgcatgagccaattcccctaataaatcgtctctcatatatctatgtatatatatatcttattggttatgtctctcaagaatgctgtctgtcgagaattatgtctgtcgagaatgctgactaatacggatttggtattgagaaagccaaatatcattccttcttactgtattccttacagcacagtggaagagacctgtgaaattgttcccttgcaaaaaggctgtgataaattaagtataccaggctacttaatggtgaaagagaaaagtttaaaagctaattattattggtgttgtgaagacagaaaatcacttaattgcaatggccaagcaataaccagatttctaaatggtcagcatatacttacaaaatatttaggccacaaccgctctagtctaaacacaagcgaatgttttgaagatcatagaagtgaatatgcaggtgaaaaatataagaaagctcccctgccaaattattcaatcaggtatgacttctgccctttcacacatagtgccaatttgctatgctatgtattttatctttgcatcatttctaatactgcaggtataaattctgtaaaggcttttagagaattctaattcattttatgcacttttttgcatatttgactccatgaaagtgcattatcacaatgtgacgtaatgtgtaagcattgtgcatgtacataaaaatgttgaaacttgctcagtaagtgaagagatgtccgttttgttcatctgtatttgtgaaagataaaatttctcaagatcttggctctttgggtgactctattgcagtttttgtgcaaacggtagtgacccattgcagtttttgattgatcttgtccgaagattcaggttgtctggtatttcagatgaccgcagttatgaatctgggtgcacctgattaccaaccatagtgatatgtgtttatccattttgctttttaatctatttcttcatgaatacattttctctgttcctattatacccatgcaatggttgttagtatacctgagtatttatgcttgcaaaaatatgttattagtgcctattttattgtgtaaaggggcctatgaactgttccgttgtgtttttatgtttctcaaataaatcttttaaaaatggaaataagtgtcttttagagaactttttacaaattatttttccaaaattcaattttttggattttgttcttttgggattgtgatttttggaattttagattttagggattttgatcttttgggatttcaacatttgggattatggcatttgggattgtgtcttttgggattatgtcctaaacccaaattctgtcaccaccgactgtctagtgatagcatttaaaatggaaagataaaatgacttgattttttttttccctttctttttaactgcatttaaaaaaatagaggctgggcatggtggctcacacctataatcctagcactttgggaagttgaggctggtggattgcttgaactgaggagtttgagaccatcctggtcaatatggtaaaacatcatttctacagaaaaatacaaaaaaattatctgggtgtggtggggcctgcctgtagtcccagctacttgggaggctgagatgggaggatcacctgatcacctgagcctggggaggttaacgctgcagtgagctctgattgtgacacggcactccaccctgggtgatagagtgacaccctgtctcaaaaaaaaaaaaaaaaaattaaaaaacaggaaaaaaaatttaaaacacagagaaaccaagaaaactagaaactacatgcacatgaaccagaatttcaaaggtataagaggttatggatggggaaatgtatctatgacatgagagagtcttttgggatgatggaactgttctgtatctgactatataatgctggttacaccaatttctatatgttttaatatccatataaatgatactaaaagaaaaatttcagtctgtatgtatgataggttaaaaggtgaaaaattaaaagaattaaaaaatacaaaaaggtatacagcaaaaaagtctccttcccctcttcctttagtcttctagctttctcttctggaagaaaccactgttaccaatttcttatgtattctcctatgtaatcactcttaaacatctgaacatttgggatgaatctggcaaaagagaaaagaacttatatttgcttagctattttctgaggatgctagatgactactcttataatatgtctaaatatattattatttttattttgttgagacagtctgaatcatcaccccagactggagtgcagtggtgcaatctgggctcactgcaacctctgcctcccaggttcaagtgattctcctgcttcacctcccaagtagctgggattacaggcatgtgccaccactgcacccagctaatttttgtatttttttgtttgtttgtttgagacagagttttgctcttgttgcccaagctggagtgcagtggtgtgatctcggctcactgcaacctccgcctcctgggttcaagcgattctcctgcctcagcctcccgagtagctgggattacagctgtgtaccagcacgcctcgccaattttttgtatttttagtagaaacggggtttcaccatgttagccgggctggtctcgaactcctgatctcaggtgatctgcccgcctcggcctcccgaagtgctgggattacaggcatgagccaccgctcccggccattaatttttgtattttttagtagagatggggttttgccatgttggccagactggtttcgaactcctgacctcaagtgatctactcgcctcggcctcccaaagtgctgggattacaggcatgagccactgcactgggccagaatatgtgtaaatatattattaatcatacttagtactaatttattaaattacttcttttacagttggcaaacatgaattgactgggcataaagtagctgtgaagatactcaatcgacagaagattcggagccttgatgtggtaggaaaaatccgcagagaaattcagaacctcaagcttttcaggcatcctcatataattaaactgtaagctctgtttatattaaatatagtccagtcatcttttcatcttttttgttaacctacttaatgtgacaagtgagaaaaatgactgacacttctttttgtttcctaagggttttgaaaagtttcttcctaggctgtgtgcggtggctcacacctgtaattccagtactttgggaggctgaggcaggcagatcacctgaggtcaggagttcgagaccagcctggccaacatggtgaaaccctgtctccagtaaaaatacaaaaattagctgggcatggtggtgggcgcctgtaataccagctactcgggaggctaaggcaggagaatggcttgaacctgggaggcggaggttgcagtgagctgagatcgtgccattgcactccagcttgggcaacaaaagcgaaactctgtcccaaaaaaaaataaaagtttcttcccattcatgtatttttctaaccccattgatggtcatttaagcctgtgttcatgttttgcccttgtgcttatcagctgttatcttctcattctttcctgtctcctggaaagatgcccttctggtaatgtttggtgccccattgctgtaaaaccaacagtgatctgctagtaaaaactcttgacctccaaatgcccacatgatgtcagttagcctcactagtgagaatgcggtagtagaaagggtttttccccatcctgcttatacctgaacatatagataacaaaatttcaggaatctaagatttcaaaagggcagtaatcttactgttgttttacagttgccagttatagagtctacaaataactatttcctgctcagcttctgctttgttatgcaggcaataacttacagatgcttaggtttttctcctgaactggctgactcaaacttgtttcactcttacctcttctcatttgttgagtgctaggttttaaataccatccatatgctgaccacccctaaatgtacatctcttgctttaagatctcttcttacaccagacttatttgctcactgctgactttacatttccatttggatgttcacaagacatttaaatctcaacccggcccaaaatgaactctttattactctcccaaacctgctcttcccacagttttcaccatcttggctaacagccaatgacccagggctaaaacttaggaaccatttttaacttccctgtttctttcactttctaccatgcatttcatttcttccttcacaatcaagctaggatttgattgcttctcagttcctttattgctgtcaacctggtctcagccaccatctgtctcatgaaatcctgaagtaacctcctgtggctacctttactgttgacagttaattcttcacattgctgccatagttttacttttaatatgccagatcacatgactgcttaaaacgtacgatagcttttcatcttccttggagtaaaagccaaagccttatcatggcttgtaaaattctgtgtcttctggcctgcagttaacacctttgactctacatcctatttctctctaatattcctcgaacatgccaagcaggcttctacttggggacctttgcagttgctattccctctcccagtttcactttcctcctagataattacataatttgttcccattcttcttttaggctcagctcaaatgttattttattagaggctttcctttagcactctgtatacaaagattccccttcatttgctttatttttcttcatagcatgttccaccacctgagatattgcttatttatttagtgtctgtttcctggttcctggaacatgaactccacgagagcagagaatttttgtttcctgcagttttcctagctcctagcctagtacctggtatactataggtgcttagtaaatatttattgaatgaatgaatatatgtgttttaatatttgtagacaatgttttctctcaccaggtaccaggtcatcagtacaccatctgatattttcatggtgatggaatatgtctcaggaggagagctatttgattatatctgtaagaatggaagggtaagctgttctgctttaattctgtatgtattttgtaactcccctttatcctttactagcatcaaaatgtcagcaaccaattttaagaggtctatttaataaccagttcccttagtcatatatttgtttagaatcataaactatgtagaactagaaaggatcttaaagattatctccttagcctgtttatacagatgtggatactgagcctcatggcttatatgattgctcacagtaacgtgatttattaatgacggaattggcttgagcccccagaactcataatcctcagacttatgcttccagggtatacaaatactttgaatatgtatcttaatgtaattaatcgttacaaaatatattattattacttaaagatctaggccttgctagtcaattctagccacatttaaattgcattcattttttggtttcagaaatctgatgtacctggagtagtaaaaacaggctccacgaaggaggtaggaattagatataaagaatttacagctggaaggaactttgtaggacattttgaacactaccttaagttacagatacaaaaactcaacactgccctctgcccatactttttctcatacccaggttatgtggtatgcaaaagcccctttgtgggagagctgtagctagccctgaaaagaaagcttttctctcaatcttaagttatttacattactcattcatttgttctatatagcatgtctatttacttttatcaaaatcaaacttattaaccaagttaattttgattttactattgcttaacatgattcatttctatttcaggtactcccctttactcctgcttctccttaccaaaaaaaaaaaaaaaaaaaaaaaaaaaaagttctgcctggagaaatgagaaacaggcacaattgatatatatttttcttatcttttctgttgttgtttatttcttggttttaccttgtgggtatttcttcagttttaccagttgaatattaaaatttcagcacccgtattttctatttcaaaagtttcttattttctgaaattttcatttttttagtcttctgttatttgcctcacagatataataacctagtctgaggatggcattttaaaaaaagtcttcctctgttccgtcttgttctgtaccttctgtgctctctgcattcattttattcatttttgtctttgatgcatggcccttcagatatttggtgattcttggctgtccactaaatatttaagaatagggtattaaatgccaggctcatgtgggtaggacttactgattgctgggttttctcatagcttgaataggtagggacttgtctgttttattactgtataccaaatgctaataataacaaatatgttttcttggatcagatatttgctccagaagaaaccttcccatttccttgaaggccttagcttagctgccagtgctccaggagctgagtggggaaaagagatgcaagtctcactagttagtatgttgactttgtcttagcccccatattttccttaggatgccttatccctgccttggtgtccttgagagcagagctggttcagccttactagagtaaattataggtcttattccccaatatgggtgagtttaaaagcttcttacttcaagcacttgtcctgttttcagctcatctctcacttctaccttgagcagttccctgtgtttccaatttctaaggcttcccaggctttgtatgcagatgtttattttttactggtttctacccctataggcttaggtttcagctttctcttgtaggcttagtctttattactgtttatctattgtcgtccttggtgactcctcttgattactgctgtctcttttgttctttttgtctttatatgcctgttttattgctgatgtcattttagtgatgtttcaagagttggagacaaaagatttaatctgttacgtttaattggaaatgtattttgacttttctaaccttcctttatagacatccctttctccatcctttgtaattgtacttgttactaatacagtataattttcatttttgtagcctgtctattttactttttatattttgtttaatcaagttttctcctattttttcatatttgaacagatactctttttttttccccatgaacctacaaatctagaaataaaagtactagaatgctaaaggattagtatttttctagaggaatggtatcttataatagtttcttgtttcaaaataaattactgatttgtattttctcccatattatccatgccctttaaggtgtaagtctggttttagaatgctaatttgtgacctgtgttagagaattgcatattggagtccttcgcctagaggattaatagcttatttattaaatatgactccttgggagcaggcatgtccaagtaatggctgtcacttatgttgaaaaaagtggtaataatatatggatacatagagaagtttaaaaaaaatacttcaggctgcatgcagtggcacatgtctgtaatctcagcactttgggatgctgaagcggtagattgcctgagctcaggagttcgagaccagcctgggcaacatggcaaagtcctgtctctatcagaaatacaaaaattagtgggcgtggtggcatgtgcctgtggtcccaactacttaggaggctggggtgggaggattgtgggagcccagggaagccgaggctgcagtgagccgtgatggcaccactgcactccagcctggatgacagaacgagactggatctcaaaatatagataaatttaaaaccccgccccccccaaaaaacacaaaaaaacaaaaatgaaaaggtagttgctatgtaagatttttttttagcaagcatattaaagataaaatgctatgatattttattaaatgaattaaggtgtttcttgttaaaatgtcttctattttaggacatatagcaacatagttgcttgctggtttatgaatagtgcttaaatattacttcctcatggtctaaaatagtgtccctcaccccactatcactcactgcacctatattttgctttatttttcttcaaaacagtatcactccttctgactatatttattagtctattttcatcaactagattagcctttgttttattcattgctgtgtaatgagtgtctaaagcaatgtatagcacgttgaaggtattcagtaaatatttgttaaaagaatgaaagagtaaacatttgccgcttataaaaggaaatatgccaaatttcaagtagatattgaaattatttgaaataactcagatatagaggaaggcaagctgttacaatgtagtcatatgcaaatgataatattagaaacttgagttactgatttgggttccaagaccatcttagcatttctgttttgtgctgcaggtatctcctcctcatgtcaaaagtatctcataagtgaagttcattcggaagattttcatgtattttgacaattttataggttggagaattatagataggacaatttactttgaaagacacacctttaaaaagcctctctaacttttcttagctggatgaaaaagaaagtcggcgtctgttccaacagatcctttctggtgtggattattgtcacaggcatatggtggtccatagagatttgaaacctgaaaatgtcctgcttgatgcacacatgaatgcaaagatagctgattttggtaaggataattttatagtttcttaacgttcatttctaatgttcttatagtttcaatgaacctacctagaattcttcagataactgtaaaagattacataaagtaatagactgagtatatcaaagtattctgttttgtctatgaacatacaaaaagaagaaaagctaagaaatcatcttttcttagctttaaatgtctttattactattattttatagaggcagggtttcactttgtcgcccaggctggagggcagcgacgtgatcatagctcactgcatccccaaactactgggccaggtgaccctcctgcctcagcctcctgagtagctgggactgcaggcgtgcactaccatgccaggctgttttgtctttttgtagagacgagttctcactatgttgtccaggctgctcttgaactcctggcctcaagtgatcttcctaccacagcttcccaaagtattgggattacaggtgtgcaccactgcacctggctctttaaatatctttaaaattaaattttaaacaacttaagttggtagtattagagagactatttgaaaagagtattatttgtgaaagagaaggtagcagctttatttccaatatgttcaaaagaatcaagcatgtagaagaaggaaagtgagtgggatggaattatttaaaaccttaaaaaccagaagtgaactatgtgaatttaattatttaaaattatttaaaacaattttttaattaaaaaaatttatttaaaaaattaaaaatgttttaaatgatagtaaattataatttgtttaaagaacattttgattgttaaaaatgaatttattttggctgggcgtggtggcttatgcctgtaatcccagcattttgggaggccgaggcgggcggatcacctgaggtcaggagttcgagaccagcctggccaacatggtgaaaacccatctctactaaaaatacaaaattagctgggcatggtggtgcgtgcctatagtccccactaccctggaggctgaggcaggagaattgctggaacccaggaggtggaggttgtagtgagttgagatcgcctgtccggcctgggcgacggagtgagacatggtctcaaaaaaaaaaagaatttattttttctgtatttcctatataaattgccattgaccttactaaacctaagagaaaaaggaatctcttctttaggttggttttagttcaaatcagataacttttttttgtttgttttttgttttgagacagagtttcactctgtcacccaggctggagtgcagtggtacaatctcggctcactgcaacctctgccttccaggctcaagtaattctcccaccttggcctcccaagtagctgggaccacagatgtgggccaccacgcgcagctatgtttttttaaatttttggtagagatggggaatcactatgttggccaggccggacttgaactcctgagctgaagtgatccgcctgtcttggcctcccaaagtgctgggattacaggcgtaagccaccatgtctggcccagagaacattcttataaaaattttcctcagttttgactacatctgtgtatctatatctataactatatctatttaaatgttcagagattaactggaaaatgccaaccaaacctgagctggttgttttggtgttttttttttttttaaaatagtaattggctaaattatttgaatttcttattcctcagttgattatttttatagggtgcatttttgagggagcaacagtttctttttggagtaaaactgtgagggaactttgaaattcaaaattactgtttttttttttttttttaaagaatcagaacaggcttaataggaactttgaattttaatccttctattcgtctgttatagattattttccctagtgatttctgtattaataaaacttaaacatggcaagttttttctaataagcaaaataaccaacagcttaatatatttgtattaaactctaacagtgcactaactttaaatgttgaaatagattacacattttagggcataatggcagaatatttggctacaatagaccataggattttgttgaagcaaataacaaaatgatgatttatcattttaatgcaaactcaattttattgtttaatgggattttaatttttgtctttgggaaatcttttgagtagctgattttgtgcactttcaggtctttcaaacatgatgtcagatggtgaatttttaagaacaagttgtggctcacccaactatgctgcaccagaagtaatttcaggaaggtagtatttgataccctgcctccctcaatacatttgaaattgtctttttctcctagattttgttagtctatagtgtcatatttaattctaatgaaaggaaagaaagataaggcttattcttaaccacatttatacgtgaatgagggttaaggactacaagtcaacattatattaaagttgttagaagagagtacattaatttttttcccaggtggaagaaatggaaagtttaaaactagggtgtttaaaaagtaggtaagacactggaaacttgaataatacagaaatatctagtagttagaaaaggattactatttacttagaggaaaaattaaacatgtaatgtgtagctttaattttttacatagatggcattttgtagtacctttatgtttcatgataaaatgtcttggggaactgggctgaagtaatctttagacttcatttatgttgaatctttgttctttaaaccttttagagactgcaatattataagaattttaacctctcaatttactaactaccagcattgagaacatgaagatatttgtacagtgtcgctttttgaatagtttggaaaacaggagaatttaatatttttaagaataactctttgtccttcactatactactgaaattgaaaacagaagctgaagtttgctagatttataatgaacttttaataacttttcacccaaaccatgcttgtgtgaatgttttgcatcttgattaactcaatgcagaaatactgtagtattttctatttttataagcttgttggcctagactgctcaaagaaatgagatttgtgtaaaaatatggctgtgagtaaggcaggagtacctaattttagatttgtcaagtttcatcttttgttttaatattaacttaatgtcaaaaattatttaaaaaatttttttaaaaattgtgttgtctatcttaattcttttaggaataaaacaattcaggacatggagactgtggaaagttgttatttaaataaataaaaagaaatgttataactgtgcatatatgcaatgggctattactgaaatttaatttttctaatttggataaagtctttcttcaagctcttggtgtatgagaacttttactttcaaaataatatttatcgatcagttcagcagtacataaatttaaagaaatccttttcctgaatccaggctttgaatgggtgatctaactagtctgcaactagttaaggcacttgactacaatgcactgcaaacgggatttaaaaactctgtgaaccaatttgcctggctttctttcacagcctcaggatcctttcaccttggtgtaaggggtcttgtgttattgggattgtgggctcagagtccattactaaagaacattctcagttgatgaaatatcacttaatctctcctctgtaacaaaaaccaatggttttaaattgaatagtgatatgtttgttcaagatttggccctattatcagatcccatcagggccatagtaaatagtagaacagaattttagccatggtgtgtaatttacaaaacttcttgacttttgttttcaaagataatactgatggaattaacgttgtaacatgtagtagtggctataaaaaccatattctgcttaagaattctttatgaaatatccatatttgaagtttttgatgaactgaatcttaggttaaaatgattctttaatccaattgttatttcctgttacagattgtatgcaggcccagaggtagatatatggagcagtggggttattctctatgctttattatgtggaacccttccatttgatgatgaccatgtgccaactctttttaagaagatatgtgatgggatcttctatacccctcaatatttaaatccttctgtgattagccttttgaaacatatgctgcaggtggatcccatgaagagggccacaatcaaagatatcaggtaataaagcagtttggaagttatcagatctgatagtatccatgataaaagttatgtgaaaaaaaaaagttgcagaacagaatatacagtgtaatcctgtttttatgtgaaaaaaatagagtgtatagacacatttattttattttgttattagaaatacatagtaaactggttaccttagggaagtaagattagtaagagggagggctttcactttttacttacacatctttgttttgaaatttttacagtgaacatcatattactttttaaattaacaaaaaagctaatgaaagactggtgctgtggctcacacctgtaattccagcactttgggaagctgaggaaagagaatcatgtgagctcaggagtttgagaccagcctgggtaacatagcgaggccccatatatatgtatatcttttatttttatttatttatttattttgagacaaggttttgctctgtcacccagcctggagtgcagtggtgtgatcatagctcactgtagccagtaactcctgggtcaagtgatcctcccactttagcctccctagtagttgagactacaggcatccaccctcatgcctggctgttttttgttgttattgttttgctttttgtttttgtttgtagtgacagggtcttgctatttttgcccaggctggtcttgaactcctggcctcaagtgatccttgtgcctttccctcccagtgttgggattacaggtgtgagccagtatgcctggcgttaggattaatacttttcagtagtaaatttgtgggtggctattttatttcttatctcatgaattattgtattttttttctttttttaatcccaaggaatgagatttaattgacatgtttttcctggtagtatacattgaattacatgcaaaattcctgttttgtaggtaaaagtcagtataaccagtttcatctggttcaacctaatagtttaaataagacaaaaatgatgatgacaaattttcttctcaaatctgagtgagccatttctgatgaagacttaaacaattttattgcaagccttgtttcttttttttcccccctgtggaaattttggtccttttggtcttctaatggctagactgcacatttatctgagaaggaagaaagaaatcagatatggatctaggaatagtaaatacgaaagcattagtataatgaagaagaaggaaagattatatgtggaacttgaagcttgattactttccacttactacacgttttagactagctaaaaaagagaccatgaatggcacggcatgattttatcaccaaagggaaaggacaaatcattctctaaaatttatattttaagatatctaggtaagaaatgtttttgtttgtattttacctattttcttccaattaaaatataatacatgacaattgaaaaaacttagaaaaacaccaacaatagagaagagaataaaaaattatctttaatcccatgacccagaagataaccattgttcttttcttgttttttttttttcctctctggattttatttagttttagcaaagtgacatagttcaggtcaaacatattcttaaatatacgaagttagggaattagaataggaaatcattcagggcatggcctttccagtcacacagaactgggtcataatcctggttctgtcacttactgtctttgtgaccttgagcatgttccttgatgtttttttttaacctcaattccttcatttaaaacaaagagatattatcttcatataattgtttcgatgatgaggggagatagtgtatatgaagtgtttagcataaaacttagcacatagtaagtactcaatagttgtctactatttttcttgttgttacattatcttcacttaacattatatcaaaagagtattataatgaagctacctaatatgttctctttctaagctggaaataagctgttcttttcattgtttgtcgctgtcatttgtcccataacttttttccccccattgctgtgtcaatacattctccctcttaaaactggagggaaattggagcatttccctcaacatacacaatgaagtgcgagctagaagaggaaaatttcagtgcaaaaagtgacaataatacagtatgaatataaatataaattaagtcatattctaaattccctaaactgttactttcagtctcagctctattcaaagtccttctcctgatcctgccatttttctctcagggaacatgaatggtttaaacaggaccttccaaaatatctctttcctgaggatccatcatatagttcaaccatgattgatgatgaagccttaaaagaagtatgtgaaaagtttgagtgctcagaagaggaagttctcagctgtctttacaacagaaatcaccaggatcctttggcagttgcctaccatctcataatagataacaggagaataatgaatgaagccaaagatttctatttggcgacaagcccacctgattcttttcttgatgatcatcacctgactcggccccatcctgaaagagtaccattcttggttgctgaaacaccaagggcacgccatacccttgatgaattaaatccacagaaatccaaacaccaaggtgtaaggaaagcaaaatggcatttaggaattagaagtcaaagtcgaccaaatgatattatggcagaagtatgtagagcaatcaaacaattggattatgaatggaaggtaagaaagaaataacattttgattattagcatatttggcaaacccatagtctataaaatgttttatagaagaattacttttgacttggtttttgttataccatgtgctaggttgtaaacccatattatttgcgtgtacgaaggaagaatcctgtgacaagcacttactccaaaatgagtctacagttataccaagtggatagtagaacttatctactggatttccgtagtattgatggtatgtacatcacacaaaacaacatagattagaccttgttactaacttggtattttacgccttgattcttttgaggcttcttgacttgttcctagtaattcaactgcaaaggaataaaaaatgtgatttcttgtgcctttgcaatattaacatttatgaatcttatttttcttgtaatcttatagcatattgtccttttaagattatcatcttgtaaaatccttaaagccaggtgtagtctgatcctaaggtgatagttttctgctgcatttgtttttttggtgtagttcattttgataagagacaatgttttatttagaaataaatattgactcttctgtaagcttttatttattattaaataagttttcagttaagaatgaagttatggcagttcttcattggccaattcaattgcattaagctacgctgttgagtgcaggtgtggtggcttacgcctgtaaacagcccagcactttgggaggctgaggtgggaggatggcttgagcccaggaatttgagaccagccttagcaacatactgagactctgtctttacaaaatattaaaaaatatatatatagtatcacctttgcttatggacggttgcatagaattattagatgaggttcacctttgaatttttttcttctttataaactcaaagatagtacacacatagtagcagaaagacacaggtttgagccatgatatgttggccaaaccagtttgtctggttatctttaggtccatatagtatgtatctgctaacatatactaatgcagtctgaaatacggaatgagttttatttttcttgtatttggatcaaatttgcaaccttagatttactagtactggggtataccaattgaatgcccattttgtttttgtattgtgttcccaaccttagtttttcttcaatttttattcattggaattgttgctcttttatgaaatactaaatgaaatatgaagggaaagtggaaagtaaaaagcactgagctgagacttaggagagttgggttctagacttacctttctgttcatttgttaccttgggcaagtcatttctctgggtttgttttcttatcattaaagtgaggggctggatgagatggtttccagtataccctccaaattttaagtgcatcgattctatgattttaatatagagggattactttttattgctatagaataatatttattaatccctagattgttggtttactgggctcttaaccttggattgcaactgatgagtagctatactgtacccaactttggttagctatcttgagaatacatgctgtatgtaaaaaagatgaatagtttaatacaggctcattgactgttttagaaggtatttagaataagcgtgctcttgatagctggccagcagccccacttaaagaagcaaattcaatactgttacaaaaatttttgggagaaggtcatagactataataaattgaaattctttttacccagatgaaattacagaagccaaatcagggactgctactccacagagatcgggatcagttagcaactatcgatcttgccaaaggagtgattcagatgctgaggctcaaggaaaatcctcagaagtttctcttacctcatctgtgacctcacttgactcttctcctgttgacctaactccaagacctggaagtcacacaatagaattttttgagatgtgtgcaaatctaattaaaattcttgcacaataaacagaaaactttgcttatttcttttgcagcaataagcatgcataataagtcacagccaaatgcttccatttgtaatcaagttatacataattataaccgagggctggcgttttggaatgcaatttgcacagggattggaacatgatttatagttaaaagcctaatatgcagaaatgaattaagatcattttgttgttcattgtgcagtatgtatatagcataatatacacagtgaattataggtctcaggcttacttgatttttggctattttatatttagtgtacacagggctttgaaatattaatttacataaaggccttcatatattattacgtgttatatattacgtgttataaatttattcaataaatatttgcctagaattcccaagacctttataggtgattttgttttctgggctccttaacttcataaatagctagtatcttccagcagtagtaacagtctggataacttcttccatatccctccctctttgtttttttgagacagtgtcactttgtcacccaggctggagtgcaatggcgtggtcttggctcactgcaacctccgcctcccgggttcaagtgattctcccgcctcagcttcctgagtagctggaactacaggcgtgtgccaccacacccggctaatttttcgtatttttagtatagatggggtttcactatgttgcccaggctggtctcgaactcctgaccgcgtgatctaccacctcagcttcccaaagtggtgggattacaggcgtgagccactgcacccggcctccatatcccccttttaacattctgtagtgtatggtaagtcatatcagatatcagacctaatttaaatttcattttagctttacaagtccaaaaacacagaatttatatattcagatactctagcactaattttagtcttaaaatattcccacgatgttctgtacaaaaaatgttctttttgttacaagagctgagttgcatatactgtagataaatcatattatttttgccaatttcacaaattcctctggcccatcatgtcagtcattattgagtatatgcacacattgctacttatttgattatgtatcttttaaattgattcagtgcatagaaaactatctcttacaaactttaagtgctctgatatgacttcccccccaaattttattatgaacatttttaaaaacagaaaaattgaaaaactgtttggtaagcacatgtatatctaccatttagattcagcagttgttaatgttttgtcatttgttttctctatacctatatatgtatagatacagctagttatgcatatatatgcatatatgtgtttgtgtgtgtatgtatatatgcttttttccccctgaaccatttggatgttacagacatacttatcaccgtgaaaatacttcaagtatctcctacagataatgacattctcctaaaaatccgtaataccattgtaaaagtaataattccccaatatcatctaatcaagccatatttaaatttctgaagttaactccaaatttctttatagctgattatttcaaactaggatccaattaaagtttacatatgacacttggttataactctttagttggatataacattattattattttgataaaatatggaacaaatcaattctattaataagtggtcacgtttgttttgggcttaaattactttttaaagatactggattttcctaagatttctgatttacattgatattttctttttgtcattcttaattgcatcacacaatagatgtaaatgaagatttagtcacctcagataaaattggtatcgtgtatgataatattgtatcatttatatttgccttatgttaactttaagaaattgatttttttgtattaatcattttcccattgcaacagagctatattttttctattttaagaatcatattttaggattatttttggcaaatacagtgagcacttatgtaaccagatgataatgaactcaaatgtcatgatagcttgcataaatggtgactctagtagatttgactcaagcacttctagaatcatgcactgaattcaaaagaaaaatcttgctgctttttgtccagggcttgttctattcaacttctaatttgaaagctgtacaaagtaatagaagttccatttaaatatgagttcaaaactatatttactttttatgtggccctctctttaggggattctaattttacttagggtctctaaatgcagcataatgttcctgatgttaacagaagactatttttaaagttacaaatttgtatatagaattaagtaatggcgctatatacgctgttgtggggaggggggaagaaaaggaggaaccaattaaataggaccttttaaaaattgttaattttgtaaactttgcttctcttataagttattgtgattcattttagttactgtgttttattttgaaaatatttaaatattgcacttctataaatagtatgataaatgcacagacaattgcagtaaattcttttttaagctaggatatttgaaatgacaacctttggttaagtgtgtcaaggttgcaacagaattttcacaatttttttgttgtttgcaaattgttactaatattgaagagataagggaggcaatgcaaatgatttttaatctttttttattatcttttcagcagtttatattttttgtgactttatgcaaccatatttttactttgtcttgacaactgaaagatgtataaggttttttgccggaaatgtactgtatacatagttttaaatataacagattttactgatatgtaaaaattttgccattaaaataaatgatttctcactgagaggaacttttctaccaggttggggcatatgggagcttaatatatcatatctaatttaaaataatttcactgaaataaactccattgcttttacctaatttttttcttgagatgcttttgtagtttttcagagttttagatgattttatacaaaatcctctgcctagcactgctctttttgatgttgtagtgacaccattcacattgaattaatgcttggtagcttggggctagatgtggaactccatgcatctgtgttctgactggcacctttggaatgaaagaaaagtgtgtgctgtccaaattttttccccttaattctttccctcattttctcacccataatagaaattttatttccattgtgagttctgacaagaatgaaattccacatacaacataactgtaaattgttggtaggtagaagttaatatttgtggttcatgtatattttgaccagagtatatttaagtatataatttcagcttccttgatttagaaatatgatataataaagaaaaactccattta

SEQ ID NO: 37 - DNA, 38039 bp, Mus musculus
gcggcgccatgcgcagactcagttcctggagaaagatggcgacggccgagaagcagaagcacgacgggcgggtgaagatcggccactacatcctgggggacacgcttggtgtcggcaccttcgggaaagtgaagggtgaggacgcccgggccagcgcggacccggcgaacggcgagcgactgcgcctttcgcactccgcatcctcccccgcgcccgccttccgggtgtctgggctccgtatccccggtccgggcggcgctgggagcggagcccgaggctgccgcgggctgcagagctgtggggtccgccgcggtggggtgggggcggtcgccatggcgacggcgcggcgccggaggggcggggatggctctgggtgcaactttcccaggcgagggagttgggcactgagcgcgcgggggcgcccggcgcggacgagggggtctcttgtggtcttctgatcccctgtgtgcccttggcgcagagccagcccatcgcgccctggcggtcctcggagttgtcgctgcctcgcttttaggaggttgtggactaaagtgcttcttcggtttcctgaatcgaaatgtgttcttccaaaagcaaggtagctgtggagatacctttcagaaatagtaatgcccttgttaggactattgatctccgtcaggacttttgatgcatatgcctgtgaactggcgcggtgtttcctatgcgtggtttacagttggatgcagatgctgcttttaagtgattccgttttcggaagttttgcggtttccgagagctatacctggtaggtagggcatatgttaactccagatggtatttattagcttataggtatagtttccgtttattctcacagtatatttatattttagtaattcagtgcacatcatttggactttttgttcgttttggtagaatcccctgttaccgccttagcaaaagcacaagcattctgtcttcaactaactactctagcccaccacctgtgacaaggaaaattctgattacaacctttgtgaggtggacttttttcccctttaaaatatttaagcctgctattaagtatttagaggaaggaagtttggagctgataagaaataattcatacattggttttggagaaataatagactatggcctgcatatatagtaagctccttagtagatatttgattgaagtgaaaaagtttgtcaaattacacagcaagctaactgagctccgttctcccaggagggcagaaagagcccttccttctcttgccctttcccagtcctaaacggaaagttgctgtgttaccctcaggggagcaaatgcctaaacctacctaggaaaatcagcaagccagacagtgtgaaggaggagtaggtgtggtctagggcctagcactgatcatggttcagccagtgttcgtgaacactctcagggttttgctttgtctctttttatgcatgcatgcatttatttatttcgagagagtgttacaatgctgtccaggctggctttgaacttgttattcttcgtgcttcagcttcctaagtagttggcattaacaggcagctagctcttccagtgttttgtttacctttagctaggcatccttgtttgccattagaggtggtaagaagtgctaattaaggctctgatggaagtgataaggcagacttgaactcagaaggctccttccgaaggccctgcttggaatgaatgtggcatccagtccgccattcctttgacacagaccagagcggatcaagcagacaagaaaggaagaagggattgttttcccggcctgggatttgacctgggaagtagcagtgcctcgaacctccctcccagtgactctgcttttccttaaccttcacttctccacccacccacacagccttctcttgaaatcctataccatcagtcataagcctcctccaatacagagggccagtgtgagtcagaggatcctaggcttctcggttataattaaacttgtccttgaacttgttagttgatgtgggtctaaatattcagccagttcattttaaaactgttaaatggttgggatgcttttttttttttgacattagtaataatgtcaaattagtaaccacaggatttgctatgatcctctccttactaaggaatggctggactgccatatcccatttggtttatgcatcagagtggggatagcatgactgtcttagttagggttttactgctgtgaacaaacaccatgaccaaggcaactcttataaggacaacatttaactgggttagcttacaggtccattgtcatcaaggtgggagcatggcagcatccagacaggcatggtgcaggaggagctgagagttcaacatcttcatctgaaggctgctaacagaaaactcacttccaggcagctaggatgaatgtctgaagcccattcccacagtgacacacctactccaacaggaccacactttctaatagtgccactccctggaccaagcatatataaaccatcataatgaccataggaggaatgtgacccaggtttggatatgtgtgggaggggggggtgtctttttttttgttttttttttaacctggctacagtgcatatttatgtgtgtgcttgcctttgctgcagggatactataaagaatgagtattgttaggtaggtgagaaagtgggaggcaggaatgcacagagagtgggccaaaataaccactgtgtctggtcatattggaaattaaccccaggcttagtttgacaagaactcttttttttttttttaattactttatttttatgtgcattggtatttgcctgcgtgtgtgcctgtgtaaagatgttggattcccctgggaccagagtcacagacaggtgtgagctgccatttgggtgctgggaattgtacctgggtcctctggaaaaacagccagtgctcttaacctctgagccacctctccagcctccatctctaagaattcttagagataatagcatcatccataaattctttgtttctatatatctgtgtatgtatgtacataccgatctatatttctatgtatgtgtctatctatatctatctatctatctatctatctatctatctatctatccgtcggtttttgagagagatttctctggggagcccttctatcctggaactcactctgtagatcagactggacttgtactcaaagatccaccttcctctgtctgggtctaaaggggtacgccaccaccaccctagccttaaattctaattcaaaaaatgtagagtacatttttcaagtattatgcgtgttggaaaatttaacataagagattctaacagaaactgtgatggtgatagatggataaatcatccgtgtgctatttagtcctttcagggaatttaagtgtgttttggttttcttttttctattttttttttttttttttgttgttgttggcttgtgttgttgtttgccccccccccccttttttttttttttttttgagatagggtctcagttagacaggctggctgttctcaaactcactctgtgaatgaggacagctttggactttgatccttgggtttctgcctccctagtgctgggattagaggcctgtgcaccaccatgcctggttatatcgagtgttgaggactgaacccagggcttcatgctaaatgctctaccaagtgagccacttccctagtcctagaaattgaattttggggctaaattggtagtggctgtcatgttatgaagttaatagtaatgaaaataattgggttacttaatgatagcatttggagggaaagtttgggcagaaaacaagggtttggggttgtgcttgaattattattttcaaggtattctttttttccgtcctgtctttttttttttttgaggcagggagtttgagacaggtttctctgtgtagccctggctgtcctggcactcactgtagactctggcctcaaactcagaaatccgcctgcctcagcctcccaagtgctgggactaaaggtgtgtgccaccactgcctggcctctctcctgtttgttaaggtgtcagtctctactcctttgcttgctgtcttctacctcccataaaacagttatacacgcacagacgaatagtcatgcacagtcaaatggctgttcttgacagtttttatgggttgtgtcttcacgaagcaagtaagtcgcttctacatataacctgttaagttggtgagtatttccacattaagccattacttcaggtaaatagatacccttctctttgaatgaataaggaaaatttccttaaggaaaaaaagaaaagatgtacatatgggctggagagatggcttaacagttaagataaccgactgcttttccagaggtcctgagttcaattcctacaaaccacatggtggctcacaagtgtctataatgggatattatccccctttctgctgtttgtgaagatagagcatgcacacacacacataataaacaaatatcaaaaaccctacatgtaatatgtacatatacatatgtcatatatgtggcatgagtgactctttagaaaataaagttaggcatctagtgctcctaaccactgagcatctctccagcctgccacagtcatttttaagtaccgacattttatgaaaaggacgaggtgttgctatgatttaatggatttatatgtaataaaataggttagtgtgtgggagagggacactgaattcagagttactggtcacctctggggagagatgaggagaggcgctgggacttcacatgtgtctgtaatgtgttgcttaagctgctggtatttgaaattttgtatgatttaaaaataaaaacgttctctttttatttagtgtgcgtgtggtgggggaggggtggtgttggaggtggttctttcattgcgttcaccatgtgggtcctggggtgtgacttagagtctgctgcctaacagagcagtcccgtgttctctcactggcccttgtatgttcccatgttcctaaaagaaatcctttaagctcccctctcaataggattaaactatttccttacagttttattagtggaattttcttctaattttagaaaggaaacggaaatggttaggtggctagaatgctttcaggggatctttctatctccgtggcatctctagcctgttaaaatcctttcttttaaaaataggatcttgttacacctcagcattttgtatatgactatgaaacatcgtcatttgttgacgatgttttgtagttaacagactccaaggttgagagaacaatgagtttgtggttagctcatcattagttgattaagctgttgctcttgggaggtgaaccttgtagatggctaatgccggtgttgcagtttgcttaaaagcaacagttttagcactgttgaaaacaaagtaacagtctgaaatataccacttaagcttcaataaagggcaggcagggccggcccctcagggaatatatactcttggcaaagtccttttattacattcactgattgatgggagcagcaattctggggagcagcaattactttgactccgccttagtttactcaatagagactctttagcccagttttgagaaaaacagttctgattctcacatgatgccattccctccccgcttctcactgcatgtggttggtaggacagagtggatgggttgaaagactaaagagtcagaagaactgtagaacttgatcagaatagctgtctttaccctggcaaactatggaccctgagcgtcctcagtttcttcatccttaaaataacaggctttgaagacatatcattaggcctgagatactatgtttaaaagtgttacactgccgaaatgttaatgttgccaatcatttgttcaaagcaaaggtttctgtgtccctataggtcaacattggcaacattgtaacaccatagctttaaatgacggacttaactgggaagaaggaaggtgggaaggacggataaaaggaaggagaaaatacctagatgtgtttgtttgtttgtttgtttgtttagacaggatttctttgtggtgtagggctggctgtccaggaattctctgcagacaatgctagccttgaactctgcagtatatacatctgcctctgagtgctgtgattaaaggcatgcatcaccatgcccagctgagataaggcctatggtgacagagaaaatattttatgatcatcagggtctagacattgtttgaaaactttggaaagcgaagtttgtattactttgatttatttatttatttatttatttatttatttatttatgaatctgtgtgttagtgccccttttctccccagggtctgtcaccttaagtcagagctcacacctttggctagtgtagctaaccagcctgctctaggggatcaaagccagttgaaacaagtgtagcaggacctactccacacttagctaaccaatgtgcgagttgagctctagcatatggcagaataatctgcagcggtcccgttagtctcctttagttctcacggatgaaccatgaaggtttaaaatgaaaacaaattggagggaaaatgttgccattctcctttccagggccacgatgctcccagatcaagtgccttagtggcagggatggggaagtaggagcggcttagttactgtccagtcgctctgcagagacaccaagaccaaggcagctaataaaagaaagaattttgccaggcagtggtggcacatgcctttaagcccagcacttgggaggcagaagcaggtggatctctgagtttgaggccagcctggtctacagagtgagttccaggacagccagggctacacagagaaaccctgtctcgagtccccccccccccccaatttttttaaattgagttttagaggatgagtccacgtcccctccttatggtggggagcatggcagcagacaggcaggcatggcactggagcaataataactgagagcttacagctgattcagaagcaggaggtgaggaacggggccagagacacagacagacagacagacagacaaacacacagtgaacctggtatgggcttttgaaaccttaaagtccaccccagtgactcaccttcactaacaaagccatatctactaatccttcccacatcgtccaccaagaaccaaacattcaagccatcaccaagaaataccatatttaagtacagtatactttatgtttgaacaatgtaccttaagaaactcagttccagtacttttagctgtgtgacttttccagctaataagaagtacttagagcatggagaaggggccgtgaaagctgactcgtgataggctgcgcaggatgcaacttaacttcgatagcaaaatcccataggagcatccgctagtcatgggaagtcctctgagctgaacaactcccagggaagaatcatacaaaggcatgttgtgtgtgtttacttaagatgaacatttgtgtccctgtcctcgtgaatactgtattttttttttttttgcattttttaaaaaatttttattaggtatttagctcatttacatttccaatgctataccaaaagtcccccatacccacccacacccactcccaaaattcctaactccatcagaataaatgttatttgttttttaatttatttttatttttattatatgtaagtacactgtagctgtcttcaaacactccagaagagggagtcagatctcattacagatggttgtgagccaccatgtggttgctgggatttgaacttcggacctttggaagagcagtcggatgctcttacctactgagccatctcaccaggccccgaatactgtatttttgaaaccttggaagtatataatccagtatagaaagccttttttattcaactcctgtttttaaagcttatttttaaaattatgtttgtgtgtgtttatatatatgcttttgattgaaggcgggtgtggaggtcaaaggtgttggagccagctgaagctggggtaacagagggttgtatgcctcctgttggtggtggtcctgtggaggagaagtttgtgttctgaactgctgagccatctatctatcacccttgagtcctatagcttggtctggcctgatctcccaattctcctgcctactcctccagagtgctggccagtgtttattttttatttatttctattttcttaaagatttatttatttattatatgtgagtacactgttgctgtcttcagacacactagaagagggcgccagatctcattgcagatggctgtgagccaccatgtggttgctgggaattgaactcagtcagtgctcttaactgctgagctgtctctccagcccactgggcacttcttacatcaataagcatatcaccttgctagggctgcaatagcagtactaaaggttgggggcttaaaactagagaaaattattctcggacagtcgaaggtcagaggagggaaaatgggagtctcaagggctgtgctccttctgaaggtcagtggcgaatgtgtgccttacctcttagcctctgttattcctggtttctccgggcctagcataactccaccctctgctgctgcccccaccgtatggctactctcctgtttctgcgctcctcataagagagcaagtccttagataactgtgctcattctagcatcataccattttgagagccttttctaaattctatttttaaaattatttatttaatgtatatgagtacactgtagctgtcttcagacacaccagaagagggcattggattccattacagatggttgtgagccaccatgtggttgccgggaattgaaactcaggacctctggaagagcagtcagtgttcttaaccacagaaccatcttttcagcccctactaattttaaagattttaaagaactgcttgtaagtaagacaacattctgaggttccaggttgacgtggttttcagctcgccagactccctctactctttcatgttttgttatttatttgtggacacagatcctggtgtcaggtgtttacctgtgttgctctctgtttttcaaggtcccccactgaacctgaagcttactcaccttttcagctaggctgcttggcattctgggatctgcctgcctctgccctctagatgctgaggttacaggcatgggaactgaaacgttgaactcagggtctctcactttctttttaggaaggtctctcaaggttaaagttgtatgccttttcaaaagattctttaaaggacttagtaaattgattgtgttgacttttttttttttttttttttttttgagcaaggtttttctacgcagatctggatgtcctggaacttattctattgagatcagattgaccttaaactcagagatcggttacctttaatcctgaattctgaaattaaaattgtgtgacatcatgccccttttcttgattttagggtaacttttttttttaacatttattatcattatcattatttaatgataattttaaatatttattcttctctcatatacccttccctcttcccagcctgcccctctcctccttagcactcctctccccagatgttctcttcccccaggggttaacttgtaacttgatttgagagaatgctttaatcaaatgccaatgtctctataatatctcttgagatttttaaatttcaaaaactagaataaaaagattttgaaattgataggtaggttttcagcaggcaaggcttatggtctaatacaggaaaaagatcaaatgaaagagtgaaattttagagtgattttttttttttaagtatggaaaattcaatctattttcaaattttcattataaggtatcagaagatgtttctgatatgtgcaacttttatatgttttattagaaggatgcatatatatgcattatatatactgtgcaacttctgttttgatttatcttttcctgttttttttttttttttttttttttttttttttttggtttttcgagacagggtttctctgtgtagctctggctgtcctggaactcactttgtagaccaggctggccttgaactcagaaatctgcctgcctctgcctcccgagtactgggattaaaggcgtgcaccaccacgcccggcgatttatcttttcttaaaggctaattttattatcattggcataattttaggtagggtttcattctttagaccgtgaggccttgaactcggagattcacttgcccctgctttcttcgtggtagatattacatgtctggctatttcattattttaaatcacgtacatgtctgtgggtttgtacttgtgagtgctggtgcctacagaggccagaagtcttgggtctctctggactggggttactggtagtgacgcagcccagtgtaggtgttgggaaccgagcagatccgttgcagaatcattacgagctcctaactcctgagttaccgctccagctcctagagttcttctaaaactatattattatggtctggccttgactctgtgggtaccaacccgcctggaaggacggtactgtctcctgaagcttagcctctgccctctctgcaagtgcactgtggcacgaggcttcgccacactcatacgtggataccatgcattcagtaataatacttaaaataaagaatttaaaaatgtctaaagagtgctgtcatgtttcctctcctggagggagcttccagtgttgaacccaatctgagttagagctttgggctgtgccacgcaccagccgtgtacttaggacacattgtgtctgtgggtgcctcagtgccccgtagaatggtattcataatgccagccttccaaagttgatgactgttcccgtctgtggccatagaaatgttcttgaaaaattttagatagacagcgacctcgttgtagaggactggtgctgtgtgtatgagcgacctgttgaatattaactgttgaggaaatgggctgaactttggaatccaaaaatctcggctcggtgcttggagtggtgggatttaagctgccgagagagggtggcccctgaggctcttgataagggcaggctgttgaatacaactgaacagaaggcactattggaagagctgagatccaaagcacctattcccacatccaaatggatagttcagggatgattaaataggaacgggggactggtttgggaatggtggaaacttatccctcagtactaatagctacagttgtctgttcacttaggatgtgctggtaggggggaaggtcctttacaaacacggtttcatgtgtcatgtggccacccttgtagagcaggagatcacatttaccaagggttttatatgtgtaagtcagaagtctgttaagtaccttcaaagaggaacagacctgaggctacagagtgcacgcacactgccttctgggttggaaggacacctgggtattcagtctgttcctgtaaagggctggatctgccaatgcctagcgttgatgccctccccttgggtgggcgagctttctttctttccttttctttttctttttaactgaaaaaaataaaaataaaacaatacaatttgaaagacggtggctacagcatacctttcttcttatttcttctgtagctggcaactgtggcagcctgtgtaactttattcaccatggtgattagaaggaacatttctcatagtctcctacaagagtctgctgtattgaaacaatacagtggattagctgttttctgaaattagtcattaggagatctgcaggcttttgttcttacacaataagctgtaataaaccgagacatatttatgcatgttttcagcttcgtagttcaatttggagacgtatgttttttctttttaaatacagtgccacctttaattctcaagaatttttttttttttttaaatttggttccctaaagtgttcccttggttcctgcagccatccccgtcaaaaacaacagcaaaaggaatcactatggtaactttctgttaagcagacggaaagccagtgctctcactttctctgttccgtccattctggtcccttctgtgtaccaggaggtcggctgaccacttgctttatgatggctgacgtggctccttcgcctcccagttaactttctcagtttttgtttgaacacagttttacttaatgtgattttttatttttttgcacttcagtcagtagacccatccccgttttcatttatatgtgtgtgtgtgtgtgtgtatgtgtgtgtgtgtgtatgtgtatgtgtgtgtgtgtgtgtgtgtgtgtgtgtgtgtgtgtgtgcatactgcagaagtctttcctccccgtcagcgagtgagagaataggggttgaacgaaggtccccgtgcttggaggccagcagtttacccactgaaggctctctggagttgttttgaaagtgaggacttatatctaagtgctcctaattacttttgtagtttggtgaaacactcaagtatgagaacaagatgcagtatgcttggatggatattggcatccttccttcattttgctttttaaacagggggacgtcgtgtttgcaggtgaaatactgagataccccttgctgaaactatatacttgattatatacttgaaatgatatacttgattcctatcccttggagacctttatccttgttaaattctctcagttcttagtatccgaccatagaatgtgccacattattgctgagtcatactaactactaagtggcacgaactgttctattgtagaattttcattgtgccctttgtatctctgtactcttaaaaaaatagtgtatgtttgtgtatatgtgtgtatatgtgtgtgcatgtgtgtgtgtatatgtatggatgtgtgcatgtgtatgtgtgtatatgtgtgtgcaagtgtgtgtgtatgtatggatttgtgcatgtgtatgtgtgtatatgggtgtgcacatgtgtgtgtatgtatggatgtgttatgtatatatgtgtgtatatgggggtgcacattgtatgtgtatggacatgtgtatgtgtctatatgggtgtgcacatgtgtgtgaatgtatggatgtgtgcatgtgtgtgtgtgtgtgtgtgtgtgtgtgtatgagtgtgtgtaggctttatatccatgtcaattaaatgggatcagggatcacttttgaggtcctttccctctcattagcctatgatgctacacaaattcatgctaaggggacatattactaaacagacctctgaaaattgcttgctgacactgtaatgcaataagggggacagagagttaccaaactgtgtacaggatgaaatgagaactgcttacccttccatgttgtgttagtggaggtcagaggagaactctgaggagttgctttttccttccactttgttggtcccaggaactgaacttatgtcatcaggctgagtcaagctaaaatctctctctctctctctctctctctctctctgagaaagggtcttacatgctaacttctattggccttaaactcatggcaatcctcctgtctcagacttctaagtgttgaaatcataggcatgagccaccatacccagcttttctttaaaatgtcagtcttatgtgtcccaggctgaccttgaactggctgtatattggaggatgacccagaacttgtgatcctcctgcctccctcctgtgggctggcaccatcacacccagttcaaacccagtgcctgttgtctgtgctgtgcaagtactttaccaactgagctacatctgcaaccctgctttgttattttgagacgggcttgctctgtagccagagtagtctcacattcttggcagtctttttgcctcagcttcctctgctaggaggacaggtgtctgccaacactcagattgcttttttcttctccccactaaataatttatttatccactttacatctctatcacagcatcctctcttctcgcagcccctcctcacactgcctttcctctcagctccccgacccttcatctctgagaaggcggaagtccttcctggggaaccaacccaccttggcacctcaagtttatgcaaaactagttacattttcgcccactgaggccagacaaggcagcctagttaggggaaccagatccactggttaagcccctcccccagttttgggggggacctgcttgaagaccaagctgcacatctgctacacagtccagggtctctaggtccagcccttgcttgctccttggttggtggttgattctctggaagcccctgtgagtccaggttagttgactctgttggtcttcttgtggagtctgtttgtcctccgagtacctcagtccttcccctaactcttccaccagacttcccaaacttggtgtaatgcttgggtgtgggtctttgtgagcctctcggaggacagttatgccaggctccttcctgtctgtgaatccaggctgacagatacaaacagcctgggactccaaagaggtagaagggaggacagtagtccagaaatgtgtctgtagcctgggctagcctagaactcactatgtagaccaggctggcccgcctctctctctaagttgctgggattaaagatgtccacttaggtttttgagacagggtttctcactggcctggaactcatggactaggctagattggatggtttacaataaatgctaagtatataatcccaaatgagtcaaagagaatgttcagagcttcctaccctagtttcttacttgatgaaagaaattatatctacagttttggataaacctcaagtgtttttgagaaacacttattaatgtgtgtgtgtgtatgtgtgtatgtacatggtaggggcgtgtgtgccacagtgtgcttgtgagaggatggccttaggaagttatttctctccttctattatgtggaccccatactttcaaaggcataggattatctctgttgcctcaaaataaggacgctggctcctctgcgggttgccttgcctgggtttgctgctgtgcagaccagcacagctgtcgccgtttggaggtttctcaatttgcctcctgcattggattcctgctcttttggggacagagtctaagtcaccaaggctggtcttcagctatctttggagccaaagtgaccttaaactccctgtctcttctcacatgctggcaattcaagcatgtactaccacagctggctttgtttgcttttccaggcagcggccctaccccgtgctgcagccaacccttgctggcctgaagctaccatcgctagcagcaatgctcccatgaccaggacatcaagcctgagctggcactctcttcactagatgtgctgacttcttgctgacgtttttgtttctcttctgattttgatagtatctatgtttttccataagttcctgagaaagggtacacagacgccagacttttggggactttgcctcagcagcagtatctgaattcttatgtgcacatagactgtctgggtgagtctgggcaagatggaatctctttaaacatgatttatctacttttatttgcatagatgttttgtctacatatatacccttgcaccatgtctgtacttagtgcccaagaaggctagaagaggttctcgtatcccctggaactggagttatagatggttgcaggtcgcacgtgagtgccgagagtctgacctggactctcgagaagcgcagctcgtgccactgagccatctctttagcctaaaatccatgtatttttaaattttctatttgaaaatggaaactacatgccattgagccaaaactgaaaacagaacaaaaacaacagcagcagcagtagccaatcacgggggctgttaatgataggggatcatgtgcagtagccaatcaccagggctgttaacgataggggatcatgtcagtgtcccaggggagttcgtgtatgtagttttgggcatatgtgtgctgtatgtgtatgtcaggccagaggacatggcttgctttatcattttctgcttttgtttccttgagacaagatctcttattgaaactagagctaggtagttagccagtatcaccaggaatccccctgtctctgccaacctgtgctctttctcccagtgttgggctgataggcagggatcatgctaggttcttctctttttctttttaaaagtgtgttgtgggaatttgaatttagagcctcctgcgtatacagctctttgttggtgagccatcatctctccggccctgcagggcagttttctgaggggaagatacacctattctatgttatggcttttgtttgattttcttgttttgagatccagtgttaccacatagcctgggccttcccttagttctcagtcccccgactgtgcatctgacgattgcaggcataggctaccatgtctggatccttgccacatgattattttaatggtggtagaccagttcctctgttcttcagttctacagaaggttttccaataaaagatagtttcattttctatgtacagtagttgagaaatgaatagtgagctaaagggatttgagtacctgaaggcatacaggaagaatttttcctctttctctcttatgactggtccaaattcccttttcctaaaatccgctcttggtgagcagttccttgtgtgtgtcaaactaaggaggagggcggcaaagatgctccagtatcttctgagtgtttagctttctagtataatacaccaaagtatattatccatcagaaccggtgcgaacacactaaaaatgattccttctgcagtgggcaagcacgagttgaccggacataaagtggctgtgaagatactcaaccggcagaagattcggagccttgacgtggtgggaaaaatccgccgggagattcagaacctgaagctgttcaggcaccctcacatcatcaaactgtaagtccacctcttatccctctgctctccctcacatcatcaaactgtaagtccagctcttatcccgctgctctccctcaaatcatcaaactgtaagtccacctcttatcccgctgctctccctcacatcatcaaactgtaagcccagctcttatcccgctgctctccctcacatcatcaaactgtaagtccagctcttatcccgctgctcaccctcacatgatcaaactgtaagcccagctcttagcctggtcctcaccctcacatcatcaaactgtaagcccagctcttagcctgtcctctccctcacatcatcaaactgtaagtccacctctcatcccgctgctctccctcacatcatcaaactgtaagtccacctctcatcccgctgctctccctcacatcatcaaactgtaagtccacctctcatcccgctgctctccctcacatcatcaaactgtaagtccacctctcatcccgctgctctccctcacatcatcaaactgcaagtccagctcttagcctggtcctctccctcacatcatcaaactgtaagtccacctctcatcccgctgctctccctcacatcatcaaactgtaagtccacctctcatcccgctgctctccctcacatcatcaaactgtaagtccacctctcatcccgctgctctccctcacatcatcaaactgtaagcccagctcttagcctggtcctcaccctcacatcatcaaactgtaagtccagctcttatcccactgctctccctcacatcatcaaactgtaagcccaactcttagcctgtcctctccctcacatcatcaaactgtaagcccagctcttagcctgtcctctcatcccgctgctcaccctcacatcatcaaactgtaagtccacctcttatccccctgcttcccctcacatcatcaaactgtaagtccagctcttatcctgctgctctccctcacatcataaaactgtaagcccagctcttatcctgctgctctccctcacatcatcaaactgtaagcccagctcttagcctggtcctcaccctcacatcatcaaactgtaagcccagctcttatcccgctgctcaccctcacatcatcaaactgtaagtccacctcttatcccgctgctctccctcacatcatcaaactgtaagtccagctcttagcctgtcctcaccctcacatcatcaaactgtaagcccagctcttagcctgtcctctcatcccgctgctcaccctcacatcatcaaactaagtccagctcttatcccactgctctccctcacatcatcaaactgtaagcccagctcttagcctgtcctctcatcccgctgctcaccctcacatcatcaaactgtaagtccagctcttatcccgctgctctccctcacatcatcaaactgtaagcccagctcttagcctgtcctctcatcccgctgctcaccctcacatcatcaaactgtaagcccagctcttatcctgtcctcaccctcacatcatcaaactgtaagcccagctcttagcctgtcctctccctcacatcatcaaactgtaagcccagctcttagcctgtcctctccctcacatcatcaaactgtaagcccagctcttagcctgtcctctacctcacatcatcaaactgtaagcccagctcttagcctgtcctcaccctcacatcatcaaactgtaagcccagctcttagcctgtcctctccctcacatcatcaaactgtaagcccagctcttagcctgtcctctccctcacatcatcaaactgtaagcccagctcttagcctggtcctcaccctcacatcatcaaactgtaagcccagctcttagcctgtcctctcatcccgctgctcaccctcacatcatcaaactgtaagcccagctcttagcctgtcctctccctcacatcatcaaactgtaagcccagctcttagcctgtcctctcatcccgctgctcaccctcacatcatcaaactgtaagcccagctcttagcctgtcctctcatcccgctgctcaccctcacatcatcaaactgtaagtccagctcgttagcctggtcctcattctcacatcatcaaactgtaagcccagctcttagcctgtcctcaccctcacatcatcaaactgtaagcccagctcttagcctgtcctctcatcccgctgctctccctcacatcatcaaactgtaagcccagctcgttagcctggtcctcaccctcacatcatcaaactgtaagcccagctcttagcctggtcctcaccctcacatcatcaaactgtaagcccagctcattagcctcgtcctctcatcccgctgctcacccctgtacttaacccacctgacctggcaaaccagagcgaggctggaggtgtcttcctgctcttgtctctgaccccggttcactgccagtcacagggcccgccctcgggttttagcatggctcacatccactgtattcctgttcttcctgttgtctggaaagaggcccctttgacagtactctgggctactgtttttacaggttgggttgctactagaagtttctgtagcaggtgccaggccctgtttggtctcctgtaccacctgaaaggaaaaaaaaaaaaaaaaaaaaaaaagaggcgagaagttcttgagtttaaatttcaagttttttgcatgctgggaatcaggctcaggagagactgtgtactagaaatcttttttctgtaccctgcttgtacttgaccatacagaccgggctttgaggaatccagaatttcagaaggacagtaatcctaatggtagttttgagaaagcctcactaaggcttacaggtaacgtacttcttaccttcggtgttaccttgtaggctatactttaacgctgccaggacttctccgttaaactggaatcgtggagctggctccacagttgttttgcttttagctctcattcattaaagtgtttggctctatcatgtgtcctgatggcccccaactgtacagtccttgctttgagactcattctctgaactccagaccctgtgcctgctcctcactcattggggtgtccgagaggtctttcaaagaacctgttccaggtctcatctccccatcatctcctcagctcttcttcctacactgttctcaccatcatcgcagttaattgtcacttaaccccgggggtggggtggggggtggggaggacaatgacgaagacggatgtaggagcatctttaacaatcctgtttatccctcttcccaccatcactccatctcttcctccagaatgtatctctgaccttttcctccgtcctttaacgccatcacactggcctgtgctacctcaccgctcaagggcatcttctgagcgttctctccggtcttcataccgccactgcttactcttttgacgtgactgccagcataaaaacatcccatagctttccacattcctttaaataaaggccgaagatttcttccctcccggcttgtggagctctgcatctttggtctccaacgactagcttcatgtcctgttttctctcctggcttgttttgctcttaccttaccataagtgtgccaagcaggctcccaactgggccctggccctggctgttccttccccctgcccacttcaccttcctcctggccaaggtagtctgctcctcccttccttggggctctgctctggtgtactctgtgaccttcctggcatgctctgcctcttacttaattactgtctgtgtcctggcccctgcatcaagaacataacaaacttgcttactgtctgtctcctggcacctgcatcaggaccataacaaaaacaggagattggctttgctcccccacagacttctagcagctagcacagtacctggtatcttataggtgcttagtaaatctttactgaatggatgaatacacgtgttttaatattagtagataatgttttctctcaccaggtaccaggtcatcagtacaccatctgatattttcatggtgatggaatatgtctctggaggagagctatttgattatatctgtaaaaatggaagggtaagcagttctcatttaattctgtacacagtttggtaactctctgtcccccttattgcattatagtgtcagcaagcaattttcagaggtctgtttagtaataagtccccttagcatgaatttgtgtagcatcataggctaatgagaaggaaaggacctcaaaagtgatccctgatcccatttaattgacatggatataaagactacttgttgagtatttgttcaaggtcacgtgatttactagtgatttacagagttcacgtaagtccctaaaatttattatcctcagatttaaggtttttagcaaaacaaacttttatttatttttttggagacagggtcacactatgccactgtgactgccatgtagatcaggctggcctccagtgcatagccatgcccctgtctctgtctcccaagtgctgggattgaaggtgtgcctggtctgtgctcacccttaatgtgcttcctaaactttcctaacacgctttcctatgtgggcctcccaaaatacgtcagtaagtacttaaacgatgtaggccttgttcttcaaccctggccacatttcagttgtgctcgtgtgttggtttctgatgtgcctgcagtagaaaggaatagggattttgaaggagctaggaagtagacttacagggcttagtgtttgaaggaaccttgaagacgtttagttctaagcacaaattctgagcaccgtcccctgcccatacgcactctcacgttatctgactggcacagcgccctgctgaaaggccccacacctaggagagaagagagcctggctccccttcagtcggaagctatttgcattcttcattctttcatgttacgcactgtctctctttaatcaggatcagactcattaagcacgctagtctgttttttctcaatgtggttaatttctacctaaagttttccctttctcatccttcaaggccctattcctgtccactggaggaattcttccaaattgatcaatgcctgcatttctcatctctctctttttttcctcccatttgtcatttctagtcattttgctatacattgtggggacgtctttagtgttaccttttgaatgccaaccttccagctgtcacatgtttgtatttcagatttctgccttattttctgaaattccctttggatagctgcctgtttggccttacctgtttgagaatgacattttggttttaaatgtcttttggccactgcaccgctccgttttccgtgctttccgctcgcctcctcttttttttccccccttctgttcattttgtctcccccccccccaaccctcccatactcttagtcagatatctggccattcttagctgtccacttaaatttcagaacaaagtcacaccacatgccaagccagtggatgtgtgctgtttatggttttccctcaggttgcattgttggagacattaattttggtagggtaaattctttgctcacaagcacaagtgtttttcttcgtttgatttggtatctgctttttcctattttcttgaaggtattggtttagctgttggaactgagtcgggagatggggtcaggtctttcctgttagtatgcacataatctacatcttccttaacggcctggccaacccgaggagctacaggtcttactcccccttggtggtacctacagctttctgcacaggcctgctgtcttgtttccgtccgcccctcattgcttcagaaagtcatggtgcacccactgctcagcgttcccagggttccgctgtgcacttgcgttcattttctcctctaggatttggttttgcttttctctcttttgctgagttttcatctgctgtccatacattcctcttgatggccgctgtctctccatctttttgttttatgggccttgtgtgttgctgacagcaccctggggcgacacaacagggagtgacacaaaagactcagtgtgggatgtttatcagcttggagtgttcttttacatggctcatcttcctttagtcgctgccattctttgtactgtatttttataaataaaattcttttcacctttgcagcctttctgttacttatcatttgttaagttttctcttcctcttgcataatttttttttaaataaacatctacttgaacaaaggtgtgagattgcaaaagtattaatgtctttttcttaagggagaggaccttacatttcagggtaagggtatgctacacttcagtagcatttttaattttgtattcaaagcaatggctggtttctctttgtcccacgttatccatgcggtgaaggtgtggggttctggatttagaatgctcactcctgacctgccaaggacctcatgtgagcatccttgcctgggccagtagctcacttatcgaatcccctgtcctggaacccgggcaaagcagtgctgcttcccctgctgagcaaacgccagaaaatgcagagactggaagatgatttttaaaagattgtacttaaaaattgtaattgtagtgtaagtgttttccttcaggaaagatgcaaagggtaaatgtgctaaggattttcttttggtgaagtgaaaacatcttagacctgaagagatggcacccatgtcaggtggctctcgattgtaactccgggtccagaggacccaacattcttagcattcttgtctctgtaggcacctgcaggcagatgcacacacacacacacacacacacacacacacacacacacacacacatatacacacacacacacatatacacacacacacacacacacacatacacacacacacatacacacacatacacacacatacacacacacacacacatacacacacacacacacacacacacacacacacacacacacacttaaaaatagcttaaatttcagagtacaggctatctttgcgttgtggctcaattccaatacttacctgtcacttctttgtggtctgtaatcgtcccccatgcaagcatcacttggtatattctctttttctttcccttttctccgattagatttgctctttgacagttgcgtccatgtgttctgcgccctctgtgtacgctcccaccctgacccccttctcttccttcccctcctccctgcaggtccctggtttacactcatgactttgttctgttctgggaaccactgagtttgactagaagcatctgtttccccctgggtttggatctgctcattggaacgctttctgtatcactctgtgacccttttttcccactgttacgctcatgtttggtttggttttggccttattttgtctactagagtagggccttcctctcactcatctctgtgctatggatatctaaccagtacagcatattgaatatctaatactatggatatctaaccagtacagcatattgaatgtgctcagtaaatatttgttgaaggagggaaggattaaacaccactaattggaaaacattcccagtttcaggtagaagttgaaagtactagaaatagcccatgagctccagaagaagatgtgtttttaagtgtagtttatatatgtgatagggtcaaagagttgagttgctgatttggtccccgtaagcccttgcttggcatttcagtgtagggctgcaggccttacttgcccatttcaaagtacctcatgggtgaagttcgcctggaagctttcaggcgttgacagtccacaggctggagaattataagaatgttttcattgagagacacagcttaaaatgcctttcttcttttcctagttggacgaaaaggaaagccgccgtctgttccagcagatcctttccggtgtggattattgtcacaggcatatggtggtccacagagatttgaaacctgagaacgtcctgcttgatgcacacatgaatgcaaagatagccgactttggtaaggatggttgtgatgtttaatgagcataagtatcatcttctggtagtgtttatggggtgcactagaaccccactctgcaagtgaacattcagaagggaaaacagtaaggtacgcgcgcgcgcgcgcgcgcacacacacacacacacacacacacacacacacacacacacacacacgccacaggatagctttgggggatgtttctattcttccagcacgtgggtcttagagggtggatttaggttgtcaggcatggtggtaagcacttttacctgctgagcctacctgccagccctgaaattcagttttgtgatcttaaatatttcaacttcttaacattagagagatcatttgaaaagaaaagactattatttgtcaagaaggtagcaacttgatttctaatatttctttttggtggagtatggagaaaatggaaagtgggatggaattattgacataacattggaatctagaaagatgaattatatgaggaaactttttttataaaattaatatttaaatgctgtaaagttggttttcagatgtagtggtaggtgccttcagtctaagaattccagagatggaggccggtagagatctttctgttcagctgggtctattttgcctagcagtatccatattaaaaggtagacatttcaaggatcttctagtattcaaaaccaccactagcttagcacatacacattaaactctagatgttgaaattcattgtacattttgtgtataaggtcagaatatttaagaaataaagactataatcaagttaaaagtttttgtttttttgttttttttttctgtttttattttattttattttattacatattttcctcaattacatttccaatgctatcctaaaagtcccccataccctccccccccacttccctacccactcattcccattttttttggccctggcgttcccctgtactggggcatataaagtttgtgtgtccaatgggcctctctttccagtgatggccgactagaccatcgtttgatacatatgcagctagagtcaagagctccaggatactggttagttcataatgttgttccacctatagggttgcagacccctttagctccttgggtactttctctagctcctccattgggagtttttttttctgttttacttgctttttgtccttaagaactcttgactggtcactttttgtcatttcaggtctttcaaacatgatgtcagatggtgaatttttaagaacaagctgtggctcacccaattatgccgcaccagaagtcatttcaggaaggtattgctgccattaggctacttttgatgtgcctgttgttgcttatttctcttaagtttgttagtctgtactgtcgccttgaggatgtgatgtcactaacgaggacataaaagtaacacattggcctgtggtaactgtcatctccgaggctcgctgcctcagtctgctaacgtaggtctaggcctggaagcttctagcttgtgtacaatctaatctaggcctagaaagacttcagctgctgaggcttgctgctgggtaagcgcgccccttccttgttctttctgatctatggctgattcaactcagatgttttggctctcaaactcctctccacgataactgattcaatctggcttctctgggcttctcctgaatttgccctgcttgacctccaactctgtcatcgttctaatctggctccttctcagtctctgcttgttctgtcttcacctgtgtctggcttgtccttcctctgcaagctgtctctgtacatctgtcctggtacagtggcctcctctccctgcactgaccctcaagtacttcctctctcttcccgtgagaggttgggcatatcctattctgtcaggtctttttctgatttgtcatttgtctgccactcaattagaagttactttcaaacatgggtgctttcttctatgaactaactttgccacagggattaaaagtgtgtgctgaggccgaggcacatcacaactagaagcagctttttcagtaaataacacaatcttgaggttttacaatatgataagatatcctgcaacagaaagaagggaatatatttctgtacttgcagattttctattttatgaataatcacaaggagctggagagatggcttattggttaagaggacttgctgctcttctagaggactggaatttgggacctggcaaccacaatctgggtggctcacagttgtctataactttgcctccaggagacccaacacactcttggtttttgcaagcagttacatacatggatgcacctcaacacacacacacacacacacacacacacacacacactaataataataataataataataataataataataatagaaataaataaaaaaaacaagtggaaaaacaagtccatctttggaggagagtgttggtttgcaagtcacagtaaagtagttagaatgaagtgctttcatttttgtctctggtgggcgaattgaaagccaaccagctgtaaaggtggataagccgctgagaacctgcctactgcagtactcactcccgaggaatgctttacttaggcgaacattaaaaaatgtaacatgatgggcaatccttgctggtaattctacaccttctcatgacaccatctcaagaaaaccaaaccaaactagaccgcacagagagcagaacagagttacaagtgtaacgtcacgtgtagttgtataagtattcaaatagctggcattcatgtagtagcttcatgttttatgaggaaggaaactaaagaagtggtcctttaaaaaaacagaccagctgaatgtattgcatgcctatagcctgagtatcgcacatggatgccaagacagggctatataggcctggtatcaaggaaaatcgaggtgaggtgaggggcaagagggttataaaaagggagaaggaaggagagagactcatttatgttcagtcttgatctagatctgctagagattgaagtgtaagactgctgaactctgaactactatctagcactaaaggacggatgtattttcattagttactttttaaatagcgtgaaaacaaaatttaatttgtgttttatttccttgttttgttcaaggttcaagttcctcctcctcctcctctccttcctctccctcctcctctccttcctctccctcctcctctccttcctctccctcctcctcctcttcctcctctgtgatagagacagttcattaacaaagagaaggcacgcctaaatttggaagtggggtagtggtctgggaaaagatatttgcttaaagttgtaaaatttaatttaaaagacagactttattttaaaccatatatgtatgtgtgtttgtgtgagggtatgtgtacattagtgtaggtgctgacagaggtcagagccccccaaccccacccccccaatcctcacccttcagctattgctacgggcagttgtaagctgccttgtgtgtgtgtgtgtgtggggggggtgagaactaaaccagggacctctataaaaacagcgcaggttctcaatggctgagacatccctccagctcagagaatttattatttttttccattttttaaaattaggtatttacttcatttacatttcaaatgatatcccgaaagtctccaataccctcccccaacctgctcccctacccacccactccccctttttggccctggtgttcccctgtactggggcatataaagtttgcaagaccaatgggcctctcttcccaatgatggccgactaggccatcttctgatacatatgcagctagaaacacgagctccggggtactggttagttcataatgttgttccacctatagggttgcacaccccttcagctccttgggtactttcactggctcctctattgggggccctgtgatccatcccatagctgactgtgagcatccacttctgtgtttgctaggcacccgcatagcctcacaagagacagctatatcagggtcctttcagcaaaatcttgctggcgtagagaatttatttttaagatcaacgctttggctaggcttggtggtgcaccttacccaggaggttagacagcagtttgtctccagctcaggctccttagtgagacagggccagcttgggaataaataaaatgctcttgcaaaaacaagcaagcaaagaaagaaataaaaaacaagtaaaagtcaaagcaaacaaaaacacattgcttcctcattgctgctgaaacactaatgaggtaggggaggcctgttgctcgccagtgcccacaatcccgtccacctcaaccatttccttgtttaaatgcttcaaatggtgatggacctaatttaaaaaaaaatccctgtgctttctatgttcatgtgcttatttttttttgactgctcaaagaaaaggtaatgaagtgaattaaaaagattcatttgtgttttctatcttaattcctttgatttgagaaaaattcaaaatctagatgctacagggaatataactaaagaaaaaaggcatgcgtcatgttcaagcatgcataaaatgggctcttggggaaatgtacagtttggatgtctttccttgaggtctgtgtgaataggagcactcattttgagaacagtgtttactgctgtctataggaaggaagcactctcgtcactctgagggttcgttttccccctgaaggcagcctcggatgattcagctggtttgcagctagttagaatccgtgtctccagtgcttccttcacgtagacgcactcacgcacgaagagggcgagtgttctgtgagctccactgcccttggcttgcttctgcagctccagcttcctgaactgtgatgtgagggttttaggagaaatgggttcagagtctgtcactacagacttgaatcatgggcccagcgagttggctcagctggtaaaacatttgctgccaagtgcctagagtctgacccctgaatcctgggtaaaggtaggagagaactgattccacagagctgtcatctcagctccacacccactgtggcatgtgcacaccatacacacgcacatgcatgtgcacacacacacacacacacacacacacacacacactaaaagttacttaaaggtgagggtgggggaacaaaaaaggtacttaaaaaaaactatccctgtggctcaaatcaacattgatcatgatggctcaagggttgaccttattggtaggaagtttgagggtcatagtaaggtagtacaatttgacccatggatcacaagttacaaaatagcttatttttaaacaggtaatactgataagactagtatctttatgtgtgatgtgcaacaaccactatagataccatattctgaccactgatttctttaaaaattattttcttatatttttcataaagtatttgtatttgaagagtgttgaccgatgctttttgatattgtgattaatacagttagcattctctatgcagattgtacgcaggccccgaggtggacatctggagcagcggggtcattctctatgctttgctgtgtggaaccctcccttttgatgatgaccatgtgccaactctttttaagaagatatgtgatgggatcttttatacccctcagtacttaaacccttcagtaatcagccttttgaaacatatgctgcaggtggatcccatgaagagggccgcaataaaagatatcaggtaactcactttatctgcctacttgaccaaccagccaacaaaccatctgtctgtctgtctgtctgtctgtctggactgtgtagtcttggctatcctggaactcactctaaagacaaggctggccctgcctccctctgccacccgagtgcagtgctaggattaaaggcgcgtggtattaccattgcacagcaatattaggtgatttttaaaccaatgtatttttctaccttttcgagtctctagataccagagaaatttcattttattttttatttttatttttattttttttttttggttttttcgagacagggtttctctatatagccctggctgtcctggagctcactttgtagaccaggctggcctcgaactcagaaacccgcctgcctctgcctcccgagtgctgggattaaaggcatgcaccaccacgcccagctgaaatttcattttattaatgacacacttttcttgtggcaatatactttgagtcataggaaattgattattgtgctcaattgagtattgagaaatggctgcattgtgtatcatggtttaacctgatagtttaaataaggcatgactgatagtggcagctgtgcttcccgggttgcggtaagtcacgtctcatgaacactcagtactccctggccaccgtactctgtcatcagtgtttctttatttttgttttccttagttctttgatcttctgatgtctagagtacacgtttttctgatactcaaagtagaaggaactaaagacgaataataagtagaaaacattagggcacatgggactttgagctggattccttgccactgactccttatgctagaagtcctgttgaagctgggtgtggtggtccacgcctttaatcccagcacttggaaggtggagccagggagatcctgttagttcatagccaatctggtctacataatggtttcaggacagtcagctctgtagagagaccctgattcaaaaacaataacaaacaaaaagacctgctgaaaagaagtctccatgtcgcggcatggcagatggggaggcaaactcagttaattaaatggatattataaaatatgtaagtgggatgtatattcgcacatgttttagatatttttcataactgaaatgtgatagcaaatgctggatctggtggcgcacacccatgatcccaggacttgacaagctgaaagagtatgaccgtgagtgtgtttccagcctgggctatggagtgaagattccacctcaaaaaccagtcagatacccttaaaaaccattattcttttcagtgtttgctttgtttgtttgtttttaagttttagtatagttcttgttatggttccatgtcctttcatatatagaattaatgaatacaatatgaaattgttcagaggttggtcttttgagtcatagaactgggttgaaaggacgagggtagattttaaatggatgaattgtttatcgtgaaactcagcatggagtaagaatgcataggatgatattgcacactgtttttgttagtaagctcttttcctataacatgaaatagtgtaaaaagtgaagccacacaacatagtttctttctgggctggaaaaagactgtcctcagtcattgtcctttgggtagacataccaaatttggctgccttgatcctcaaaaattagtggcaggggactagagagatggctcggctgttaagagcactggctgcttttccagaggtcctgagttcaattcccagcaaccacatggtggctcacacccatctacggtaggttccaatgccttcttctggtgtgcaaattgtacatacagacaaaatacccatacacataaaagtatataaataaaaaataggttgtagactaatgtttttctcagcatattcaatgaagtatgagctagaaggggaaaccagtttaaagagaacaactgtaataatgtagcatgagtatgaactcattcatatcctaaactctggaaactattacttttattcttggtttaactgaaaacccttcttccaccattgctgtctctcttagggaacacgagtggtttaaacaggaccttccgaagtatctctttcctgaggacccatcttatagttcaaccatgatcgatgacgaagccttgaaagaagtgtgtgagaagttcgagtgttcggaggaggaggtcctcagctgcctgtacaacagaaaccaccaggacccactagccgtcgcctaccacctcatcatagacaacaggagaataatgaatgaagccaaagatttctacctagcaaccagcccacctgactctttcctggacgaccaccatttaactcggcctcaccctgaaagagtaccgttcttggttgccgaaacaccacgggcccggcacaccctggatgaattaaacccacagaaatccaaacaccaaggtgtacggaaggcaaaatggcatttgggaattcgaagtcaaagccgacccaatgatatcatggcagaagtttgtagagcaatcaagcagttggattatgaatggaaggtaagaaggcaagtgctctctctgtttggtgagcctgtagccaaagccctttgtaggagaactgatgtgatgatgtgcctttgtttttgtccatatccaatgctaggttgtaaacccctattatttgcgtgtacgaaggaagaatcctgtgacaagcacattttccaaaatgagtctacagctataccaagtggatagtaggacttacttgttggatttccgtagtattgatggtatgtacacgcagaaccctggaggtcatgtagttatatagcctgcttacctcatttgctttatagtctttgttttctttctttcttttttgaataaaaactaagcatgcaaagtagtaagcttcatatggcgccttcctcccttctctctctctagcttttctatcctccctccctccctccctccctccctccctccctccctccctccctccctccctccctccctccctccctctgcatgtgtctcagaacacatgggacaggctgcagaagtcaatgtcaggtaccgtcctccttcaccttccatcttgctttggagacaaggtctctttgcacacgggtggttgcccttcagggtacactcacgggccagcaagctccagggatcatttaatttccgacttccagctttggcgtaatgggcgtgccctcgctggcctggctttgacatgggtctggggatcagcggcagggcctccttatctactgagccttctccccagccccccagtgcacgctgccatacatgtcctgcgtccttggcatcctcctcactgccctccacctcagctatgtcttaggaagcttcctggccttttcctgctaattcataggaaacatgacttcctatgttctgcaagactgacgtttgtgaaacctgttattcttgctccatgtagcatattgatttatagattattggggctagggatttaggtcagtattgaagttcttgcttcactggcttcaatcaccatcacctgactattgttctgtaaaatctttaaaaatatacagggtttttgtttgtttgttttgcttatgctctaagtgatgtttgagaagctgcagggtaagagcgctgatctgaggtggggagggtcgagctcttgagaggtgggaactgtccctttggtgccttggacaagtccctcaacttctggctttttatatctgtaaaatggttcctaggtgagacaagttccaagatacctttcatactgcaagtgatcgattctgtattttttgttttgttttgtttttgagacagggtttctgtgtagctctggctgtcctggaactcattctgtagaccaggctggcctcaaactcccagagttgtctttgcctcctaattgatgggactaaaggtgtgcttgccactacccagtgagtctgtggttttaataaatatctcctagcagtgatattaatttacaggttattagtttactgtttcttagttggtgtgaaagtcaagagtgctatactatgtatcccatgttgactggccattgtatgtattttttgtgctgtgtgtagaagtggtaaggtgctttacaaaggcacgcttgctctatttgagaatgtaaataaaaccagtgtgctttggagaactggttagtagtctcacttaggtgctgcttaaacacttgagggagaaatagataataaaacattgaaattctttccacccagatgagattacagaagccaaatcagggactgctactccacagagatcgggatccatcagcaactatcgatcttgccaaaggagtgactctgatgccgaagctcaaggaaagccctcagacgtctcccttacctcatctgtcacctccctcgactcctcccctgtcgacgtagctccaagaccaggaagtcatacaatagaattttttgaaatgtgtgcaaatctaattaaaattcttgcacagtaaacctaaaattttgcttatttctttgatgcaataagcatgcataataaataatagccaaatacttccacttaccaagttatatatatgtgtgtatataactgaggattggccttttggaatgcagtttgcacagggactggaaaacgattgatcgttaaaagcctgatgtgcagaattgaatgaggatcactctgttatcccgtattcagtaggtacacacagcgtaacacacacacaatggactgtaggtctcaagcttacttgacttttggccatttgaatttgctgtaacaggtctcagtcgaccataaatttaccataaagccttcacatattagtacatgttgatgtattttatattagcttcatgaatttattgagttgcctggaatcctcatagaccttattagataatgctgttttctgggctccttaacttccaaaatagctactagtttccatttttggttacattgtgaactatttccatattcctcttaacatgctatttttgtgtagtaagtcatttcagagagcagtctggatttaacatttttctttggcttgtgagcccccaaagccccagaatttatatgttcagaccctccaagccctgaatttactttttcaggtttgcccttttatatatgaagtgctgctttggatccaagagccgagttgctcacactgtagtgaatcgtgttgcttctgtcagtgcacagagacgctatcatgtcagccagtgttgaatgtctttggtattttctaagccaatccagtgcatagaaaggacagtgtttatacgctctgaatgctaggattggggttttagcccctgattttattctggacaatttttaaagaaagaaaagttgcaagaatttagtgactgcatgtgtatttactacttagctcctacaactactgtttggccatatttgctctctagatccacacatgtataatatacagatatgcacatatattcgagtatatgtttgcttttattctgaaccactgagatgttaaggtatatatatatatatatatataccagccctgaatacttcagcacttcctaaaaataataataatgtcctttagaaaccttctgaaaccattataaaatcaataatttccagatagtgcctggttttccagattagctgtaactgcccagaattccatttaagttacagcctgattttatttgcagttctttaatcaggttaataacactattttgaaaagatgtagaagaaatcctttcttcaaactggccaagtttatttcaggttttaattcaaaataatgagtggctaaagaagtgtgatttttcttcaatctctgatttatatgcctctctccttttagtggtagcatagcataatgggtgtaagtgaagatttaagtcacgctagacaaagccggtattgtgtgagctaataattaatgtcatattggccatatttggtttcctttaagtttaggaaattggtcagaggctctagcccagtggtgaggctgggtcatctccagcaacgtgaaacaaaatgcattttctttaaacattaaccatcccccctttgtaagagagacttttccccccactgcattcatttaaaaatattttgccccatccccaaacctgtccagcacttatgtaagaacgcatttggaggacatgatagcttgcataaaagatgacgctatagtttatgcactgatttccggacaaaaatgatgcttctttttgttcggggcttgttttattcaactccgaattgaatgctgtataaagtaatggagactccatttacctgagttcctgactgtatttatacctgtgtgtttgtgccctctgtgtggggctccctgatgtcacgtatgctgtctgaatgcagcgctgtattcccgctgtgtagaacagaaggctgcatttgtaaagttatagatttgtaaataaaactgaggaatatctctataaactgttggggggacggggcacaaaaggaggagccaactaaataggaccttctaaaatttgttaattttgtaatctttgcttcttttataagttattctgtgattccttttagttaccgagttttattttgaagacattaaaatattgcacttgtataaatagtatgataaatgcagactattgcagtcaaattttttaaaagctaggatatctgaaatgacaactttcagttaagtatgtcaagcccaggacaggattttcacaaatgtattgtagtttgcaaattcttacactgaaaatgtaaagggagtcaatgcaaatgatttttaatcttttttttattatcttttcagcaatttatattttcttgtgattttatgcaaccatatttttactttgtcttgacaactgaaagctgtgtgatgtttttgacagaaaagtactgtatacatagttttaaatataacagattttgctgatatgtaaaaattttgccattaaagttgatttctcatgaaaggaacttttctaccaagtcgggagacgcaagagcttaatatatctaatttaaaataatttcactgaaataaacaccattgcttttactttgattctatttttttcttaagatgcttttatagtgtttgggagttttagataattttatatgaattctctccctaccttgccccatcctttggatctttgataccattcacaaataaactcatgtggctgggtgtgtaaagatatgtaccccaaggggcatcttgggaaagaaaaccataaattcttctccttaactcctccctctgcctgttcattgtgggctctgacatgatgaatggaatgccacacacagcctgactgtaagccgttgttgggaggagtccaccattgtggcttatgtatgtttgcccagagtaacctgatttagaaagatggcataataaagaaaaaagttcgtttttcatttgtta

SEQ ID NO: 38 - DNA, 58478 bp, Homo sapiens
gcggcggcggcagcggcggagaagggagcgggaccggaagggtcgcagcgccccggcgcccctcacacccactgcggcggcggcggcggcggcggcggcggggcggagcggagcggggcgggccggcggcggagccggggccgcggagccaggagtgactagcacgcagcgccgccagtccgcccgcccgccctctccccgtggcgcggcggcggggaggcgaggtgagcccggcgggcgggctaggcctggcggcggctgctcgggccgggcccgcggggaggggcggtgagggaaccgcgcggccgggggcttcggggcgggccgggggctgcggggccctggcagccgcagccgtcgcccctgtgctgggggatgccgcaggcgcccccttccgcccggctgtcagcagccccgggctgcgggcctgctcaccggcctggcccggccgacctgcccgtggggtctgcgggcgccatccctcccggaggtggggcagacagctgcactcctgcgccgggtgcccaggggcccggggtcgcgtccccgcgaccttggccaaggcactgaccctcgctctgccgcggttttgccttcgggaaggtggggaaatgtctcttctggacagggttgttgtcaggctgtgtgaatgtatgcagacgcctgggcaggaccccggtgtgcatctgtggaagactgggcagggtgctggcccgtgctggtgtgagtggtgtaggaaccccctccccacccgcccagcctcccgcctccccgcgcactcctctcttgccttgtcattgcacactcggtgtccagcagtgccagaggggacccagcccgaatcccttaccaccgcgcccctcccccagaagactgctgccccgtcccactcatctcgcccgccttgaacatgccagcccgcatttgccccaggacctttgcatttgctgtttccccgtctttggagttgtctccgtgatcttggcacaagtagctctttctgctccttcctctggtcagatgtctcgttttgggtgaggccctcctcgaccaccctctttcttcccttagtcatgctatttcattatttaaaaaatttccttcctagctctcatctggtttgaaactattctatttatttgcctgcttattttctgtctccccgactaggatgtaactttgtgaaaacaggtagctgtctgatttgtccactgctttatccccagtgcttagaaagcacacaggaagtattcagtagtatcagctcaatgaatgaatgaatgatcaaagaaatggcccagcctgcctgttgtctctgctttatctgttcatttagtgacttctgattagcgtgtgaaacttgtaagcagatggaagcttgttctattttgtgaaacattttggtgtccttgacccctttaattgctaactgttggaacaagctgtgatataaaatctcacatttttataatagtttagctgtagctttcttccacacatacaagagacatttactgaattctgcattatctaggtcatgctttctgctagaccctacggacacaaggcagatagcaacggggtccctttcccgagagagcccaggagcccagtagagaaggcaggcatgcagacacttagttccaggactgtacaacccttgctataggggaggggctatgccatggaaatgtggaggaggtgacaggtggtgctggggggccttgagggtgataagaaatttgctaggcagggagaggcacagaggtgtgaaggagcagggccaaggaaggaccgtaggccactgtggagttgagaatcagtctggagggccaggtgtaaggacacagagtcgtggggaccctaaagaacaggaaccttacccagcagttttctagaagaaggtggaatttggctgggtgccatggctcacgccagtaatttcaagacactttgggaggctgatgtgggaggatcacttcaggccaggagttcaagaccagcctgggcaacgtagcgagatctgtctctacaaaaaattttaagaaattagctaggtgtggtggcatccacctgtagtcctagctgcttgggaggctgaggtggaaggatcccatgagcccaggatttggagcctgcagtgagctatgatcacaccactgtgctccagcctgggtgacagagcaagaccctgtctctaaaaaggaaggcagcactccacatttgttctgatttttaaatgttggcaatagctaattaaatttttttttaatgctgtgagccaagccaaatacagattcattcagcttggttgcaggatcgtcatcctccaggactggctgtgtgggagggaggagctgtgaggagagcaggaaaggtagcctaaggccaggggagccaggccctgtttgcccaggtgccagcccagatactcatttgattgtaactggagccctgtggaaacggaagctcaggagtctaagtagtctgtttcttagcaagcagctggtgagtggagttcgaacccagatcacttcccagataaggattctttcctgggtccctcagctctgagtattctcttttggcttttaacttgttctggaagaatgaccaccaatctatttaatgttttcctccatttaacttttttttttcttcaaaaggatcctgcagagttaaaaacaatactatttttgcatagacttctcttttgacagctttgattttcctggcaatttaattttcagggtgccaggactttaatttgttcacagattaaaatctgtttatttggtcccgtaaataaacaacagaggggatacttgaatgtgtctaagataaaatattcttaattttctggataaagaaaaggaccagacaaaccagttaatagcgagtaaaccagttgttttcatgaggcataagataaaacagagaccagattttttttcttcttgagactattgatttgccaatagggcaactatttttggtctacatacatacagtagttacacctcacacttggttaggaaggtgccatttttacataattttccttcagaataattaattcctgatactttgtacttgattgtatgaaccagtttcaacatcattctttttattttaacttttattatgggaactttcaaacatatacaaaataaacagaatagtgtcctgctttaacagttattaactcctgaccaatcttgtttcatctctaatggtatccacttgcacccttaccacccataattattttcaagcaaatcctaaatatcatgtcatttcattcattattttttgggatactaattacacagtgggtgcccagtaaatgtttggtaaagacaaagctaaatgggagaataaatgtggtagggtagctcggagcagtgggtaagatcaggactttgagtcagactcccagtgggtctgctgcttatctgggtgatgtgcagaagcgattgcactcatctgtaaaacatacgggcacaacctcagggtgctcaggaggtgtacagtagttatacttcacacttcggtaggtctctaaaggtactgactcttttaaagttgaaaaagtaataattgcttaatatcatcaaataactagtcaatattcaaatttccagctgccccatgaattttaggtttccttaatagtttgaaagtagagcaagagaaggccatacgttgttgattggatgatacgtcttttaagtttctcttaatccatagatccccctcctatttctttgttttcttggtagtttatttgttgaagcaatcgagttgttccttagcatttccatagttggtatttgattgattgcatctctgcagtgtaattgaatgtgtttctctgtaatctctgtaagttagtaattggatctagacgaggcttcgtcagatttagggtgcattcctgcatcaagatgccttcctaagtgggctgtgcacttcttatctagaggtaccctgaggctctctgctcgtccgtgttgcagatgagtgcaatcgcttgctgcacatcacccagataaatagcagacccactgggagtctgaagtcaaagtcccgatcttaaccactgctcccagctgccctaccgcattttttctcccatttagctttgtctttaacaaacattttttgggcacccactgtgtaatcagtagaggattgagaaataaatcagacacattttctgcccttacagagtagaagtgtaagtagactcggaatgcaatctaaagcgaatactgggagggtggcaaaaatgggggcatgcccagcatggtttgaagggaaaggctggaggaggaaacatgtaagagaagcaagtgcttgaactagatttttgaaggagggtgaatgttgaccagcaggtcaaaaaggggagggaagtcatttcaagcagatggaacagcttaggcagaggcctgaaggtgtgcagtagctgggtgtgtccgctgatcccaggtggtttgatgttgcctaagattgggccagaggactgccatctcctgtgctgtgctagggaactgaatcttattctccaggcagtcagtcactgttgaaggagttcaaatgggagaatggtgtgatcactgcacactttcaacaaatctctcttttttctttccatattttgaaataattatagattcacaggaagttgcacaaatggcacagagaggtcccagtacccttcccccagctttctcccacggttacatatttacacaactgtagtaaaatgtctaaaccaggacattgggcatcggagcaaggtgtatagagttcattgtcattttttatcgtgtgaaaattcctataaccactaccacaatcaagattcaaaactatgtcatcatcccagatatctccttgtcccacccccttacagccacagcagccccttttccccaccattcataactgctggcaagtactaatctagtctgcatctctatacttttgtcttttcaggaatgttatatgcatggagttatacaggatgtgactttttgagattggcttttttcgttgactatcctgcccctgagatccacccaagttgtggtatgtttcagcagttgctgagtggtattccatggtatgggtatacagcagttagtttaaccatttacccattgaaggacaggtttgggttgtttctagtttggcactattaaaaataaagctgctgtgaacatttgtgtacatattctcacgtggagtgatttctctttctaaagtggcatgtgtgcagtggttcggaagtcacagaaatggtggctgggagaatgcttctgctgtcgctggtccaaggagccacgagaagcccttacccagggccctgggagtgggggattgagagggaaataggcaggcctgggtgcctggaagtggggctggtgacggagatccttgcagggtcctatggatccaacagtgggtgaagtgataaccaaatgctagttgttctgtattgtggtatatactgtggcttaagaactacagaggatggccctgagagctgcaaggttcttgattatcaaagaaagattacgttgttataccaagctattcttcataagaattacagtaggaggccaggcgcggtggctcacgcctgtaatcccagcactttgggaggctgaggcgggcggatcataaggtcaggagatcgagaccatcctggctaacacagtgaaaccccatctctactaaaaatacaaaaattagctgggtgtgctggcgggcgcctgtagtcccagctacttgggaggctgaggcaggagaatggcgtgaacctgggaggcggagcttgcagtgagccgagatcatgccactgcactccagcctgggcgacagagcgagactccgtctcaaaaaaaaaaaaaaagaaaagaaagaataaagaattacagtaggaaaatagaactttttaaatttttactatttttttttttttgagacggagtctcgctctgtcgcccaggctggagtgcaatggtgtgatcttggctcactgcaagctccgcctcccaggttcacgccattctcctgcctcagcctccctagtagctgggactacaggcgcccgccaccacacccggctaattttttgtatttttttagtagagacggagtttcaccatgttagccaggatggtctccgtctcctgacctcgtgatccacacgccacagcctcccaaagtgctgggattacaggtgtgagccaccgcacccggccagatttttactattattattattattattgtttaatatagagttgaagcctcaccatgttgcccaggctggtctggaactcttgggcttaagtgatcctcccaccttcggcctcccacagtgctgggattacaagtgtgagccatcttgcccagctggaaaacagaacaatttaatgaaaaaaatgtcggcagcaagcattgagacagagggtgattgtgagaatctgcttttaatcacaatagttagttgatttaaatatcgcatgtcctgggtactctgaagctttagtgtgatgaaaggttcacttgagtctgtggatcactgaatcgttgtcatcgttagaggaaaaagtgttttggtaggttttggtagggggagtcagcaaggtgaaatgtgcaggactgtgtgctggtcctggccagcccatgtgcaaatagcttcactttctaaagggatatcagaatggtgctttgggaggaacttgaatattgtggtgaaacactcctaaattcaaatctgagccatgctgggaatttggacaacttccttactggacaacttcctctaagcctcagtttcctcatttgcagagcggggatagtaatatgcttctcactagttgttataagggtgttgataaatgtgtacctcagagccaggcccactctcatgcctctagccttatctgcctgaagcccgtcttccatacaagtgtcaaatgatcattctgcagcttttcatttaacatgtgttgtttaatcagtttttaaatgtgaaatatgtacatttgaaaaacagaatagaaagttataatgggaagaaagtttctcatttcccactatttctctacttgccagcattgtgtatgtgcgtgtgtatgcgtgtgtgtgtgtttacgtagctgggcattatgtgttctcttcttcaacttggtgtatttcctttctgtatcttagacatctttccacattgatacataaagtccttgcattctgttgaatggccttgttgtacttctgtgccataatttattcagtccatccacagtgtgcattttagattacttctagttttttgcctgttacaagaagtgttacaaacatgcttgcacaaatatgtttggatacttgtacacgtatttgtcagatacacttagagaattgtgtttgccagtttaggatatgcagttaacatttttattagccagatctatattccatctaaaaaaatgttttaccacttctcagctctcactgacgtgtatgaaagtgcctgtttcctcatgcctcggtcgatactgtgaacaaacttgagctcaggtcttgcctcctccaggaaacctccttgtagcgttccctcccagttttgagttgctcatagcctggaagggaggcagaccctacaaaggctgtgacagtgcagcctggcgggcgctgctgagtgcacaagtggcaaggagggagccctgtgctggacggatggtggcagcacagcctgggagctgagggggaggaaccagcaccggctggtgtgggaagtggaggcagcgaatgcaggctttagtgtattgctaatgtggtttcatgaagaattcttgtacttcccgatttgtaaaactgttttctgagccccagttgatggtccattttgttgaaatatcatctcaatagagttgactcatgaatagctaaattacacaccttctcaggtggccttaagtttctttctcttgctctcacaaagcccaaacttgacagagaaggtggctttaacaggttttcacttaggtgacttttttctcctgcataataagggtaccttattttaattttataattattttaaatctttttgtttgtttgtttttgagatggagtctcgctgtggcccaggctggagtggcacgatctcagctcactgcaatctccacctcccggttcaaatgattctcctgcatcagcctcccaagtagctgggattacaggcacgcactaccacacccggctaatttttgtatttttagtagagatggggcttcaccatgttggccaggctgttctcaaactcctgacctcaagtgattcccccacgttggcctcccaaagtgctgggattacaggtgtgagccaccatgcccggactattttaaatcttgagatggaattacaattctaaaacctaatatgagtgaatatactccccaaatttaaaaaagttaacctaatattgtcatagtccaaatataggttgaaagcagttatagcagggagagttgcagagttggtcagcagggttgagattgatctgtcagtcccaacgtggacacggggtcctgaatggggggtggctctgtgccatgaggtagttaaggaatccagctggtgggcagctttccatctacagcatgtgacttccatctctgggtctgtgacagctgatccctcagccagcagcaaggaagaaagattggagggcaagcagctttctgtaaagaaaaataaaagtgatctggaagttgcatacatcacttctacccacatcttattagtcagaacttggtcatctggccatacctggctgctgggaaagctgccaggcgtcgtctctagttgggcagccatttatctagcaggaaggggaaggaaggcttctcttatgaaagcgaggaagggagggatggatcctggagcacctcagcgcctgtgtcgcacctctgatgttttgacggcttccacagccctcaggactgaggccagacggctctgcgtggcttctggggctcatagtgatctggcctccttttctctctccagcttcactcgccctctacccagcaagtccctagtgacttgtcacattccgaatgtgcctccgcctctgctgcttctcctcccattcccccaaatcttcttcaccctactgggtttaggacccttggtgtgcagggcctcctcctgagtgtgcgctcactgagggcaggcgagtgtcctggcatggtacctcaccatccacagcgggtgctcagtacatgcttgcaagtaactgtgttgctggtgtgttgacggcatagcagaggaacagccaccctccgtaaagcaggtggtagtgggtgcctgcctttttgctgagttgtctctaatcctttgcacttgtaccccgctagccaagctcagcagttcgctgtgtctggacacagtcagtttgagctctgtggctctactgtccatctctggcaaaagagtctgagggcggatgccgcctcctccttgaagccgtccttgtcttctgcccctgccagtgggtaggatctcttttgccttttgattttgtttacattgtgcttatggcccttaccgcactgtgacttgtaatatagataatggactcactgctcgcgcttctcccccaaatagtgaagtacatgttgtttcaagactggttgctagctgactatggcatatcttttgctatacttaccactttcgtgcataaaggtaccccctaaatgttgagtggaattgtttcagcctcttgcaaactgtaaataagctaatctttagaaaggatcttcctttagatatcagtaaaatggagcagcactgtggggaatcagatcaacaaaggtttattgaatgctcacagtgccccaaagaccagcttcctgtcctcctgtccttggagtatgagatgccatgagcaagacagacctgcctcgcacctcctatagcttagagcacagtgacctgccagcctggagagctcctgagtccccttctcacagcagtgtgggctaggcaggtgttccagctcactcagccctagattgctcccaggtaacacgggactgagactcctgcggtgcgggttgtatgagcagctgtttgtccagcatctaagcgctgtggcgtcactggagtcactccctggctggcacgctaacacacctcggcaggagtggtcagagtggcagccacactgcagccaccacccagaggacggggagaagaccgtggggcagtggtcacttggagaaattattaatttgactcagttctttatttagacttgttattaatccattttttccatgtttaaggaaaatcctagcatttgtgttgaaatataaatcatcaccacaaaaatctcattaggttgacgttaaatattagatactagaacataaaggcaagggatttgacagagctgtagaatacattctgtagtcttaaacggtatagaatgtttacctatatgattttattgttggctatgtagttttaaaagaccaaaataaatagcttgctgacttttaaataagcataaccagacacgagcctaggaaccacttgccaatttgtttgcttgttttctgtataaaatcatccaggctcctgcagagcagcagtctcagcctgtgcctcaaccacagaaaagctgctttctgggcctgctggcctacactcagacatagtggatagacttcctagtgttactatgatggactgtcagtcacagcagagttcttcatatacagatctctaccctgaagtccggtggtgatgtgggactctggggctgtgccagctgatgccagctctgggacccacctcctgaggcaggagcacgtgcttgggcacatgcagcacactgatgccaccaggcctctgacagcctgtcactttggcgtatgaatcttgctttttggttcatcatttcaaccagaatctatacactgagcagaagactggtccgtttgcttctctttaggcattctagaagtgatcatttttgaaacaatgcctccgtctctagacagctaggtgtaaatgaaccatttacacctagcttgcccacagggggcaagctgatgagacgcacagagtgatgtagtcttttcatagccagtagtaatgcatacattcttttctccaaaggtggttattttctagtccagccccttaaagtgtggtcttgctgggcctcaaaattccttcctttcataatggtctggtaccactgaaatgtctgcatttttttgtgtcttgcttaagttcagaacttggtcagattgactttatcaacttacagccacattgtcttacataccaataagttcagaactctcttacgtgagctgcgtatgtacttccggtaagaatgcacgttcattctgtttttctttgaagggatctgaaacttgcccacccttcgggatattgcaggacgctgcatcatgagcgacagtaaatgtgacagtcagttttatagtgtgcaagtggcagactcaaccttcactgtcctaaaacgttaccagcagctgaaaccaattggctctggggcccaagggattgtttggtaagtatggtctgttttaatagcgtggattgagtttttgctgtaataaaaagtaaaactaaagtgtcaggatttagaaacattgatgattaaaaaaaaaactctgttataggtttatgagctaaattgaatcaactgcttgctctagttctgtgtagtcaggctgtagggtacaaacccatattcttagaatgctgcaggaatttaaataggtagcaagttttcttttttgtttgtttctttttcctttcattttttttttcatttctcctgtcattatgatatcagagtagtaggtatgacagtgagttgtaacagaaatttggagttttattcatttcttcatcatggccaccttttcccccctccccttttattcccgatcactcctgttcatttccaggcgccatcattgcagtgccttgccattcattggcaggatgaggccagtcagtgtcattgtcactccatggattaaccaggaagggatgctgtgtgaggggttgggctggccatctcttccttggtgtctcacttcaactgtgtgtccagcccagaacgtcagaatcgttagtctgaccctgaacgttagtctcttgcatggtaagacggtcagccgccgcagcatcacgggccagctcaaggtaaagctcttcacatgtttcctagactgcagctatcagcacttcccacactttttaccccttatttttctgggcagaacttttttttttctttttctttttctttttttttggtcaatgaaaacaggattacctttgcgcctaaagaaaccgtggtgcagttaaacatcgcgtgtttacagctggtaggcagagggggttgagggagaagaaagctcttttcgatgctctagtagggtagtttacatttccttgtagagatgttgggtttggagaatctttaacgatgatttttaactgatcctttgttgcggagacctatgatcagggaaacagttgtttttttcagccctggcggctgaaggccctgggagctaagaggaaattgcagtccagagcttctttgagaagctaaggcgggaaagggactgtttggaaggaatgcccagcttgcatctaaagtaatggtgatcttaacttcctgatgacacatgctgtatcggcacttaaatccagtgtgccagaagaagtgttaaaggtggccgggcacggtggctcacgcctgtaatcccagcactttgggaggccaagctgggcagatcacgaggtcaagagatcgagaccatcctggccaacatggtgaaaccccgtctttgctaaaaatacagaaattagccaggtgtggtggcacacacccgtagtcccagctactcgggaggctgaggcaagagaatcgcttgaacctgggagatggaggttgcagtgagccaagatcgcgccactgcactccagcctgggcgatggagcaagactccgtctcaaaaaaaaaaaaaaaaaagttttaaagttagtggaggatggttcaaattaggaaactttgatggtaatggaaagttataaacaacaaagcattcttttggtttataacccatctcctatttggaattagatgataatttgacagataatttgatgtgtgcatgcgagagagagagagaaaaaggagagagggggcaagaagggagaaatgtcggaggtcttggggagttgtttgtggctatagacaggtagctgttttatttatttatttatttttttgagacagagtctcactttgtcaccaggctggagtgcagtggcgcgatctcagctcactgtagcctccgcctcctgggttcaagcagttctcctgcctcagcctcccggtagctgggactacaggcgcacgccaccacacccagctaatttttgtatttttagtagagacagggtttccccatgttggccaggatggtctcgatctcttgacctcatgatccacccaccttggcctcccaaagtgctgggattacaggcatgagccactgcgcccggcctacaggtagctgttttaaatacgtgcttcatttatcccagctggcatgtcattcacttgcttttgaaggttggtagtaatgtgaatagtgtatattgtagaatcaccatgagctctgccataaccctcactggtggtgaatcgaaggactaggaaggctcacttgcttctcccgtctcacggggtgttagtggtaggcctgggaccaaaacaagctgtgggcctttgggaccttattgcctgtaccacggagagacttgttgaagactttgaaccactgatactttgataggtcaaggcctctgacccaccttctgtttagaatcttagtaataatgaacaaatattcactaaacacctattaaacaattttcatttaattgtatttatctctataagacaattgttacattcaagaacagtttcaatttttatagctataactgactttcagttttatggtatccttctatcttatgttctaatagggaaagtaaacactttataagtgattttcgcttccttttcacctttctcttttctctgtatccttcaccaggctatgaggcaccaagtagaattgggaaataatctagttacggcacattcccgtttcaaaaaagaaaaaaaagcttgcttttccaaaaataagctcaacagtagattagctaacactgacaagaggaattggattttctatcatatttcgtattaaaatattggcattatgtagttaattgatgatctgaaacttcctttcatcactattgtacttgaaaatcatctgtcagtgattctttggggagtgtagcatgcagaataatggtcccgcctgagatgtccacgtcctaatccctggaatttgtatatttctttacatggcaaaaggaatttagccggtgtgattacattaatggtcttgagatgggagggttatcccaggtttagttgggtgggtccttcttacaaaagggagacaggaaggtcatagtcagagatgtgatggcagagcgaagtttggagtgatgtggggccacagccaagcaatacaggaagcctccaaccagctgagagaggcagggagcagactccccccagagcctgcagaaggagccacgcagccctgcttacctcttgaggcataagatgcattttggacttctcacctccagaactgtaagatagtaagtttgtgtggctttaaagcagtaaattggtggttacttgttacaatagcaataggaaactaattcacaagcatgtgtatttctacatttttgagaaatataacagcaacagtgtatggtttatgcaactagttaatcttctatttaaattagagctttatgaagggcaggtgtgcagataaaccaacgtgcaggtagggcctgtgacctgtacaggattaaatggaagagctggagccagaagaaaatattctggttcctaattttgaattgtttttatagttgtctttgatttgtttatttgtttttgttcctttaaatatgttagtaaaatttattaggaaataagtttttaaattttaaaatattttattttatttttgagacggagtcttgctctgtcaccaggtggagtgcagtggcgtgatcttggctcaccgcaacctccgcctcgcgggttcaagtgattctcctgcctcagcctcccgagtagctgggattacaggtgtgcgccaccacgcccagctaattttttgtattttagtagagatggggtttcaccatgttggccaggatggtctccatctcttgatctcgtgatctgcccaccttggcctcccaaagtgctgggattgcaggcatgagccaccgcgcctggcctaaaataagttttaaaatataattttgaagtattcataaatatcaactgtgttatagtacaattaaataattgtaagattttgaagctctagtggagaaaatgtatgtacatttctttcatacatatattcagtttttctttctccttcaaaaatctcaagtttggccaaaatagtaaagattatttgctttacgaaaccattctatgaaatgcttaacctttaaaaaagtgttcaatattgagtctggcggttcttagaagtaacagttacagccttaacatgaaataattggtatagcgtgttcctttttgtgtcctcaagttctgtataaacatgagtactggcctgttcttaacatggtttattttctattaatataaataaataaaaacataacaatgttcacaacaaaatttctgtgataaaggagacatggtttgaggcacaggatggctgtgattcagaagacttgagttctgagtccagctcttttcctcagcgaagagttctttgtgagcagggcaaatcagtttctttatgggcctcaatattttcacctgtaaaatgagtggtttggaacttctcatttaagatggtggcccgaacacctgtacaaagataagagggcagtaataagtggaagacagttttaacaaatttatgaaatatagaaagtagcttgaatcttgtgatacagataaaacagcagataaagtgagaataagcagctgaagtatgtgcgtaaggaagagaacctagctatagtaaaactacagaggctgtgggcatagagatgacaatgaagaagagatgaaatgagtggctaaaactagggctgttaattaaaagtgtgcctgtgaaacagctgtgccagttttctgccaacattcccactgtcccccatgctcagcattttcccctagagagctagtaagttagtgaggagttactaggtcaggatctggggaagcacagaagcctagtgaggggagcttcagcatgtggggctgtctttcccttgggggcatttgaaaattctggaaggggctgttgagagagtgttttggactgccctgtggctaggagacagggatgagagtccagggccctctaatattgtgtggcaaacttcttttacttgtgttgggaccaataaaaggctgcttcctagaagtaaaggtaactcagagattggcccttataggcactgccactcagcttcagattatcatctcatttgctgaacttgtatgggggtaaacaaaaattgctagtgcccccaggtacctagtagaaataaatttaaattctttgtggaagaagacagcatcatattagataaaattatttctagatagcaaacagttttatacgtgcaaggcccagtctaggcacacaaggagatatgacaacatgaataaaatcctgcagaaacagcagacaaaagaaacagatccataggagatattggcattattagatccacatttttaaatagctatgatattacgttcaaggtgataaaggcaagattaaaagttttggtggagaaatgaaaacttcttttaagaggaataaatcaaaattctagaagtaaaaactatagtaattgaattatgaatttaatatgtgtaacagcatgctagatataactgaagagagatttagtgacctggaggagaggtcagcaaaaagtatccagaatgaaagctgcagaggcaaaaatggtagaagagcccaaaacagagaaggtgttagttttctattgctgcataacacattaacacaaacttagttgtttaaaacaacacctattgattatctcatagttctatagtcagaaacctgggtgggtttgcctgggttctttgcccagcatctcacaaagctgaagtcaagatttcgactgggctgggctcagctcacagatggaggttctggaagggtatctgcttccaagctccttcagcctgttggcagagtctagttccttacagctttaggtctgtggttcccaatctcttgatctctttcagtcaggcgctgctgtctgctcccagaggctgcatgttttccttctcaagtgacctcctccatcttcaaggcagcagtggcatgcccagtccttcccatactcacatctccctgattttccaccctttccatgagccagagcaaactctgcctttaaagggctctcgtgataagaataggcccacctggataatctgcgttttgttaaattaatgagtacgtttagcccttttgcaagatgcagggtcagtatatgtacccctccccctgcaaaattgcatatttatatactagcagcatatagaaaatgaaaatttgaaaaggataccacttaaaataggataaaaacttttaaattatcatatctggaggaaaaatctaacaatatgaaagacttgtatacaaaaagctaaaaaaattagaaaaaatagagaaaactgaaatcgtggtgggatgtctgattttcagagttagaatatttaataccatgaaggtcatttttcagacttgtctagagtgattgcaatcaaatctcagtcgtcttaaaaaacaaagaaatgaacaaactgattttaaaatttatatgtaaaaataaaaaccctagaatggtcaagacacccattaagaagggaggaacactccctctgcgagatgtgaagacttaccataaaactggtgatcaagctggtgtcgtgtggtgcaaggagaaacagtggactagccctgaaacagagtcatgcatgtgtgggcttctgacttatggcagtggtggcctgtggagcaatgaggaaaggctagccttttaaataaatggacataggaatgttcatgtagaaaaaagtgaaatttgaccccaacctcatattatacacaaaagtgaatgtcagttgaattgctgtaaatatataaggcaagccagtaaagctatttgaacataatataggagaatgtcttcatgatctttggggtagggaaggactcctttaaacacaacataaaaaaacatttatctgctggatgtggtggctcatgcctataattccagcactttgggaggccaaggtgggaggatcgcttgaggccaggagttcaagaccagcctggccaacataatgagactccccccatctccactttaagaaaaaaaaaaattatcatagaagattgatcaattttgtattaaaattaagaaatgttgtttattttaaaaaaccaagatcaagaaactgaaaagataagcatagatgtgagaagatatatgactgaaaaaaaatctcttgttcagaatatgtaaagaacaacagtcaagaagattataaagatagacaaacaaatagtcaataggttgtcacaggaggatacccaaataacctataaacaggaaaagtgctcaatgccgttattcatcaagatagtgcaatttaaaactgcgacgaaataccattccacactcagcagaatggttagaaactaagctgttggtgataccaagtgctggtgaggatgtggaaccacccagaggcagctctcagatgtgacccctcgtgtactggaaccacgcagaggcagctctcagatgtgacccctcgtgcactgctggcagctgtacaaatttgtagaaacgctctggcaaagagtttgacattatctactgaaatacaatggatacgttcccactcttagttgtctactcatcagaaacacatgcataggggatccggagctgcgtacaggaatggtgatgactgtgtgttctgtaatagattgaaaactaaaaacaactgaaatatctatcaacgtaatgtgatatagttatacaaaggaatcttatagcaatgatggaaggagttatagctacatacagcaacaatggatgagtcccataatattgagccacagaagtcagacacagaagatttcaaaaaacaggcaaaaataaactgggagctccagggtgcatgctttagctggtaaagcaagaaagtgattattgtacatgtcaaagcagttatcactggtggacaggagggacactaattagttgggggtgtgagaagcttttgggatacagagagaacatgactgataaatcattgagctgggaaacaaaaaaagaagcaaaggaatcagtacagtatcgggcataagcctcctcactgtcagcactcagtgtggaaatcagtggaaaagtgccttcaaagttctcacagaaaattgattttaaactcagaaaacttattatcaatcaagggtgggggcagagcaataccatctatcttccatgcaccttttctgaggaaattccttgaggatgtactccagcaagagaggcaacacaagagcgtaatgcaagaagcagtggggactgtgaaaagaaatcccaggatggtggctgcatggcaggtcttaaggaagctgcaagaagagtgtctgcaaatcatgtggaggagatgccagacaacaataatgtaagaagctaggaagtgccagtgataggctaaagagtgtctgcaaatcatgtggagtaggtgccacacaacagataatgtgagaagctaagatgtgtcaatgataggctaaaactggcattttttattagtaaaaactaataataatctagaatgtaataaaatctattatttattagaaatgtgtggggaaaactagaaaaaatcatggtctaattatgaaacaaagaggacatgatgtttgagcagttgatgaaatataagagaatcctttgtccttgatcctggaaatagtctcaccctcttatgagtggcagcaagagccatgtgatctttagaaaatgaaatgtaatcccaactctggccgttagtgatatttacattgtacacatacacacctacactccatgtattgattttcaacttctagaaacatcctaaagaagaaatacagaagacttagttatgaatatatggtaaatggaggagaaagggatggaacagtctcattttacgtaagcagaagtcaagacgttcccttcagagttgaagaagcgtgaagattaggggtgttacttaaagacgtaaccagggaaaacccaaaaagcagaacaacaaaaaaaataggaggtgttggcgattggggatttcaaggaagtggccaaatactcagttttcgtaatggggagtaggtgaatcatttctaaagctgataaatgaagagatagtgataacaatgtattctttgagtgaccgcaataaccacaaccaggaataactgaaggtagttcctcatggagctgagctacaagtggggaagcttatgcccacttagatgcttagacttggtccatttgccttgttttagccaaaaacttttttaaaatgacaaataaaaattgtatatatttatcatgtccagcatattgttctgaaatatgtatacattatggactagctaaattgagcgaattaacatatgcattacctcacatactttttaaaagtttctgatgagaacaaatctactctcatcaattttcaagaatacaatacattgttattaactgcagtcaccatatctcacagtagacctcctgaccttattcctcctatctaactgaaattttggacaaaaacttttgataccaaaaaagtgtgtctgttttcaaattctttttttctttttctttttctttttttttttttttgagaccctgggcaacagggtctcagtctgtcacccaggctggggtgcagtggagggatcagtgctcactgcagtctcgacccccggctcaagcagtcctcccacctcagtcccctgagtaactgggtctacagacatgcaccaccacactcagctaatctttgtattttttgtacagacaaggtttcactgtattgcccaggctggtctcaaactcctgggctcaagcgatctgcctgccttggcctcccaaagtgctgggaatacaggcataagccaccacacctggcctattttcaaattcttgagtctgagaagtatataggtataaatacatacatggctacatgtatgtcaatgacttgtttcacaagtggatatatccttctcattttataattcatataaatggtgcaatttgcatatgaacctgtggatttacatatgtatatagacagacacataatatgaactgaattaaagtaaggtagcttcttaaccaaatgctacaacagatagccttcaactttaaaacagattgaattaggttcgagtttggcaaaagcattaatagaagagaataaatgtaaacaatgttataaactcaatggaataaagaaatagaaacagtatttaaatcagtgcttaggttctcaggtggcctttagtagctgttagccctcatgagtagcccagaggtgataatacaaatgatactatttagtaccagtttgaaacctaaaaatgtgtaatcaggctacttgattcttcatgtctattttctggaggaaaatgaacagaatttcaacaggaaacgagatgctggaaacacagcctgtagattttattcttactatagtagtaggaggagatagttctaaaagaactttatatagcagttgcttacgttagagattttgtatcttgaacatttaccatgagctgaaattttggcttcttttctttttagatactgttatttgtgaaaaaaacacagtgattcaaaatttagatttattctcctcatgaattcagccatttcctctactgtgatattccaaaatatacacattttaagacaggaaacagtgactttgtttccaacttcttgtcatgtttaaactgaagatttcatttcttgactggttttatgcactctatattaaattacctggttttgaatgtaatctaaactatgaaaccttggtgtgtgaaggattgctgaaccccatcttaactgtggctgaaatgtgcctctgcaaaggagttagtacatgctgtagtcttagacaactcactctgctcttcatatgtgcaagtaccttgaatgaaataagcagatttttccttgttacttattaaaaagatgatatattcaatgtatattctggcattgctgtattttccaaaaccgttctaatggattgtgcattatatttcctaattctagtgctgcatttgatacagttcttgggataaatgttgcagtcaagaaactaagccgtccttttcagaaccaaactcatgcaaagagagcttatcgtgaacttgtcctcttaaaatgtgtcaatcataaaaatgtaagttatgtatgtattttgtctgtgtgcttccatattgtcaataatgtggtaatcttcagggttttctggagatacattgagttcagacctaggataagctaaggataaaaatggctattaacattggttttttgttttttgtttttttgtttttttgtcgcccaggctggaatgcagtggcgcagtctcggctctctgcaagctccacctcccgggttcatgccattctcttacctcagcctcccaagtagctgggactacaggcgcctgccaccacgcccggctaattttttgtatttttagtagagatggggtttcaccatgttagtcaggatggtcttgatctcctggccccatgatccacctgccttggccttccaaagtgctgggattacaggcgtgagccaccatgcccggcctattttttattgataacattctttttttttggagacggagtctcgctctgtcgcccaggctggagtgcagtggtgggatcttggctcgctgcaagctccacctcccgggttcatgccattttcctgcctcagcctcctgagtagctgggactacaggcgcccgccaccacgcccggctaattttttgtatttttaggagagacagggtttcaccgcgttagccgggatggtctcgatctcctgacctcatggtccgccagcctcagcctcccaaagtgctgggattacaggcgtgagccatggcgcccggctgataaaattcttaataaacattgaggaaatcaaagctagaaagaggcatcattatggtgcataggaatttaggtcacttaaccaaagtaggaatatcaattgatactctgtttctataaaataggaacagtattgatctaacaaattgagaaacaactaaatattttgtggaaagatgttgttctataagtaggtttttaccttgtatatgacacaccagtttcaaatacacgttattagatgatgttacatttagagtagctattcttggaagctccacagaaatcaaagcactaaattttacggagaaataatgtttctagaaaatgaagttgggttcaatcaagcacattgtttgttctcctagtggtcgctgagcattatgttgataacgttgccatgttataaaattacaaaatgttggccgggtgcagtggctcacgcctgtaatcccagcactttaggaggccgaggcgggtggatcatgacgtcaggagatagagaccatcctggctaacatggtgaaaccccatctctactaaaaagtacaaaaaattaaggagggtgaggtgggagaatggcatgaacccgggaggcagagcttgcagtgagctgagatagcaccactgcactccagcctgggcgacagagcgagactccgtctcaaaataaataaataaataaataaataaaatataaaacgtgaaatctggttttttttgttttgtttttttgagacagggtctcattctgtcacccaggttgtgattctcccacctcagccctccaagtagctgggaccataggcgtgcgccaccatgcttggcagtttttaaaattgtttgtagaggtggggtcttaccaccttgtctaggctgatcttaaactcctgagcttccttcttttgagtctgtggcttgagttggtttaaatttctctaatgcatgctttattttactttttcttttttttttttttttttttgagacggagtctcgctctgtcgcccaacctggagggcagtggcgcgatctcagctcactgcaagctccgcctcccaggttcacgccattctcctgcctcagcctcccgagtagccgggactacaggtgcccgccaccacacccagctaattttttgtatttttagtagagacaggggtttcaccatgttagccaggatggtctcgatctcctgacctcgtgatctgcctgcctcggcgtcccaaagtgctgggattacaggcgtgagccaccgcacccggacttgttttacttacttatttaaaaaattttttcaggttacaaaaaatatatattatttttaaaaattcaaacaatataaaaaagtaaaaactcctgaataccgccacccacagattactagcattaacagtttggtgagcattcttatgcatacatgtgcacaagtacataaacaagattaatcgtgttattcttcatcctgcttttctcctcgtgcaatgttggtagacctcatatactttaatgaacatagatatgagccagtttttaaatggttgcatagcacagatgcacagtaatttatttaagagactgccagccgcctgttgttggatagattgttttgtttctcactgttataagcagtgctgcaatgaacattctaacgcctgaatttttgcatactcgtccaggtgaatttcttggccaacattgtcaggtcagagtacacacacttctagtttaaaatatactgacaaattgacctcaaggaagactattagtttgatattttcattaagagtatttgagaagctgggcacggtcacttcacctgtaatcccagctacttgggctgaggcaggagggtcgcttgaagccaggagtttaaggcacacctgggcaacaaaacaagaccccatctcctaaaaaaaaaaaagtatcagccgggcgctgtggctcacacctgtaatcccaacactttgggaggccaaggcaggtggatcacctgagtcatgagtttaagaccacgttggttggccagcgtggtgaaaccccgtctctactaaaaatacaaaaattagctgggcgtagtggtgggcgcctgtaatcccagctcattgggaggctgaggcaggagaatcacttgaacccaggaagcataggttgcagtaagccaagattgcgccattgcactccagcctgggggacaagaatgaaactccatctcaaaaaaaaaaaaaaagtgtctgagaacgtctgttacttcagaatcccccagcactacatactgttgattttttttgttttgcttttgccaatttgataaataaatgatattttatttttattggtgaggttgttacttatttttatgtgttttggtaatttaatttttatggcctttatccatttttcttttggactgctggtctcttctgcatttgtaggagggttttttttttaaatattaaaactattgccctttacttttttttttccatttgacattatttatgttgttgacatactgattttttatcacccattttttgtttcattttaatgtaatcagatctcttaggtttcctgtcatgtttagaaaagattttctacgctaggattatataaatgtttatctatattctgaggttttatttcatgttttagatttaagtctttgttccatttagagtttttcttggtataaagattgaaatatggatgcagttttatttttgtccttagctaaccaatcaccccaatcctgtataatggataattcatctttccctcagtcatctggaatgactgaggttatgtgtttggtgcctaagccgtgggactcgctgtttacaccatgggctgtgtactggttcgttcccgcactgccataaagagatacccaagacagtgtaacttataaaggaaagcggtttaaataactcatagttgcgcatgatgtgggagacctcaggaaacttgcaatcatggcggaagacgaaagggaggcaggcaccttcttcacaaggcggcaggagagagaaaagtaaagagcaaagtgggcagtgctccttagaaaaccatcaggtctcctgagaactcactcactgtcacaagaacagcacgggggaaaccgcccccatgatccagtcacctcccaccaggtctctccctagacacgtggggattatggggattacaattcaagatgagatttgggtggggacacagccaaatcatgtcagggtgccaggatggaggcctgccgcaggatcagctctttaaccctctttaggtaaaaatatgatgctacgaggcctttcactttatcacaccaaaaacaagagcttagccttcatatttcaaacctttttagaaatttgtgcgtagtatttaagttttcagagttaacatactgctttaatgtctttttacctgtaaattctacttttttatgttcaaaaagacattatgtgtttaaattctgtaataattaagttactagggacacataaaagtgatttgattaaaagtgcatctttcctttaattgatgtttaacttttctcaaatgccatgtaattggtaaaagcagtaataataagaagtactgaattctgctgtgatttttttcccgtcttaatgcatttcaatattaaacttaatttttgtaatcaagtaatctgacatattgaagtataattaattttctcttttcagataattagtttgttaaatgtgtttacaccacaaaaaactctagaagaatttcaagatgtgtaagtatcatttttattcagtaatgcactgtacatcaaagaatgaacatctagaaaagacagcaactgctttttatacttaggaaatgtaggtggcaatacattttgtgacatcacagataactttctctgttgcagagaaatatttagaaaatttgatagttatatttaattatttgtaccacatgggttttcatcttcataacagataaaggatgactggaaagaattcttcagagcagaccaggatcactaatgtgttttgctgaactataaaatgtttttctcaaatccctgatagccaggattttagggttcaggagtttatgagtattacttaaaatgattaagtcactaattctatttaagattctgtatttccagaatcttaagtagaatcatcttactaacagtgaaatgaagtattaatctattgagaggcataatgcccaacttcatcctgaatttattggtgtgttcagtcattaacaaatatctgattgccctctgtgtgctgggcactctctgggacttggcctacctggcttccctggagcctgtcagggaagatagacaagccacatgataaatgaggaaagcatgtagtccattagaatgtgctaggtgctgtggacaaagggtggagctgggtcaggggatcaaaagtgctgagggttggacttgaggctgcagttttaaataaggtggctggggaaagacctccatgagttggtgacattcgaagaaagccttgaaggggataaagaagttggtctggccgggtgcggtggctcacgcctataatcccagcactttgggaggccgaggcgggcggatcacgaggtcaggagatcgagaccatcctggctaacacggtgaaaccccgtctctactaaaaatacaaaaaatcagccgggcgtggtggcgggggcctgtagtcccagctactcaggaggctgaggcaggagaatggtgtgaacccgggaggtggagcttgcagtgagccaagatcgcaccactgcactccagccagggcgacagagcaagactctgtctcaaaaaaaaaaaaaaaaagaatttggtgccgcagatactttgggggcaagtagaatggagatagaaggaacagacagcgctcaggacagcagtggatgcccgcctggtgttttccaagaccatcaagaggtggcgtggctagagatgagggagcaggggaagagaagagggtgaacaccacaagcctctaggccgttgtaaggatgtcttttgctctaaggcaagtcagagtaagagtcttagcagagcagtgagctcacctgccttctgtttgaaaagcgtaactctggcatctgggttggtaacccactataaggggtgggggcatggaacatcagttactgctgttgcagcagttctgttaagggatgacggagggtccatttggcccagaggggtaataggaagggtgagaggggaagagactggatgctgaaatggttctaaagatagagccatggtattagctgatagatgagatgtgtggtatgagagagaggaattgagaatgacacctagatttttggcctgagcacctgaaggatgagggagctctcaactgagatgatgaaggctgtgagaagagcagactgggctagggatggaatcaggagttcagttctggagatggctttaagatgcctgttagacatcaaggtggaactgggaatagggaggcagaggaatgagcctggagttcaggagatatgtctgaattgaacgtaggaatttgggagctgatggcctgtaactgagatcactaagaaagtgagtgtggttacagaagagaagagggtcaaggaccagttgctgggtattttgacagcgagaagttagagacaggacagggcagggcccgctgggattataggactggccagtggatttagcagcatggaagacatcagtggcctcgaggaggacagtttcagcagaatggtggctgcacaaacctgatccaagtgggattaagaaaaaaatgggagaaggctgagtgcagtggctcatgcctgtaatcccaacactttggaaggcccgaggtgggcggatcacttgaggtcaggagttcgagaccagcctgggcaacatggcaaaaccccgtctctactaaaaatacaaaaactatccaggcatgatggctgttttttttttttaatttaattttcagttctgggagtccgaggcatgagaatggcttgaacccgggaggtggaggttgcagtgaggcgagatcacgccactgcactccagtctgggtgacagagtgagaccctgtctcaaaaaaatttaaaaaataaaaagaagggagaagaattggagatagcacatgagacacctctttggggagttttgcttgcaaagggagcaaagaatcggggcgttgctaagcggggagtggggtcaagtgtcctttttgttgttgttgtataatcacttttaaaaacgtatatattgtagagcaatttagagccacagcaaaattgagcgggaggtactgagttcctgtctgtctccagccccttacgtgcagagcctcccccgttctcagcatctcccaccagagggtacatgtgttgtgattgatgagcctgtaacagcatggtctttaggctggtacggagaatttcagccaaaaatgtaagaagtaggaaaatttgtgtttgagattctatttaccatgctataaaaggttgttgtttttttttttaatttttaacttgtaagacgttaagtttgttatttatatattctttggaaaatttttagaaagttccattataccaagttatctttttactttagccagtgcagtgattggaagtaagttacagtttcatgaaatttagtcataaaggaactttggataattttcaaataaataactgaccttttctccctcaggtatttggttatggaattaatggatgctaacttatgtcaggttattcacatggagctggatcatgaaagaatgtcctaccttctttaccagatgctttgtggtattaaacatctgcattcagctggtataattcatagagtaagtggtgatgtattaattttatttttaaaaacaatcatttggttgtcataatcctttacatacaaaataacatttaaaaaaaattgttaggcttgaaaatccaaatagatgatggaatcatatggtgttttaagagagtcattctaggaggcatctgtggagccgcctggcctgccaggctagaccagctgctgtggacacagccaggtactgcgctctcagtcagatactgcgcaagaatacattgttttaaacttttcattttaaagtaacttaaaacttagagaaaaatttcaagaataggacagagaacttccaactaccatttatctacattcacctgtttttaatatatttgccatatgtgaaatcccatttttaatgagcaaggaacttaaaggccaagtagtcagtgagacagctgcttgagaactctctttcttaaataatgacccacatatccatttctcttatcctaaaattctgccgtgccagcttccctgcatcactggtgggagtggccagaccctgcaccgcaagggttcagagcaggcctgtgggctcagcagaggccgggatttgaataacagtgtgactgtactgtcaggaaaaacatttaataagctagggagcgataatataattaatataattctctctaagctgattttacaattttttgttattattacttgtacggctgtgtaagcagactatcatgatagatttttttttttcacaatttgataccaatacttcagtagcaaagaaaatgaaataaacttcttcctgccaaaaaacagtacatttttcataaaaaagaaagatggaattgatgtaataggtgaagaacaattaaaacttgtcaaataaggccagtaagaaaaccccaacagttaacaaaatctgttttcaatgacatattacagaacaattaaaaagctacataaaaatcagtgttacctacttattagaaatacattttaattcacctgtagatccaaaaacatttagacatacagacaaaattttgtattaactgacaaaaaaacccacactacctattggattcatgttgcttaaagggtatctacagaattctcacctcaatattttcgtgttaaataaggtggaaatcaacagtccagagatggtcattagaaatgagccactgacaaacacaatatatttataacttgtataacatttcattcatgtgcatgttttgagcattgtggaatatttaatttgcatcaggctttccaaattccttaaatttataagatttgttctcagtgggagttctcagatgacttttgaaataattattaaaatgaaaatttatttgcaaactactagggtttagatacagaataccttcttgtatttaaagatccatctccagtttgcatacatcatgtctttcaatgtgccggagagaaacaaaggcatccccacgttctttacatttatagggttttttagaaatgagttcttttatgtcttcaagtagaactggaaagactgaagacactaccacattgtttacatgcatagaatttttcctcagtagtagttttgtttcgtattttcaaagggaaatggaagagttccatgtgctttttaatgtgctcagaggtaactggaacatataaaggcatcatcacattcctcatatgcatgttatgtaaattatacggttttcctccagtataatttctttcatgttttcaaagataactgaattaactgaatgttttccccaaatccttacattctcaggatttctacagagtatgagttttttcatgtttacatacaggactggaatatctaaaggctttgccacatgccttacagtcatagggtttctctccagtttgagttctttcatgtttacatagagaactggaatatctgaagacttcaccacattgcaagtctgaagacttgaccacattccttatagtcaaagggtttctctccagtatgagatttttcatgtttacctagagaactggaatgtctggagacttgaccacattccttacagtcaaagggtttctctccagtgtgaaatttttcatgtttacatagagaactggaatgtctgaagacttgaccacatcccttacagtcaaagggtttctctccagtgtgagttcttccgtgtttacatagagaactggaatgtctgaagacttgaccacattccttacagtcaaagggtttctctccagtgtgagatttttcatgtttacatagagaattggaatgtctgaagacttgaccacatcccttacggtcaaagggtttctctccagtgtgagttctttcatgtttacgtagagaactggaatgtctgaagacttgaccacattccttacagtcaaagggttcctctccagtgtgagttctttcatgtttacatagagaactggaatgtctaaagacttgaccacattccttacagtcaaagggtgcctctccagtgtgagttctttcatgtttacttagagaactgaaatgtctaaagacttgaccacattccttacagtcaaagggtttctctctggtatgagatttttcatgtgttcaaagggagctggaatgcctgaaggtgttaccacattttttttttttttttgaaacagagtcttgctctgttgcccaggctggagtgcagtggtgtgatcttggctcactgcaacctccacctcccaggttcaagcagttctcctgtctcagcctcccaagtagctgggattacaggcacctgccaccaaatttggctatttttttttttttttttttttttagtagagacaggatttcaccatgttggccaggctggtctcgaactgctgacctcatgatctgcctgcctcagcctcccaaagtgctgggattacaggtgtgagccactgcgcccagccacattttttatattcataaggtttctctccagtatgagttctctcatgtgtttggaggtaactgaaccgactgaagcctttatcccatttttgacattcattgggtttctctccagtatgagttctttcatgtcttctaagggaactgtgttgactgaaggctttgccacattttttacagttataggatttctctccaatatgtgttctttgatgtcttcacatggagcggggatgactgaaggctttgctacatttcttacatttatagggtttctctccagtattatttcttttatgtttctgaatggaactggaaagagtgagtcttttaccatatttcttaaacacatggaagatttttcacattgtgagctctttatgtctttgaaagtaactacaaaaactgaatcgtttcccacatttcctacattcacggggtttctcttcagcatgagcacctttatggttatgaaggtaaccagaatgtccaaaggctttctcacatttctgacatttataaggtttttccccactgtgagttcttttatgtttttgaaaataactgcaaaatctcaaggctttaccacctttcttccattcacagggtttttctccgttgtaaattactttgtgtctttgaagtaaatagagaaacttaaatgtcttcccacatttcttacatttatgaggcctgttaccagtgtgtgttaccatgtgtctttggacatttgtgagagaaatgaaggttttctcacattgtttacatttgtatggcttcaccccacgtttctcccatgcatgtagtttgtgtccagaatgagataagatgtgcctattaagggatgaaggacatgtgaagacttgtccacacactctgcattcacatgaatttacatcagcagaaattttcttcttcaggttcagatttggaatctggccgaatatttctccacaatgactaccttctttacattcacagagtctttctcccataggacttcataaattttttccagaattattgaaatgactttcactgttctggtcttcccatttgtttccatttcctggcttccaggattctatggcatcctgcttagggatctccaaggtcacagggtgacagtctgtggcagagccacctagggcctcctggcccgaattttttctaaaaaacaattaaaatactgagtgagactagaggcagagataatataattttatcggaaatagatattcttagcattccctggattattactatactaattttatcaacagattgccattagattttatgttccaacagcaagaggtcatctttttgctgaactgaaatctgtggggaagaagctagtgagagacaagaacagcagagcctgttactacagaaataagcagatgggttttagatggtggagtggtaataattttttcagatctcttttgccaggaaagattggttccatcacagccattgaaggcctcccttgggggtagagcccaccgacccacagagggcagggttgtctcgtctcaagcctcaggtctgtggcccaagggcagcgtcagggatagctcttgtcctcccagggctagctgacagcctcccatctgccatctagtgtactgttttttaaaatagaacctttgctgccatcagatggtcagttaaaataatatattggtgactttgctttaaaaatagtaacactaggcttctgaattaaagatctcctgatgtaccattctatttctgttcctgaagtttccacagaccttcatataatttaaggtactcttgatatctcttaaatacattttatttatgctttagaataatttcccagattattagtcttactacattaggccttattcattttataaggggaaatggtttgtctgacttgttcccccttgggccccaaggtaagtgggaaacaatggcctcctgtcactgggggctttgtgagagctgcagcgtcggcaggccttttttatggaatagccggtgcctgcagcctgagtcagatggggcccaaaggagtgtttggtttgcccagcacgaggtatagaaacctaagaagccttcagaaaatggccctgttgccatccctgcctcctgctcaccatccccacccacctggcatcttgctgtgtcctctcctccctgtcaccttgttccctgctgcttcccacatccatggccttgccaggctctccccacatctgtgtccatgtgggagagtgatgcatgctcactgtggggaagttccaaacattgcacaggtgtataaagcaaagggggaaactccctcttgccccctgcccccctgccccacccctgcccacatcccaggaagggaggagccctaagttaactgttctgtgtggactgcaccatcctttgttccatctacagtaccatgcacagagatagacacacttttaattttgcctattaaaatggtttaatacaaaacataaattttaagtatttgaaagataaagttttgcccatgatatcccaccgaagtatatactttatataattcaaaaaatgaaatgcaagtaacccagccctctgttagcacctggagatggccagtgagagcacgctggtgcatgtcctgcctcactctgcatggcacctctctgttgactgatgttaacaccagcatatctgtacttatgtccttttgaacttacatccttcaaagacaggatcaccttgcatataactgcgtagcaacttcctaaacaggtagcttggtttgtttttttaaatcaaggatcaaatatttctataaatatttatgaaaaacagatacctccacctctccctttatttctctctccctagaagcaaactccttcagttcatttagctgattattttggtctctatttccatattgaaataatatgcttagctctttcttcattgatcctttctcagtttggggcataagatgctgatttagcttcttaccaacccagccctcaccctcggccttcctcgccctcctcccaggctggtggatgtgatggtgtttggctcgttgcgtcatcgtgagcgtgtaaatgctttgcacagcagaccttcccctttcaccttttgttccctggagttaacaaacacttatactctatttgtgtgaggtttttgtttgttttggggggtagtttctgtgttcttggtggtaattcaaccctaactcttccatcaggcatctgaattttctctcagcacatgtagatgtcttgggtatttcatcagtttcatcttctcaggaacctctcccaagcctcagccctgttcccctttgcactggctgccactgcacctgctcgaaggggctgtcctggatctcccttggtgattttgtgggggtttccttcatctgcctcccatgttggattccttgcttgctgtccttgtctctcagattacccccttgttttggtgggacgcatcctccaaaagcttcctaaattgccacaggggagagaaattttttgaggcctcaaatgtctgaaactctttattctgccctctcacatgatgagtagtgtggttgtgtgtagatgtgtgtagaattcttagttacagatcagttgcgctcagaatggcggaggcagtgcctgtggtagcaaggcatctagcatggctccggagtttcttagtgccatctgatgtttttttagatggagtctcgctctgtcgcccaggctggagtgcagtggcatggtcttggctcagtgcaaactctgcctctcgggttcacgccattctcctgcctcagcctccctagtggctaggactgcaggcgtccgccaccacgcccagctaattttttgtatttttagtagagacagggtttcaccttgttacccaggatggtctcgatctcctgacctcgtgatccgcccgcctcggcctcccaaagtgctggattacaggcatgagccactgtgcctggctgatgactaaccttttttaagtgctgtggttttgggttttggtttggttttatctctggaaacttttaaactcagttatttattccttgtattctgagatgttttgatgtatgccttgatgtgggcattttttctttagttttgctgggcacttggccttcagtctggaagcacatattatagaggtctgagaaatttatatcatttctttcagaatgtcctcttaactccattctttattctttttctctgaagcacgagttaattgacactcatttgctcttaaaagttcctttttacagcattctgttcttgttgcatgtatatactatcatctctgaggataagcttttgttgaagggttttatcactccctgcattgtctttctctactgagagttccctttttagtgtgttaggtccctccctgtcacacgcaaggctttccccaaatgtctggttggatcatgtttaagattgaaacattaggccaagcacggtggctcatgccagtaatcccagcactttgggagactgaggcgggcagatcacctgaggtcaagagttcgacaccagcctggtcaacatggtgaaactctgtctctactaaaaatataaaaattagctgggcgtggtggcaggtgcctataatcccagctagtcaggagactgaggcaggagaatttcttgaacccaggaagcggaggttgcagtgagctgagatagtgccattgcactccagcctgagcaacaagatcgagacttcgtctcaaaaaaaaaaaaaaaaaaaagagattgaagcattaaaggctgactggaagtactgagtgaatgggtaaattgttaaagaatgggtgtctcttggaccacaggcagccacaggtgtcaccttctgtaggttttttctctgggcaccatttaatttctctggaaaaggccccttcagtcccttggtggagggatgtaagcctggctgctggggtacagggctgtgcttctcatgtggcagagcgcaaactcaccaggcagccctgttgcaggcaggcctcaccgtgccttccctgttggtacccacaggactgtgcatgcggcgcctgtggccctgcacctggaagctgggcatcagtttctctgcgtgaagggccagcaggagtgaggaaggagtggagcctcacttctgggatggagatggggatctgggacatctactacgtacttggactttcaataaaatgaaaacttctccaagtgctacccttgcctcttctgcctccatagcacctgcatttcacttgctgagcctttcctgggtgtcgtggccatttatagaggttggcatttccttcgctcagctagggcatttgggcggccctgcagcttcctgtccctgtagcgtggggcttttcgtgggcggcttccgcatgccacggtgggttagacaggcgagggactggccgggaggaggcctgtgcgagaaggaagggggagcagccagaggaggcagcaaatgctagctgaacgtagtgcagtcctggcccctcagaggcctggtccagactgcggtgcagctctgagggcctccggtgtcacacaggaacgggcctgcctcagcatccctgcccggtcggcccctggctgacggctctgtgggaggtgtgccctggcagggacagagggtaggtgcagacaccacactgggccatctgtcactctcactcctgtggcgggagaccaaggagtgcatttccgtggaccccacagtccaccctggccccctcagctctacttctccacataagttgggaatggctttcctgtggcgcccatggttctctcttcctcaggggaaatctggaagacagaggttagtgggacaccctgtagtccctgtcactgtggtctctctgctggctctttccctaccctttcctgttattcataccctcagctctcacattggcaggcctctgtggcttgcctggcctgtgtcccaggccttcattcctgagccgtctgtgtctggtggctctcagtgggccacagggtcccaggccacccagtggccgtctccccagtcctcagtgtgtagccggagcggaggcgcttggcaggtggagtaacgcccacacgagttccttggcctgtgagtaagagtcgtcacagtgggaaggccaaatggaaacctgaaactgcccccaagatagtaaatcaaaaacaagatcacaccctgcagggcccggggtgggtggaggagactagggccaccatggaagcctcaggggagcagagacagtggtatcttgcatcccagtctaactcgttagtccagcccttgaagaagctgcatggattctggagaatgaccccagacggccacaggcttacggcactggcagtcctggccgcagctgctgtgcatgtcaaggtgcagttgttgctggagcagattaataaggcctcaggtctggcatgttgatggggcaaatgcatcctccacactgattagaagagaggcccagacagcgcccacactgctgcaggctggacagcaatgttctctcacagccttgctctaagcctttgctaacgttcccaccctcccataacatggccgcaagagacctggcccagacttcacttatgccctgacccctgacccctgaccccacgaaccctgcaagtggaggagccctgagagtgtttggggtcttcgggtttcagtgtctacttagagctgtgtccattcatcctcaagagtgcctggctgttcttacccggtgggtggccacaggtacctgtggggaaggaccggcaaggccagacagtggacacctgtcatgatgtgctccttcctgggatacctctcaagcagtgggtctggatcccagagttgagcgggcagtgggggaggtcagcacctgccccactcatgctgcgggtgctgtgggtaccctcactgctgcccacagggtagcgttgggttccaggcattttgggagccaagccccgatccaggcgtcacttggatctgtacttggcatttgtcttctttgttctgagtgattttcaagacttgaaggggcagaactgtctttcctctgctgtcttgaaattgaagtgaggtgttgggaagctgcctcaggttgtatttcgggggtgactagagagggtcccagggtgcggggagagcacctccttagccacctccccattggccacacagagcacccacacaagcttgggactttatcaccacagtcttccagcagacggcagtaaagtgtgcttttcctgttaaattagtatgtgatgacagttttttgacagatggcagtgtcttcagatgagcgtgtttctggcgcactggggttcacagagctggcaggcagcccgtggagatggttccactgctgcgtctgtccttggtagaaccaggctgtccttgtcttccttgctcctgcggccgtgctgttagttctgggtgggctgggcttcagggcctgctggctggggaagtgtgtgcatttcacacctcagaaatcagcctcctggagagaaagtgcccactgcacaccctctgtggcctgaggaagcgcctgtttctgcttctcccgccagcaccgagtctgcttgctttccatcgctgccaagtgatagactaaaaatgggcattcattttgggtttttaaagaagatttttgtgagattgagcattattttatctgttagtaatttatgttctaaaatgcctgttcttgtcatactctttgattttaaaaaaggaaacaagaagcgaattcgttcatttggtcttagctccctgacttggtcctcacagcggagcgtccctggttgaatgtgggctgcttctccctggctttccttcatgcagggaggcagcccggtttcttcctctcaggcctttctgggaaccgggggtgtctgcacagtactctaaggtggaatggaggggctgggggcctctttttggggccaggtagagattgtgactgcatttttaaacattatatgtttatcatttaaatcttacagaatctaggaagcctagaaacaggtcacttagcagcatggcagtgtaattgtacctgttgtcaatgtcgaaatggcttcctgcttgccctgatgacagccccacagccttcactgaggcatgccgcctgcaaccccccttgtggcccatcagttggggtgtcttacaggcaggtgctaggcagtgctactgaacctgcaacttcctgggtaaagtatcctcatgccttacgccatgtcagtggcttggcagtttgacattgcaggtgcactactcttgtgaaaagaatgggtgtgggttgtttacaagtcacagtttctcaagtgagtttgcaggccgaagtccccaggcaaaagtcaaattcctaaggcctgaggaaggggctagggtggaggatcagcaggaagaaaatcccttagttatgagggaaaaggttgcagaagttgtgttaaggctttgcaagtcaggtggaatatgatgcatgtcttcattctgcagacacttcccaagtgtctgctcgcgccaggcgtgcttctgagtgctgagagctcacacagagtcagcactggggagggaagagaggtggcaaccagaacatgagcaggtgagtttttgtgccacgtacagatggagacagcagcaccagtgctggcgtgtctttgtggcgaaggtgagaagattggaggtggatgatcatggaattgctcttccaaggagagaaagagccatgggaagattccaggatcagacgattctagacctgtgctgtccagtatggcagccactaaccacaggaggctgtggagcactcaggatgtggccgtgctgcagttgtaaaatacatactggacttcaaaggctcagtactaaaaagagaatgtaaaatatctcagtatttttcttatgttgattacattttgaaatgataatattatggatatattgggttaaaaaaatatactgtatgattaaaattaatttcacctatttctgcatgctgttgagcatggctagtagaaaatgtaaattatacacatcgttcgcattatatgacattgtctgtgggacagcactgccctggactgacagacagcatgaggaccttagcaagagagagtcagagtattggggaactcaagtccaggcgtggagagcaggagggggccgtgtgtgctggactgacagcatgaggaccttagcaagagagagtcagagtattggggaactcaagtccaggcgtggagagcgggaggggggcatgtgtgctggacgtgtagatgcatggatggagggtagataggacagcctgagggcctgcgagaccacagaaagggcaaatgggggccatgaaggtttccactgggggtaaggggcaccatctgacggctttaggctgatttgttttagtttcaatttgagagtaagattttccaaagttgttcccaaatctcagagttcagttcactccctacactctcacactggcttcacgaccctcacggatgtgaagtagtttatttagcatgcttcattcattttactaatttaagccatttctttcctaggatttgaagcctagcaacattgttgtgaaatcagactgcaccctgaagatccttgactttggcctggcccggacagcgtgcactaacttcatgatgaccccttacgtggtgacacggtactaccgggcgcccgaagtcatcctgggtatgggctacaaagagaacggtgagtatagccggggctggaagaggctgggatgtttagaaattgctctagcggtggtctcgagttttttctctttcctttgaaccatatgatatatactgtggggactgttacacccagaatatagcatgatccagagataagaaataattaattgtgtttttccattggttaaaatcattctcttttaaaaattcacttttaaaattgttatttttgaactttttaatcagagttaagctgtctatagccaagtgtgcaaatcctgagtgtgcagctcagctgaggtgagcacacccacagcagcagcagctctggcctccccatggcccctcctcgcagcccacgaggctggccaatctcctgatctccagtaccatggatcagctttatttgttggtctgcatattgtttttttgaatttgatgtaaatagaataacacatgttttcatgtaaaattggtgtctttttacatcaaaacttagcttattctagcaatatcagagctctttgaaacttggcttttagcaaatttgttgaaaataacgaaatcacgcttacttatttttaaaaagactgaaagtttgcccgggtcatctgaaatgagttttgctacaggttcatcttgctgcgttgtagcttgtgttcccaccctgaggggcacagcttcatgtgcttcctgtggaggggagagaaaacttgatcccctgttcacttctcccctcggcccgccagcagggcacttagaggcctctgctgtctgtctgaggccccacagatgagggtgggcaccgtggaagtctgggcccctctagcagggcctcacctgcagtcctgcaagccagccagcctgtgccgccagtgagtgctgctgcctttctgacggggcagtctagaaaatgatcgctcaggaggtgtggtatcaacaacgcacagaggctcccgccggcaagctagtgacgtgtaccgggtttgtcctgggagggggtttgaagaaaaaagatgggggactctagctggtttttaatcccctggtgtttggtagtggacatctggtctgtcgggtgcatcatggcagaaatggtcctccataaagtcctgttcccgggaagagactgtatccttcacaggggacccggtacttggccatggaggctggggtgggcgtgtggccctgaaaagctttgtgttcacaggcacttcttgtttctggttttttgtttgtttgtttgtttgttttaagctataaagtattggactctttggcactaaaaccccagattgctacaaaccgaaggctaaaatagaggtcagcaatcattcatattgtgtaaaatgtcacccttagctagcaatttatttttccatatttgtgtgtttagtgcactgttagaattccttttcctcacttttgttttgttcatggcacttcataattttatcatttcattttattttcagttgatatctggtcagtgggttgcatcatgggagagctggtgaaaggttgtgtgatattccaaggcactgaccgtatccttccccgcgaccttggccccgccatgctttcttaatgcctcaggcagcatgaccacctgcttacacgagcgctcacgaggacaaagtcgtaaaatccactccagactgtgttctaaggggggctttactgtatttgttaattagtgtcacaagccaagtggttcaatttcattctttatttttaacttgactacctgtgatgactttgagacttagagttcagttaaaccgattatattagctcttaattttgccaaaaatagctggacacatagaagaaattatttactctttgataagtatattctgatatttaaatgaaaatactgtattatttagtttattccgttaatttaactaggaaagatgctatctaaatttaataggctagtgtgcttgtgtgctttaattaagtactattttgttagttactggtatgcattgaaatattttcccccaaagtaagaactgaagcacattacaaaggacctaagtgaaagagattaaaatgaaaattttgtgaggaacaatatgttaaactttcttgtttgttactgtgctgacattttgtagaattttttttaaaaatctgtctagtgggttattttgtgacacactggggaagtcaaaataaatgtaaaatgaaagagataaactcatactgtagtcagcaagtcatgttagagatacagcagaaaggagaataactactctaattgttacaatagccttctttcctcatttgccattcttccatcctcagtattttttaccctaacatggttcttcacatcttccctttttcatttgtgttttaaccacttagtttttcattagtctttgactttgttttcgttatgaaagtttaaattggtctccatccttgggcagattgatggttgcttttaaggaaatcaagctccatagtcagtgttttgtatgtatcttaggaaaataatttcagattttaataattttatcaaagtggtctccttataaattcttcacagtgcaaacttaaagtgaaaatatttttatttctctcattttatttacctttctttacattttctatatcatagattatataatatgtcaagttattttatttgttctactaaattttctagcagtttccatagcctcatctcagattcacttgttgcaacctataaataaggacgtctttattttgcaagtaaacttaattaaaaagggaaaagttgaaaaattaaaagactaataatttagaaatatctacttaatgttcagtttgtctcaattcttactcattttgtgccattccttgttttattacaaaatgttttcttcaaaaagtacaaaaatgaaaaatgtgagtactttttggtgcattttagtaagtaaaattaaaattcctgctatacatatgaacattaatgtcagtaattaatagtgttatatataaggttacctaatgttattcccaaaagccacacagagtttaacatcattttctaaagaaaattttgccaactctttcaaatattagattgaaatttgggagatagaaaaaagttgcagaaatcagactgagggtctcagagatttgctttaatttgcgacccagggtagaaaaggaactcctgtccctgcggtggtctatgagaaagagaaagctttagcccggccacctcgggccccagctcagactcctccccttggcagccatgcatccttgagaaatttagggcctctctgagccttggtttccccttctgtaaaatagacctgtggtctgcctgcagcttcacgagagttagacaacagggtccactgggcttgtcggaattattgttccccttcccccgtccctctcatctgtcccccatccctcccacctgtaggatgctggggtggagtcctctcggggaatctgtgggtctcctctcacaactggtttaatttctagtcctttatcattaacccagcagatatttctctcacctgcccatttctgggtgcctagtctgactgagatgcaaagaggctcctcccagctgctgaattgagggtggatcgtcaagggcagggcagagcaggagaacagagcagaggctgccatcatccagaggagaggtggaggcccccagcaggcgggtaggggtgtggccggggagatgggcttgtactctgctttgaagctggacccttcaaggagccttgctagggtttggagatgtctgttagacagtggaatttaggggcaaggtctgggatagagagatcaaagtgggtgtcatccgtctgtcggtagccttgaagcctaggactggtagcgagcacttgcaggggaggaagagaccaggacccgggacttagcccccttgaggtggagggacaaagggaatagggaaggaaatggagaaggcactcacgtgacccctcctcctagagtgtggtgactgagggaggctcattcacatgaggagatgaggacgggggattggcccctgggccttgtgatggctgctggcagccatgatgggcacagcatttatggagtggagggaagaaagcctgatgggagtatgtttgagagaaaatgagaggctgggaattagagacacaagtgtagacagctcttttttctttccttttttttttttttttttcctttgagacagagtctcactccattgcccaggctggagggcagcgatgcgatctcagctcactgcaacctctacctcctgggttcaagcgattcttctgcctcagcctcccgagtagctgggattacaggcgcccgccaccacgcctggctaatttttgtatttttagtagggccagggtttcaccgtcttggccaggctggtcttgaacacctgaccttgtgatccacctgcctcggcctcccaaagtgccgggattacaggtgtgagccactgagcccgaccgacagctctttatggaagtttttgctgcaaataggaataagaaataaagcgataggtagggccaaaggaaagcagctactgtgttaacataggagaaaacaccatcatttaccaacgtggtggaatgtattggtagagtgcaaaatgtcgatgatgttggagaaggaagagttgagggagcttgtccttgagtcaggggggttagggtctagagctgagcaggcttagtgtagccgggagcccagatggttgctgtgtggcaaatggcacacagatgctgggtgggtgcatcctgggaagtctgtgggagtgagcaggcagaagaggtatcaaaagtataaggtgggctgggcgcagtggctcacacctataatcccagcactttgggaggccgaggcaggcagatcacttgaggccaggaattccagaccagcctggccaacatggcgaaaccccatctctactaaaaataacaaaaattagccgaccgttatggcaggtgcctgtagtcccagctacttgggaggctgaggcacgagaattacttgagcccgggaggtggaggttgcagtcagccgagatcatgccactgcactccagcctgggcgacagagcgagactctgtctttatttatatatgtatatatggcagaaggaaaaggtgtgagacagttttcacattttggctaaataggtaaataaaatgtgggcataattctgatttgacaatatgtatgaaccaggagtaggaaggagaatttgctagtgaattgaatgccagaaacacatttcctgagcgggtcttttggaagtataacattttggaagaactgagttcatgtaccagttccctaggttatttcatggtgatgtaagttcatttttctaagacatgcctcagtgagcacttttttaagctgctgttgatgctatttttttctcacttgcattctcttgtatagcgagtacagtttcagtgtcactttcccacatgtaatcctaattatcccaagcctaacaagcaccctgtggaataggcaaagctggtaatgtctgcattgaacaaataaggaaacagaccccaaggaagcctgactttcctgacacactgagtgtttaatgcagagttgagtctgaaacccaggtcacgcactttgaaaggaaataaaatgcattacctagggatcgcagtgatggttgggaagagtcagttccaagtaaaatagagcatcatttgaaagctgtcgctgggctcagtctaagcccagttgcttggttcccagctgtaaactgaggaggtcagataggtctctccacaggtcccttgagatcctctgttctttagagagctgtgaatgaatctaaggtagcattagtatgaaaactgatttcaatttgcttatgtaatgtttatctaatttcgtgtttaatcatttttgctataggtattcttagttataagataaactttattttgaactagagtgggaaggtgtgtagacttcattgtgttgatttaataaactgtgatcatagtttatgaagatgcagagtgtgagagttttaaaaaatagtgtaacttggaaacccaaaccttatttgaatattatttcaaaattccgctgctgatccagtggggtggcctagtcgataggtttaaatattattcaagtgatgctgccgcatgtactgtgaatacaaggtacttcagttgtattttcctcaagaaactccttagatattgatcagtggaataaagttattgagcagctgggaacaccatcagcagagttcatgaagaaacttcagccaactgtgaggaattatgtcgaaaacagaccaaagtatcctggaatcaaatttgaagaactctttccagattggatattcccatcagaatctgagcgagacaaaataaaaagtaagatatcctttttttcttatacttgtgttttgtaattcaggtggtgctttcactctttcatgtttgtattctaaaaacctgtgttttgggagagaaagtcattttaggcctgaagtctgaggtacgaaggcactgaggagagaaagcttaaaggtctagaagctttatcctctataagacggcttaattgaagcctttggccaaaataaaaataatcaaatcagtctgaaagaatcttatgttacagttacagcaactggaattcaaaaagttttcaggtaagaagaacacttaatgcagattctagagtcagaagcgatgtgacagttgttcgatgaaaaaggtccttcctccccaccttctcctgcaccctttactacagtgtgattgtttaaggaaaaagaaaagatttgattctgtccgcatgaaggtaaactgtgccttaatcagaaaagccccagtctttgcttattcaggttgtgaactttaattgacaaaacctaggtgagccttatatttaactaagttattgaacttgtttttctttttcctaaataccaatctgtagattaaaaaaaaaagtgtaagttgccagcactgtatacagctaggccagccagaagcatctgtgagtgttttatcctgtgggaatgtgagattgttgtgtggtttgaaaagtctgttctaatttcatttcgatgtgacttagagaaaaatactcccccgtgcctcatgcccacactctgggcagtgccacccgcagctcggcaattgccaccttccttgctgtggtttcccagccttgggccctgcccagacattggtctgaggctgcctggtgctcttccccaccaccctgggagcccaggtttctcttccccttgcagatccagaggcgtaaaactacatttggaaacctggtttgtcatgaaagtggacatttgactttttcttaaaaatgtttgggttatggctgggtgcggcggctcacgcctgtaatcccagcactttgggaggctgaggcaggcggatcacgaggtcaagagatcgagaccatcctgcctaacacagtgaaaccctgtctctactaaaaaaatacaaaaaattatccgggcatggtggcagacgcctgtagtcccagctgcttgggaggctgaggtaggagaatggcgtgaacccgggaggtggaacttgcagtgagccaagattgcgccactgcattgggcgacagagcgagactccgtctccgaaaaaaaaaaaaaaaattttgggttatattcatcttgaacctatcaaacatttctcaaaattaatatatctttgttctatctgtgttgtcatatttagttctttattgtatgattctgtttgtttcatattaacagcattaatttaatatttgttgtcaccctagcaagtcaagccagagatctgttatcaaaaatgttagtgattgatcctgacaagcggatctctgtagacgaagctctgcgtcacccatacatcactgtttggtatgaccccgccgaagcagaagccgtgagtatctgttttgaaaagatttatatagagaggccaggcttatatttccttggatcttgtctgtccgtccagagtggctacatatgggtagcaagttctccatttgggggctcccagttacagaaaggccaagtgttgtctgagacctgggtcgcttgctcttttgctgctggagccccagctcagagtacctcgggaatgaacttccgctttggtgctaccagtctccattttgcaaatgctgctgtgagctcatagtttattaagcatctattctgtgccattggctttggttacatcctcttgtttaggccacttaaccagagaggctgagcaacttgctgaaaaatcacacgtctgtttatccttccctaaaggcattgtagctcctggttcccccgctggaggagctccactctgagtttggtgctcacgtgcgtgtttctgtgtcagcactggtgtgagtgagctttagctgtgagggaaatcactgcgtagtggcaggcttccttcatgccatgagtgaaatacatgtttatgtcatggcctgtggttttgccatcagtttaaacattgttttatataaaaagaatccaatttataagcagacttttataacagtccatttatgagttggacattggatttgggagttctcccatgaagaaaatgtaaaatttgttctaagaaacaacagtaccttccatagctgccagcacagtgccttgtccataatgggtctctgggaaacagcctgtgatgatgagtttctaatgacatctgggcagatgtctgcgttttgaggtcaggtgattattaagaggaacataataactcttctttggttaactttttcataattattttgattctaaagttgatataatatcacatgacaaatctttattaaaccacgtgttgaattaaactaaatccatatcataaatagactagaagtcttccaagcaattttaccttttttagtgcctcatttttttttgaggcattactgttgactttacatatgatttaatttttagccaccacctcaaatttatgatgcccagttggaagaaagagaacatgcaattgaagaatggaaaggtaaagatggagcttattttgatccttccttttgacatttcttccaatcctgtagagcagaggcttttcattttgtgacatttcccttcaggaaggggcaagaaaccctgcgacccacttagcctctttctccccagtttccagtagaaaatgaacttgaagagaacagagttagagaggaacatttatgaatttcttatcatttgcttcaagagggaaaaataatatttttttcatggcttttcacatattgatttataaactgagcttagtaattgtatcatacttatattgattgatatgtttttaagccatgtagttgtacatatgttttaaaatctagtttgggggaaattgcagattgaaaatatgcaaataggtattattaccactataagattaaccaaacaacccacaacaaactatacctgtaatgaagaggttgaactaacaatttttcattaagaagcaggatcagtagtaactgagaaccacagtcagagtcagtcaacactgatgagggtcatgccccagggccatcctggggtgtgggagtgccggttacctgtgtgtgcccgtgctcagcagtgcatgcacacagcgtgctcactggcctcagtcaatgctcactggcctcagcgaatgcttgcaacgtgctaatgttggtttatgaatactgacattttaggaatccctcatcacttacttcgtaggtaattagtttttcttacagatgaaagttgaggaaaaccgaagttgaaattaagaaaagacttaggcctgtggattcatttctggccagtgtggggggctcctagcccacatgtgggtgctggttacctttggagaaccccaagtaaccacatagagaaacatattcaaatgggtgtgagaatatccaatcccctacagtgttctgtgggagccactccacttcataaagcccccttatggatccagaaccaccctacatgttttgctgccttactagttgcattgaaaaagatgtaatgtagtccaggcgcagtggctcacacctgtaatcccaggactttgggaggccaagtggggcagatggcttgaggccaggaattcaagacaagcctagccaacatagcgaaaccctgtctctacaaaaactacaaaagttagccaggcatggtggtgaacacctgtaatcccagcaatttggatggctgaggcatgagaatcacttgaatccaggaggtggaggtttcagtgagtcaagaccatgccactgtactccagcctggatgacagcatgagactgtctcaaaaaaaaaaaaaaaaaaaagaagaagaagaaaagaaaagatataatgtatcaaaatatgaatattttggtccaggtagactatattactgaattgactctgtcttacaattaaaaataacaaatcgcaatgcctttgttccagttgatttggaagcagagtttagagatacagtgaaactgtttagaaactgattaagcattttaacttgtatttttattaaagagctaatttacaaagaagtcatggattgggaagaaagaagcaagaatggtgttgtaaaagatcagccttcaggttagtgattgctttaattgattgtatgatatttttctttccctattcaactttttttttttgagacagagtttcgttctgtcgcccaggctggagagcagcggcgcgatctctgctcactgcaacctccgcctcctgggttcaagcaattctcctgcctcagcctcccgagtagctgggactacaggcacgcgccaccatgccctgctaatttttgtatttttagtagagacggggtttcaccatattggccaagctggtctcgatctcctgaccttgtgatctgcccgcctcagcctcccaaagtggtgggattacaggcacgcaccaccatgcctggctaatttttgtatttttagtagagacggggtttcagcatattggccaagctggtctcgatctcctgacctcgtgatccacccgcctcagcctcccaaagtggtggggttacaggcgtgagccaccgcacctggcgtctttcccgattcaacttttataaatggcagcaacatgtgaaatgccagcctggctagcatcagatttaaaaaccgctgtatgaatagccagcctttttggcttgtcatagtggtggtggtggtggatgacattttactgatgtgccaggcactgaactttgttataagcatttctctttcatctttgcaataactgctgtcacctccatttacagatgaagaaattgaatttaaagccttttcaatgttgataaccctttgtactggtcccacccaaaatgccaatctaagtaaaatggagtatggtattctttttgagaaaattgttgatatcattttcccatttttctgcttgatctactgatcttcatagtggtggaagcctctaatgaccaggtagttgtatgatcatgagactctgatatgagtcgtgttcacttacgtctgaaggattcttcctgtttactaaatgaaacgctcacgttatatcattgtctctctcccactcccactgggaagcatgcacacacatgtgtgcggatgtgcagagagcacagcttactttttattcttgaattttatgttcaacatgacgtatgtgtcaagcatctagagattatataacttcagcaagaacttaggtgcttgttaactgagcacacacgtatgactgcagacgtcgatctcagagagtgcatgttgtgtttttattcaaaccagactaaaatatggatagtaggaagtaggatagtttcatttgctttaaaagattaaaatgtcagttttctggagttataaaaccataaaatatacaaggccactaatttttttcctttttctggtatatagtctttatttattgcaaaagatttctttgaaagttgatgctttttttcctgtagatttagtgtttatgttataaattgttacaattcaagtgtctggtgacactggaatcctagtcaggcttaagcttttgtgatactgcattttcagataaatatagctgtgtccttttgatgtctgcttgaaagcagcaggtattttttaagtagctaacatgattatacatggccacatatatgtttagctactgagaaaaaaagaagaatcttgcaaggaaagacataggaatatgggactcttggcccaaagaaagactcaaggaaaagttcagaaagtccagctgactgacttcttgtctatactcatagttaggattgggaaactgcaaaaggacagagccgagaaatggcctgcagtctcgctgcctggatttgcagcaatgtcgtgcctcagattttattatatttggttttcttagcacagatgcagcagtaagtagcaacgccactccttctcagtcttcatcgatcaatgacatttcatccatgtccactgagcagacgctggcctcagacacagacagcagtcttgatgcctcgacgggaccccttgaaggctgtcgatgataggttagaaatagcaaacctgtcagcattgaaggaactctcacctccgtgggcctgaaatgcttgggagttgatggaaccaaatagaaaaactccatgttctgcatgtaagaaacacaatgccttgccctactcagacctgataggattgcctgcttagatgataaaatgaggcagaatatgtctgaagaaaaaaattgcaagccacacttctagagattttgttcaagatcatttcaggtgagcagttagagtaggtgaatttgtttcaaattgtactagtgacagtttctcatcatctgtaactgttgagatgtatgtgcatgtgaccacaaatgcttgcttggacttgcccatctagcactttggaaatcagtatttaaatgccaaataatcttccaggtagtgctgcttctgaagttatctcttaatcctcttaagtaatttggtgtctgtccagaaaaagtcgatttatgtgtattaattggccatcatgatgttatcatatcttattcccttttatgctatgatttattctatcttttgtatttcagaagacatataattaaatctatttaataaataaaaatatatagcttttcttagatttgtgatgtttggggctgagaattatcacggctaaaaccaagacacttatgtggacatcttgttttctttaaactgtcttgtctgggatgattgtacattcagctttactgcacgatacaattttaagttttgcttagtgctgcttgaaatcctagctaccttatctcttttcttcttggtcttctagacttcttatgaatttaaaatgctacctagaacttcaccttctttattaggtgcgtaacactccatcttaattaaatatgatggcagataggttcctgcatccatggcctaacgttggagtggaattttacaaaatgctcactagagatcactgcagtcatttcctaagtgcttcctttgccacagactggcctgggtcctttatttaccttccctcattcactttccctcggccaataccacgttcttgattttctttcttcactggaagaaagcagataaactcctctttggtctgttttcagaggccaggctgattcagatgcctgttgctattgttgctctccattgttgggaggcattccttttcacaagaatgttctgggaaactcttcagaggacgtgaaggaaataccctgaagagtcatgattaactattgactattttctgatttaaaactgctcacctgaaattgatacttttagactttacgatcagtaaattattcagaattcatgaagatgctgagtatgttaagtgtcactgcaggaacggagctgtggtgatcacgttttgcctgcctgtgcccatgtctcttcccttgagcttattctgttgctgattcatatcttgtgttcaattattttggaagcttttcagtcgacattctgtagagtgtgttctgaggaggaactgtgataagaaagtttattataaatattatgtaaaatatatggctctctctgcaccagttatatcttattggttggtcatatcactggaaactggaacctttgattagcaaaattaatattgaaataagaaatagttcttttatattgtgtcatttggacactttcaagtacaaaatggtaataataacttggattgaggcggaaacacctattttatggctatctatctaaacatcttaaaatggccttctctgtaatacactttcttttaaaagacttcactaaatctatctttaaaaggaaaaacaaaagggagaggttgaaaatgcgcgagctgccctgcactgtgtgatgctccctccccgggagacgtggacgggggacgaggcacccgcagacgcccttctgctcactcgctcctctgtgcattcagcgagccacttgccacagatggagcccgtgacggtgtggagggtttcctggaaaggccatcttccaccaggtagaggcgagcgtgcctaggacaggccacagggctccacagaaatacctcaccccagcttcagggttctctctcctgagcctagatttgccagggtcttggtgccacgcaaatggtttcaaactgatctctatggataaatgctgatgttggttaaagaactgaaaaatgtgctcaactgtttcatcttttctattttatttttgtaatttatattgtacacaacccaggaagtaactattttggacatgtatttttataaaccaggtaatttactattatcctggaatttagactaggtttgtttcatttgttgacttagtttccagccaagaaggaaacgactgtctcccccatgtccaggtctcagtttcaagggcagagtccagagagcagacagagttctgtgagagcaggagagcagtctggaaaccctggctgtgcataccgtgtcagccgtgggcctggagatgggagcaggtgagacgcagagccccagtactgagaggaggaagccctcttacagggccccttgcccaccccaagtccgtgtctgaaacacggagcgggtgctgcttcaacccgcatttaatgctgtgtaagtagcgataaccacgtacgagtctgtctggttgatttctaatgtgactcctctggtatttcctcctggtaataaatacaagtgtgacctttcagattgcatatctcaaaagtaacattgctaatgttttataataaaatatattatgtgtgttttggttggtgaaaataatacagactacattttaaaagataaa

SEQ ID NO: 39 - DNA, 59016 bp, Pan troglodytes
  misc_feature (321)..(897): n is a, c, g, or t
  misc_feature (6078)..(6841): n is a, c, g, or t
  misc_feature (39197)..(40139): n is a, c, g, or t
  misc_feature (41989)..(41998): n is a, c, g, or t
  misc_feature (42895)..(42895): n is a, c, g, or t
  misc_feature (42965)..(42965): n is a, c, g, or t
gcggcggcggcagcggcggagaagggagcgggaccggaagggtcgcagcgccccggcgcccctcacacccactgcggcggcggcggcggggcggagcggagcggggcgggccggcggcggagccggggccgcggagccaggagtgactagcacgcagcgccgccagtccgcccgcccgccctctccccgtggcgcggcggcggggaggcgaggtgagcccggcgggcgggctaggcctgggcgcggctgctcgggccgggcccgcggggaggggcggtgaggaaaccgcgcgccgggggcttcgggggcgggccggggctnnnnnnnnnnnnnnnnnnnnnnnnnnnnnnnnnnnnnnnnnnnnnnnnnnnnnnnnnnnnnnnnnnnnnnnnnnnnnnnnnnnnnnnnnnnnnnnnnnnnnnnnnnnnnnnnnnnnnnnnnnnnnnnnnnnnnnnnnnnnnnnnnnnnnnnnnnnnnnnnnnnnnnnnnnnnnnnnnnnnnnnnnnnnnnnnnnnnnnnnnnnnnnnnnnnnnnnnnnnnnnnnnnnnnnnnnnnnnnnnnnnnnnnnnnnnnnnnnnnnnnnnnnnnnnnnnnnnnnnnnnnnnnnnnnnnnnnnnnnnnnnnnnnnnnnnnnnnnnnnnnnnnnnnnnnnnnnnnnnnnnnnnnnnnnnnnnnnnnnnnnnnnnnnnnnnnnnnnnnnnnnnnnnnnnnnnnnnnnnnnnnnnnnnnnnnnnnnnnnnnnnnnnnnnnnnnnnnnnnnnnnnnnnnnnnnnnnnnnnnnnnnnnnnnnnnnnnnnnnnnnnnnnnnnnnnnnnnnnnnnnnnnnnnnnnnnnnnnnnnnnnnnnnnnnnnnnnnnnnnnnnnnnnnnnnnnnnnnnnnnnnnnnnnnnnnnnnnntcgccactgtggtggattcgttgttgtcaggctgtgtgaatgtatgcagacgcctgggcaggaccccggtgtgcatttgtggaagactgggcagggtgctgaccgtgctggtgtgagtggtgtcggaaccccctccccacccgcccagcctcccgcctccccgcgcactcctctcttgccgtgtcattgcacactcagtgtccagcagtgccagaggggacccagcccacatccgtcaccaccacacccctcctccagaagactgctgccccatcccactcatctcgcccgcctagaacatgccagcccgcatttgccccaggacctttgcatttgctgtttccccgtctttggagttgtctccgtgatcttggcacaagtagctctttctgctccttcctctggtcagatgtctcgttttgggtgaggccctcctcgaccaccctctttcttcccttagtcatgctatttcattattttaaaattttccttcctagctctcatctggtttgaaactattctatttatttgcctgtttattttctgtctccccgactaggatgtaactttgtgaaaacaggtagctgtctgatttgtccactgctttatccccagtgcttagaaagcacacaggaagtattcagtagtatcagctcaaggaatgaatgaatgatcaaagaaatggcccagcctccctgttgtctctgctttatctgttcatttagtgacttctgattagcgtgtgaaacttgtaagcagatggaagcttgttctattttgtgaaacattttggtgtccttgacccctttaattgctaactgttggaacaagctgtgatataaaatctcacatttttataatagtttagctgtagctttcttccacacatacaagagacatttactgaattctgcattatctaggtcatgctttctgctagaccctagggacacaaggcagatagcaacggggtccctttcccgagagagcccaggagcccagtagagaaggcaggcatgcagacacttagttccaggactgtacaacccttgctataggggaggggctatgccatggaaatccggaggaggtgacaggtggtgccggggggccttgagggtgataagaaatttgctaggcagggagaggcacagaggtgtgaaggagcagggccaaggaaggaccgtagcccactgtggagttgagaatcagtctggagggccaggtgtaaggacacagagtcgtggggaccctaaagaacaggaaccttacccagcagttttctagaagaaggtggaatttggctgggtgccatggctcacgccagtaatctcaagacactttgggaggctgatgtgggaggatcacttcaggccaggagttcaagaccagcctgggcaacgtagcgagatctctgtctttacaaaaaaatttaagaaattagctaggtgtggtggcatccacctgtagtcctagctacttgggaggctgaggtggaaggatcccatgagcccaggatttggagcctgcagtgagctatgatcacaccactgtgctccagcctgggtgacagagcaagaccctgtctctaaaaaggaaggcagcactccacatttgttctgatttttaaatgttggcaatagctaattaaatttttttttttaatgctgtgagccaagccaaatacagattcattcagcttggttgcaggatcgtcatccttcaggactggctgtgtgggagggaggagctgtgaggagagcaggaaaggtagcctaaggccaggggagccaggccctgtttgcccaggtgccagcccagatactcatttgattgtaactggagccctgtggaaacggaagctcaggagtctaaatagtctgtttcttagcaagcagctggtgagtggagttcgaacccagatcacttcccagataaggattctttcctgggtccctcagctctgagtattctcttttggcttttaacttgttctggaagaatgaccaccaatctatttaatgttttcctccatttaacttttttttttcttcaaaaggatcctgcagagttaaaaacaatactatttttgcatagacttctcttttgacagctttgattttcctggtaatttaattttcagggtgccaggactttaatttgttcacagattaaaatctgtttatttggtcccgtaaataaacaacagaggggatacttgaatgtgtctaagataaaatagtcttaattttctggataaagaaaaggaccagacaaaccagttaatagcgagtaaaccagttgttttcatgaagcataagataaaacagagaccagattttttttcttcttgagactattgatttgccaatagggcaactatttttggtctacacacatacagtagttacacctcacacttggttaggaaggtgccatttttacataattttccttcagaataattaattcctgatactttgtacttgattgtatgaaccagtttcaacatcattctttttattttaacttttattatgggaactttcaaacatatacaaaataaacagaatagtgtcctgctttaacagttattaactcctgaccaatcttgtttcatctctaatgttatccacttgcacccttaccacccataattattttcaagcaaatcctaaatatcatgtcatttcattcattattttttgggatactaattacacagtgggtgcccagtaaatgtttggtaaagacaaagctaaatgggagaataaatgtggtagggtagctcggagcagtgggtaagatcaggactttgagtcagactcccagtgggtctgctgcttatctgggtgatgtgcagaagcgattgcactcatctgtaaaacacacgggcacaacctcagggtgctcaggaggtatacagtagttatacttcacacttcggtaggtctctaaaggtactgactcttttaaagttgaaaaagtaataattgcttaatatcatcaaataactagtcaatattcaaatttccagctgccccatgaattttaagtttccttaatagtttgaaagtagagcaagagaaggtccatacgttgttgattggatgatacgtcttttaagtttctcttaatccatagatccccctcctatttctttgttttcttggtagtttatttgttgaagcaatcgagttgttccttagcatttccatagttggtatttgattgattgcatctctgcagtgtaattgaatgtgtttctctgtaatctctgtaagttagtaattggatctagacaaggcttcgtcagatttagggtgcattcctgcatcaagatgccttcctgagtgggctgtgcagttcttatctagaggtaccctgaggctctctgctcgtccgtgttgcagatgagcgcaatcgcttgctgcacatcacccagataaatagcagacccactgggagtctgactcaaagtccccatcttaaccactgctcccagctgccctaccacattttttctcccatttagctttgtctttaacaaacattttttgggcacccactgtgtaatcggtagaggattgagaaataaatcagacacattttctgcccttacagagtagaagtgtaagtagactcggaatgcaatctaaagcgaatactgggagggtggcaaaaatgggggcatgcccagcatggtttgaagggaaaggctggaggaggaaacatgtaagagaagcaggtgcttgaactagatttttgaaggaagatgaatgttgaccaggaggtcaaaaaggagagggaggtcatttcaagcagatggaacagcttaggcagaggcctgaaggtgtgcagtagctgggtgtgtccactgatcccaggtggtttgatgttgcctaagattgggccagaggactgccatctcctgtgctgtgctagggaactgaatcttattctccaggcagtcagtcactgctgaaggagttcaaatgggagaagggtgtgatcactgcacactttcaacaaatctctctcttttttctttccatattttgaaataattatagattcacaggaagttgcacaaatggcacagagaggtcccagtacccttcccccagctttctcccatggttacatatttacacaaccgtagtaaaatgtctaaaccaggacattgggcatcggagcaaggtgtatagagttcgttgtcattctttatcgtgtgaaaattcatataaccactaccacaatcaagattcaaaactatgtcatcatcctagatatctccttgtcccacccccttacagccacagcacccccttttccccaccattcataactgctggcaagtactaatctagtctgcatctctatacttttgtcttttcaggaatgttatatgcatggagttatacaggatgtgactttttgagattggcttttttcgttgactatcctgcccctgagatccacccaagttgtggtatgtttcagcagttgctgagtggtattccgtggtatgggtatacagcagttagtttaaccatttacccattgaaggacaggtttgggttgtttctagtttggcgctattaaaaataaagctgctgtgaacatttgtgtacatattctcacgtggagtgatttctctttctaaagtggcacgtgtgcagtggtttggaagtcacagaaatggtggctgggagaatgcttctgctgtcgctggtccaaggagccacgagaagcccttacccagggccctgggagtgggggattgagagggaaataggcaggcgtgggtgcttggaagtggggctggtgacggagatccttgcagggtcctgtggatccaacagtgggtgaagtgataaccaaatgctagttgttctgtattgtggtatatactgtggcttaagaactacagaggatggccctgaaagctgcaaggttcttgattatcaaagaaagattacgttgttataccaagctattcttcataagaattacagtaggaggccagggcgcggtggcttacgcctgtaatcccagcactttgggagggcgaggcggcgcgatcatgaggtcaggagatcggcggcgggcgggctttctccccgaaaccacatctctactaaaaatacaaaaattagctgggcgggccggcaggcgccnnnnnnnnnnnnnnnnnnnnnnnnnnnnnnnnnnnnnnnnnnnnnnnnnnnnnnnnnnnnnnnnnnnnnnnnnnnnnnnnnnnnnnnnnnnnnnnnnnnnnnnnnnnnnnnnnnnnnnnnnnnnnnnnnnnnnnnnnnnnnnnnnnnnnnnnnnnnnnnnnnnnnnnnnnnnnnnnnnnnnnnnnnnnnnnnnnnnnnnnnnnnnnnnnnnnnnnnnnnnnnnnnnnnnnnnnnnnnnnnnnnnnnnnnnnnnnnnnnnnnnnnnnnnnnnnnnnnnnnnnnnnnnnnnnnnnnnnnnnnnnnnnnnnnnnnnnnnnnnnnnnnnnnnnnnnnnnnnnnnnnnnnnnnnnnnnnnnnnnnnnnnnnnnnnnnnnnnnnnnnnnnnnnnnnnnnnnnnnnnnnnnnnnnnnnnnnnnnnnnnnnnnnnnnnnnnnnnnnnnnnnnnnnnnnnnnnnnnnnnnnnnnnnnnnnnnnnnnnnnnnnnnnnnnnnnnnnnnnnnnnnnnnnnnnnnnnnnnnnnnnnnnnnnnnnnnnnnnnnnnnnnnnnnnnnnnnnnnnnnnnnnnnnnnnnnnnnnnnnnnnnnnnnnnnnnnnnnnnnnnnnnnnnnnnnnnnnnnnnnnnnnnnnnnnnnnnnnnnnnnnnnnnnnnnnnnnnnnnnnnnnnnnnnnnnnnnnnnnnnnnnnnnnnnnnnnnnnnnnnnnnnnnnnnnnnnnnnnnnnnnnnnnnnnnnnnnnnnnnnnnnnnnnnnnnnnnnnnnnnnnnncaggatggtctccgtctcctgacctcgtgatccacctgccttggcctcccaaagtgctgggattacaggtgtgagccaccgcacccggccagatttttactattattattattgttgtttaatatagagatgaagcctcaccatgttgcccaggctgttctggaactcttgggcttaagtgatcctcccaccttcggcatcccacagtgctgggattacaagtgtgagccatcttgcccagctggaaaacagaacaatttaatgaaaaaaatgtcggcagcaagcgttgagacagagggtgattgtgagaatctgcttttaatcacaatagttagttgatttaaatatcgcatgtcctgggcactctgaagctttagtgtgattaaaggttcacttgagtctgtggatcactgaatcgttgtcatcgttagaggaaaaagtgttttggtaggttttggtagggggagtcagcaaggtgaaatgtgcaggactgtgtgctggtcctggccagcccatgtgcaaatagcttcactttctaaagggatatcagaatggtgctttgggaggaacttgaatattgtggtgaaacactcctaaattcaaatctgagccatgctgggaatttggacaacttcctctaagcctcagtttcctcatttgcagagcggggatagtaatatgctcctcactagttgttataagggtgtttataaatgtgtacctcagagccaggcccactctcatgcctctagccttatctgcctgaagcccgtcttccatacaagtgtcagatgatcattctgcagcttttcatttaacattttttgtttaatcagtttttaaatgtgaaatatgtacatttgaaaaacagaatagaaagttataatgggaagaaagtttctcatttcccactatttctctacttgctagcattgtgtatgtgcgtgtgtatgcgtgtgtgtgtgtttacgtagctgggcattatgtgttctcttcttcaacttggtgtatttcctttctgtatcttagacatctttccacattgatacataaagtccttgcattctgttgaatggccttgttgtacttctgtgccataatttattcagtccatccacagtgtgcattttagattacttctagttttttgcctgttacaagaagtgttacaaacatgcttgcacaaatatgtttggatacttgtacacgtatttgtcagatacacttagagaattgtgtttgccagtttaggatatgcagttaacatttttattagccatatctatattccatccaaaaaaatgttttaccacttctcagctctcactgacgtgtgtgaaagtgcctgtttcctcatgcctcggtcgatactgtgaacaaacttgagctcaggtcttgcctcctcccggaaacctccttgtagtgttccctccccgttttgagttgctcatagcctggaagggaggcagaccctacaaaggctgtgacagtgcagcctggcgggcgctgctgagtgcacaagtggcaaggagggagccctgtgctggacggatggtggcagcacagcctgggagctgagggggaggaaccagcaccggctggtgtgggaagtggaggcagcgaatgcaggctttagtgtattgctaatgtggtttcatgaagaattcttgtacttcccgatttgtaaaactgttttctgagccccggttgatggtccattttgttgaaatatcatctcaatagagttgactcatgaatagctaaattacacaccttctcaggtggccttaagtttctttctcttgctctcacaaagcccaaacttgacagggaaggtggctttaacaggttttcacttaggtgacttttttctcctgcataataagggtaccttattttaattttataattattttaaatctttttgtttgtttgtttttgagatggagtctcgctgtggcccaggctggagtggcacgatctcagctcactgcaatctccacctcccggttcaaatgattctcctgcatcagcctcccaagtagctgggattacaggcacgcactaccacacccggctaatttttgtatttttagtagagatggggcttcaccatgttggccaggctgttctcaaactcctgacctcaagtgatccccccacattggcctcccaaagtgctgggattacaggtgtgagccaccatgcccggactattttaaatcttgagatggaattacaattctaaaacctaatatgattgaatatactccccaaatttaaaaaagttaacctaatattgtcatagtccaaatataggttgaaagcagttatagcagggagagttgcggagttggtcagcagggttgagattgatctgtcagtcccaacgtgggcacggggtcctgaatggggggtggctctctgccatgaggtagttaaggaatccagctggtgggcagctttccatctacagcatgtgacttccatctctgggtctgtgacagctgatccctcagccagcagcaaggaagaaagattggagggcaagcagctttctgtaaagaaaaataaaagtgatctggaagttggatacatcacttctacccacatcttattagtcagaacttggtcatctggccatacctggctgctgggaaagctgccaggcgtcgtctctagttgggcagccatttatctagcaggaaggggaaggaaggcttctcttgtgaaagcgaggaagggagggatggatcctggagcacctcagcgcctgtgtcacgcctctgatgttttgacggcttccacagccctcaggactgaggccagacggctctgcgtggctgctggggctcatagtgatctggcctccttttctctccccagcttcactcgccctctacccagcaagtccctagtgacttgtcacattccgaatgtgcctccgcctctgctgcttctcctcccgttcccccaaatcttcttcaccctactgggtttaggacccttggtgtgcagggcctcctcctgagtgtgcactcactgagggcaggcgagtgtcctggcatggtacctcaccatccacagcgggtgctcagtacatgcttgcaagtaactgtgtcgctggtgtgttgacggcatagcagaggaacagccaccctccgtaaagcaggtggtagtgggtgcctgcctttttgctgagttgtctctaatcctttgcacttgtaccctgctagccaagctcagcagttcgctgtgtctggacacagtcagtttgagctctgtgcctctactgtccatctctggcaaaagagtctgagggcggatgccgcctccttcgtgaagccgtccttgtcttctgcccctgccagtgggtaggatctcttttgccttttgattttgtttacattgtgcttatggcccttaccgcactgtgacttgtaatatagataatggactcactgctcacgcttctcccccaaatagtgaagtacatgttgtttcaagactggttgctagctgactatggcatatcttttgcaatacttaccactttcgtgcataaaggcaccccctaaatgttgagtggaattgttttagcctcttgcaaactgtaaataagctaatctttaggaaggatcttcctttagatatcagtaaaatggagcagcactgtggggaatcagatcaacaaaggtttattgaatgctcacggtgccccaaagaccagcttcctgtcctcctgtccttggagtatgagatgccatgagcaagacagacctgcctcgcacctcctatagcttagagcacagtgacctgccagcctggagagctccccagtccccttctcacagcagtgtgggctaggcaggtgttccagctcactcagccctagattcctcccaggtaacacgggactgagactcctgcggtgcgggttgtatgagcagctgtttgtccagcatctaagtgctgtggcgtccctggagtcactccctggctggcacgctaacacacctcggcaggagtggtcagagtggcagccacactgcagccaccacccagaggacggggagaagaccgtggggcagtggtcacttggagaaattattaatttgactcagttctttatttagacttgttattaatccattttttccatgtttaaggaaaatcctagcatttgtgttgaaatacaaatcatcaccacaaaaatctcattaggttgacgttaaatattagatactagaacataaaggcaagggatttgacagagctgtagaatacattctgtagtcttaaacagtatagaatgtttacctatatgattttgttgttggctatatagttttaaaagaccaaaataaatagcttgctgacttttaaataagcataaccagacacgagcctaggaaccacttgccaatttgtttgcttgttttctgtataaaatcatccaggctcctgcagagcagcagtctcagcctgtgcctcaaccacagaaaagctgctttctcggcctgctggcctgcactcagacatagtggatagacttcctagtgttgctatgatggactgtcggtcacagcagagttcttcatatacagatctctaccctgaaggccggtggtgatgtgggactctggggctgtgccagctgatgccagctctgggacccacctcctgaggcaggagcacgtgcttgggcacatgcagcacactgatgccaccaggcctctgacagcctgtcactttggcgtatgaatcttgctttttggttcatcatttcaaccagaatctatacactgagcagaagactggtccgtttgcttctctttaggcattctagaagtgatcatttttgaaacaatgcctccgtctctagtggagacagctaggtgtaaatgaaccatttacacctagcttgcccacagggggcaagctgatgagacgcacagagtgatgtagtcttttcatagccagtagtaatgcatacattcttttctccaaaggtggttattttctagtccagccccttaaagtgtggtcttgctgggcctcaaaattccttcctttcataatggtctggtaccactgaaatgtctgcatttttttgtgtcttgcttaagttcagaacttggtcagattgactttatcaacttaacagccacattgtcttacataccaataagtttagaactctcttacgtgagctgcgtatgtacttccggtaagaatgcacgttcattctgtttttctttgaagggatctgaaacttgcccacccttcgggatattgcaggacgctgcatcatgagtgacagtaaatgtgacagtcagttttacagtgtgcaagtggcagactcaaccttcactgtcctaaaacgttaccagcagctgaaaccaattggctctggggcccaagggattgtttggtaagtatggtctgttttaatagcgtggattgagtttttgctgtaataaaaagtaaaactaaagtgtcaggatttagaaacatcgatgatttaaaaaaaaactctgttataggtttatgagctaaattgaatcaactgcttgctctagttctgtgtagtcaggctgtagggtacaaacccatattcttagaatgctgcaggaatttaaataggtagcaagttttcttttttgtttgtttcttttttctttcattttttttttcatttctcctgtcattatgatatcagagtaataggtatgacagtgagttgtaacagaaatttggagttttattcatttcttcatcatggccaccttttcccccctcccccttttattcccgatcactcctgttcatttccaggcgccatcattgcagtgccttgccattcattggcaggatgaggccagtcagtgtcattgtcactccatggattaaccaggaagggatgctgtgtgaggggttgggctggccgtctcttccttggtgtctcacttcaactgtgtgtccagcccagaacgtcagaatcgttagtctgaccctgaacgttagtctcttgcatggtaagacggtcagccgccgcggcatcacgggccagctcaaggtaaagctcttcacatgtttcctagactgcagctatcagcacttcccacactttttaccccttatttttctgggcagaactttttttttttctttttctttttctttttttttggtcaatgaaaacaggattacctttgcgcctaaagaaaccgtggtgcagttaaacatcgcgtgtttacagctggtaggcagagggggttgagggagaagaaagctcttttcgacgctctagtagggtagtttacatttccttgtagagatgttgggcttggagaatctttaacgatgatttttaactgatcctctgttgcggagacctatgatcagggaaacagttgtttttttcagccctggcggctgaaggccatgggagctaagaggaaattgcagtccagagcttctttgagaagctaaggcgggaaagggactgtttggaaggaatgcccagcttgcatctaaagtaatggtgatcgtaacttcccgatgacacgtgccgtatcggcccttaaatccagtgtgccagaagaagtgttaaaggtggccgggcgcggtggctcacgcctgtaatcccagcactttgggaggccaagctgggcagatcacgaggtcaagagatcgagaccatcctggccaacatggtgaaaccccgtctttgctaaaaatacagaaattagccaggtgtggtggcgcacacccgtagtcccagctactcgggaggctgaggcaagagaatcgcttgaacctgggagatggaggttgcagtgagccgagatcgcgccactgcactccagcctgggcgacggagcaagactccgtctcaaaaaaaaaaaaaaaaagttttaaagttagtggaggatggttcaaattaggaaactttgatggtaatggaaagttataaacaacaaagcgttcttttggtttataatccatctcctatttggaattagatgataatttgacagataatttgatgtgtgcatgcgagagagagagagaaaaaggagagagggagcaagaagggagaaatgtcggaggtcttggggagttgtttgtggctatagacaggtagctgttttatttatttatttttttatttttttgagacagagtctcactttgtcaccaggctggagtgcagtggcgtgatctcagctcactgcagcctccgcctcctgggttcaagcagttctcctgcctcagcctcccggtagctgggactacaggtgcacgccaccacacccagctaatttttgtatttttagtagagacagggtttccccatgttggccaggatggtctcgatctcttgacctcatgatccacccaccttggcctcccaaagtgctgggattacaggcatgagccactgcgcccggcctacaggtagctgttttaaatacgtgcttcatttatcccagctggcatgtcattcacttgcttttgaaggttggtagtaatgtgaatagtgtatattgtagaatcaccatgagctctgccataaccctcactggtggtgaatcgaaggactaggaaggctcacttgcttctcccgtctcacggggtgttagtggtaggcctgggaccaaaacaagctgtgggcctttgggaccttattgcctgtaccacggagagacttgttgaagactttgaaccactgatactttgataggtcaaggcctctgacccaccttctgtttagaatcttagtaataatgaacaaatattcactaaacacctattaaacaattttcagttaattgtatttatctctataagacaattgttacattcaagaacagtttcaatttttatagctataactgactttcagttttatggtatccttctgtcttatgttctaatagggaaagtaaacactttataagtgattttcgcttccttttcacctttctcttttctctgtatccttcaccaggctatgaggcaccaagtagaattgggaaataatctagttacggcacattcccgtttcaaaaaagaaaaaaaagcttgcttttccaaaaataagctcaacagtagattagctaacactgacaagaggaattggattttctatcatatttcgtattaaaacgtattaaaatattggcattatgtagttaattgatgatctgaaacttcctttcatcactattgtacttgaaaatcatctgtcagtgattctttggggagtgtagcatgcagaataatggtcccgcctgggatgtccacgtcctaatccctggaatttgtatatttctttacatggcaaaaggaatttagccggtgtgattacattaatggccttgagatggaagggttatcccaggtttagttgggtgggtccttcttacaaaagggagacaggagggtcgtagtcagagatgtgatggcagagcgaagtttggagtgatgtggggccacagccaagcaatacaggaagcctccaaccagctgagagaggcagggagcagactccccccagagcctgcagaaggagccacgcagccctgcttacctcttgaggcataagatgcattttggacttctcacctccagaactgtaagatagtaagtttgtgtggctttaaagcagtaaattggtggttacttcttacaatagcaataggaaactaattcacaagcatgtgtatttctacatttttgagaaatataacagcaacagtgtatggtttatgcaactagttaatcttctatttaaattagagctttatggagggcaggtgtgcagataaaccaatgtgcaggtagggcctgtgacctgtacaggattaaatggaagagctggagccagaagaaaatattctggttcctaattttgaattgtttttatagttgtctttgatttgtttatttgtttttgttcctttaaatatgttagtaaaatttattaggaaataagtttttaaattttaaaatattttattttatttttgagacggagtcttgctctgtcaccaggtggagtgcagtggcgtaaacttggctcaccgcaacctccgcctcgcaggttcaagtgattctcatgcctcagcctcccgagtagctgggattacaggtgtgcgccaccacacccagctaattttatgtattttaatagagatggggtttcaccatgttggccaggatggtctccatctcttgatctcgtgatccgcccaccttggcctcccaaagtgctgggattgcaggcatgagccaccgtgcctggcctaaaataagttttaaaatataattttgaagtatttataaatatcaactgtgttatagtacaattaaataattgtaagattttgaagctctagtggagaaaatgtgtgtacatttctttcatacatatattcagtttttctttctccttcaaaaatctcaagtttggccaaaatagtaaagattatttgctttacgaaaccattctatgaaatgcttaacctttaaaaaagtgttcaatattgagtctggcagttcttagaagtaacagttacagccttaacatgaaataattggtatagcgtgttcctttttgtgtcctcaagttctgtataaacatgagtactggcctgttcttaacatggtttattttctattaatataaataaataaaaacataacaatgttcacaacaaaatttctgtgataaaggagacatggtttgaggcacaggatggctgtgattcaggatacttgagttctgagtccagctcttttcctcagcgaagagttctttgtgagcagggcaaatcagtttctttatgggcctcaatattttcacctgtaaaatgagtggtttggaacttctcatttaagatggtggcccgaacacctgtacaaagataagagggcagtaataagtggaagacagttttaacaaatttatgaaatatagaaagtagcttgaatcttgtgatacagataaaacagcagataaagtgagaataagcagctgaagtatgtacgtaaggaagagaacctagctatagtaaaactacagaggctgtgggcatagagatgacaatgaagaagagatgaaatgagtggctaaaactagggctgttaattaaaagtgtgcctgtgaaacagctgtgccagttttctgccaacattcccactgtcccccatgctcagcattttcccctagagagctagtaagttagtgaggagttactaggtcaggatctggggaagcacagaagcctagtgaggggagcttcagcatgtggggctgtctttcccttgggggcattttaaaattctggaaggggctgctgagagagtgttttggactgccctgtggctaggagacagggattagagtccagggccctctaatattgtgtggcaaacttcttttacttgtgttgggaccaataaaaggctgcttcctagaagtaaaggtaactcagagattggcccttataggcactgccactcagcttcagattatcatctcatttgctgaacttgtatgggggtaaacaaaaattgctagtgcccccaggtacctagtagaaataaatttaaattctttgtggaagaagacagcatcatattagataaaattatttctagatagcaaacagttttatacgtgcaaggcccagtctaggcacacaaggagatatgacaacatgaataaaatcctgcagaaacagcagacaaaagaaagagatccataggagatattggcattattagatccacatttttaaatagctatgatattacgttcaaggtgataaaggcaagattaaaagttttggtggagaaatgaaaacttcttttaagaggaataaatcaaaattctagaagtaaaaactatagtaattgaattatgaatttaaggtgtgtaacagcatgctagatataactgaagagagatttagtgacctggaggagaggtcagcaaaaagtatccagaatgaaagctgcagaggcaaaaatggtagaagagcccaaaagagagaaggtgttagttttctattgctgcataacacattaacacaaacttagttgtttaaaacaacacctattgattatctcatagttctatagtcagaaacctgggtgggtttgcctgggttctttgcccagcatctcacaaagctgcagtcaagatttcgactgggctgggctcagctcacagatggaggttctggaagggtatctgcttccaagctccttcagcctgttggcagagtctagttccttacagctttaggtctgtggttcccaatctcttgatctctttcagtcaggcgctgctgtctgctcccagaggctgcatgttttccttctcaagtgacctcctccatcttcaaggcagcagtggcatgcccagtccttcccatactcacatccccctgactttccaccctttccatgagccagagcaaactctgcctttaaagggctctcgtgataagaataggcccacctggataatctgtgttttgttaaattaatgagtacgtttagcccttttgcaagatgcagggtcagtatatgtacccctccccctggaaaattgcatatttatatactagcagcatatagaaaatgaaaatttgaaaagggtaccacttaaaataggataaaaacttttaaattatcatatctggaggaaaaatctaacaatatgaaagacttgtatacaaaaagctaaaaaaattagaaaaaatagagaaaactgaaatcgtggtgggatgtctgattttcatgagttagaatatttaataccatgaaggtcatttttcagacttgtctagagtgattgcaatcaaatctcagtcatcttaaaaaacaaagaaatgaacaaactgattttaaaatttatatgtaaaaataagaaccctagaatggtcaagacacccattaagaagggaggaacactccctctgccagatgtgaagacttaccagaaaactggtgatcaagatggggtcgtgtggtgcaaggagaaacagtggactgacctggagacagagtcacgcatgtgtgggcttctgacttacggcagtggtggccttgtggagcgatgaggaaaggatggtcttttaaataaatggacataggaatgttcatatagaaaaaagtgaaatttgaccccaacctcatattatacccaaaaatgaacgtcagttgaattgctgtaaatatataaggcaagccagtaaagctatttgaacataatacaggagaatgtcttcatgatctttggggtagggaaggactcctttaaacacaacataaaaaacatttatctgctggatgtggtggctcatgcctataattccagcactttgggaggccaaggtggggggatcgcttgaggccaggagttcaagaccggcctggccaacataatgagactccgcccatctccactttaaaaaaaaaaaatttatcatagaagattgataaattttgtattaaaattaagaaatgttgtttattttaaaaaaccaagatcaagaaactgaaaagataagcatagatgtgagaagatatatgactgaaaaaaaatctcttgttcagaatatgtaaagaacaacagtcaagaagattataaagatagacaaacaaatagtcaataggttgtcacaggaggatacccaaataacctataaacaggaaaagtgctcaatgccgttattcatcaagatagtgcaatttaaaactgcgacgaaataccattccacactcagcagaatggttagaaactaagctgttggtgataccaagtgctggtgaggatgtggaaccacccagaggcagctctcagatgtgacccctcgtgcactggaaccacccagaggcagctctcagatgtgacccctcgtgcactgctggcagctgtacaaatttgcagaaccgctttggcaaagagtttgacattatctactgaaatacaatggatacgttcccactcttagttgtctactcatcagaaacacatgcataggggatccggagctgcgtacaggaatggtgatgactgtgttctgtaatagattgaaaactaaaaacaactgaaatatctatcaacgtaatgtgatatagttatacaaaggaatcttatagcaatgatggaaggagttatagctacatacagcaacaatggatgagtcccataatattgagccacagaagtcagacacagaagatttcaaaaaacaggcaaaaataaagtgggagctccagggtgcatgctttagctggtaaagcaagaaagtgattattgtacatgtcaaagcagttatcactggtggacaggagggacagtaattagttgggggtgtgagaagcttttgggatacagagagaacatgactgataaatcattgagctgggaaacaaaaaaagaagcaaaggaatcagtacagtatcgggcataagcctcctcactgtcagcactcagtatggaaatcagtggaaaagtgccttcaaagttctcacagaaaattgatgttaaactcagaaaacttattatcaatgaagggtgggggcagagcaataccatctatcttccatgcaccttttctgaggaaattccttgaggatgtactccagcaagagaggcaacacaagagcgtaatgcaagaagcagtggggactgtgaaaagaaatcccaggatggtggctgcatggcaggtcttaaggaagctgcaagaagagtgtctgcaaatcatgtggaggagatgccagacaacaataatgtaagaagctaggaagtgccagtgataggctaaagagtgtctgcaaatcatgtggagtaggtgccacccaacagataatgtgagaagctaagatgtgtcaatgataggctaaaactggcattttttattagtaaaaactaataataaataataatctagaatgtaataaaagaatctattatttattagaaatgtgtggggaaaactagaaaaaatcatggtctaattatgaaacaaataaagaggacatgatgtttgagcagttgatgaaatataagagaatcctttgtccttgatcctggaaatagtctcaccctcttatgagtggcagcaagagccatgtgatctttagaaaatgaaatgtaatcccaactctggccgttagtgatatttacatttgtacacatacacacctacactccatgtattgattttcaacttctagaaacatcctaaaaaagaaatacagaagacttagttatgaatatatgataaatggaggagaaagggatggaacagtctcattttacataagcagaagtcaagacgttcccttcagagttgaagaagcgtgaagattaggggtgttacttaaagacataaccagggaaaacccaaaaagcagaacaacaaaaaaaataggaggtgctggggattggggatttcaaggaagtggccaaatactcagttttcataacggggagtaggtagatcatttctaaagctgataaatgaagagatagtgataaaaatgtattctttgagtgaccgcaataaccacaaccaggaataactgaaggtagttcctcatggagctgagctacaaatggggaagcttatgcccacttagatgcttagacttcgtccatttgccttgttttagccaaaaacttttttaaaatgacaaataaaaattgtatatatttattatgtccagcatattgttctgaaatacgtatgcattatggactagctaaattgagcgaattaacatatgcattacctcacatactttttaaaagtttctgatgagaacaaatctactctcatcaattttcaagaatacaatacattgttattaactgcagtcaacgtatctcacactagacctcctgaccttattcctcctatctaactgaaattttggacaaaaacttttgataccaaaaaagtgtgtctgttttcaaattctttttttctttttctttttctttttttttgagaccctgggcaacagggtctcagtctgtcacccaggctggggtgcagtggagggatcagtgctcactgcagtctcgacccctggctcaagcagtcctcccacctcagtcccctgagtaactgggtctacagacatgcaccaccacactcagctaatctttgtattttttgtacagacaaggtttcactgtattgcccaggctggtctcaaactcctgggctcaagtgatctgcctgccttggcctcccaaagtgctgggaatacaggcataagccaccacacctggcctattttcaaattcttgagtctgagaagtatataagtataaatacatacatggctacatgtatgtcaatgacttgtttcacaagtggatatatccttctcattttataattcatataaatggtgcaatttgcgtatgaacctgtggatttacatatgtatatagacagacacataatatgaactgaattaaagtaaggtagcttcttaaccaaatgctacaacagatagccttcaactttaaaacagattgaattaggttcgagtttggcaaaagcattaatagaagagaaaaaatgtaaataatgttataaactcaatggaataaagaaatggaaacaatatttaaatcagtgcttaggttctcaggtggcctttagtagctgttagccctcatgagtagcccagaggtgataatacaaatgatactatttagtaccagtttgaaacctaaaaatgtgcaatcaggctacttgattcttcatgtctattttctggaggaaaatgaacagaatttcaacaggaaatgagatgctggcaacacagcctgtagattttattcttactatagtagtaggaggagatagttctaaaagaactttatatagcagttgcttacgttagagattttgtatcttgaacatttaccatgagctgaaattttggcttcttttctttttagatactgttatttgtgaaaaaaacacagtgactcaaaatttagatttattctcctcatgaactcagccatttcctctactgtgatattccaaaatatacacattttaagacaggaaacagtgactttgtttccaacttcttgtcatgtttaaactgaagatttcatttcttgactggttttatgcactctgtattaaattacctggttttgaatgtaatctaaactatgaaaccttggtgtgtgaaggattgctgaaccccatcttaactgtggctgaaatgtgtctctgcaaaggagttagtccatgctgtagtcttagccaactcactctgctcttcatatgtgcaagtaccttgaatgaaataagcagatttttccttgttacttattaaaaagataatatattcaatgtatattctggcattgctgtattttccaaaaccgttctaatggattgtgcattatatttcctaattctagtgctgcatttgatacagttcttgggataaatgttgcagtcaagaaactaagccgtccttttcagaaccaaactcatgcaaagagagcttatcgtgaactcgtcctcttaaaatgtgtcaatcataaaaatgtaagttatgaatgtattttgtctgtgtgcttccatattgtcaataacgtggtaatcttcagggttttctggagatacattgagttcagacctaggataagctaaggataaaaatggctattaacattggttttttgttttttgtttttttgtttttttgtcgcccaggctggaatgcagtggtgcagtctcggctctctgcaagctctgccccctgggttcatgccattctcttgcctcagcctcccgagtagctgggactacaggcgcctgccaccacgcccggctaattttttgtatttttagtagagacggggtttcaccgtgttagtcaggatggtcttgatctcctggccccatggtccacctgccttcgccttccaaagtgctgggatcacaggcgtgagccaccattcccggcctattttttattgataacattctttttttttttttggagacggagtctcgctctgtcgcccaggctggagtgcagtgggcagtggtgggatcttggctcgctgcaagctccacctcctgggttcatgccattttcctgcctcagcctcctgagtagctgggagtaggcgcccgccaccacgcccggctaattttttgtatttttaggagagacagggtttcaccgtgttagccgggatggtctcgatctcctgacctcatggtccgccagcctcagcctcccaaagtgctgggattacaggcgtgagccaccgcgcccggctgataaaattcttaataaacattgaggaaatcaaagctagaaagaggcatcattatggtgcataggaatttaggtcacttaaccaaagtaggaatatcaattgatactctgtttctataaaataggaacagtattgatctaacaaattgagaaacaactaaatattttgtggaaagatgttgttctataagtagctttttaccttgtatatgacacaccagtttcaaatacacgttattagatgatgttacatttagagtagctattcttggaagctccacagaaatcaaagcactaaattttacggagaaataatgtttctagaaaatgaagttgggttcaatcaagcacattgtatgttctcctagtggtcgctgagcattatgttgataacgttgccatgttataaaattacaaaatgttggccgggtgcagtggctcacgcctgtaatcccagcactttaggaggccgaggcgggtggatcatgacgtcaggagatagagaccatcctggctaacatggtgaaaccccatctctactaaaaagtacaaaaaattagggagggtgaggtgggagaatggcatgagcccgggaggcagagcttgcagtgagctgagatagcaccactgcacgccagcctgggcgacagagcgagactccgtctcataaataaataaataaataaataaaatataaaacgttaaatctggtttttgttttgttttgtttttttgagacagggtctcattctgtcacccaggttgtgattctcccacctcagccccccaagtagctgggaccataggcgtgtgccaccatgcttggcaatttttaaaattgtttgtagaggtggggtcttaaccacattgtctaggctgatcttaaactcctgagcttccttcttttgagtctgtggcttgagttggtttaaatttctctaatgcatgctttattttactttttcttttttttttttgaaacggagtctcactctgtcgcccaacctggagggcagtggcgcgatctcagctcactgcaagctccgcctcccaggttcacgccattctcctgcctcagcctcccgagtagctgggactacaggtgcctgccaccacacccagctaattttttgtatttttagtagagacgggggtttcaccatgttagccaggatggtcttgatctcctgacctcgtgatctgcctgcgtcggcctcccaaagtgctgggattacaggcgtgagccaccgcacccggacttattttacttacttatttaaaaaattttttcaggttacaaaaaatatatattatttttaaaaattcaaacaatataaaaaagtaaaaactcctgaataccgccacccacagattactagcattaacagtttggtgagcattcttatgcatacatgtgcacaagtacataaacaagattaatcgtgttattcttcatcctgcttttctcctcgtgcaatgttggtagacctcatatactttaatgaacatagatatgagccagtttttaaatggttgcatagcacagatgcacagtaatttatttaagagactgccagccccctgttgttggatagattgttttgtttctcactgttataagcagtgctgcaatgaacattctaacgcctgaatttttgcatactcgtccaggtgaatttcttggccaacattgtcaggtcagagtacacacacttctagtttaaaatatactgacaaattgacctcaaggaagactattagtttgatattttcattaagagtatttgagaagctgggcacggtcacttccacctgtaatcccagctacttgggctgaggcaggagggtcgcttgaagccaggagtttaaggcacacctgggcaacaaaacaagaccccatctcctaaaaaaaaaaaagtatcagccgggcgctgtggctcacacctgtaatcccaacactttgggaggccaaggcaggtggatcacctgagtcatgagtttaagaccacgttggttggccagcgtggtgaaaccccgtctctactaaaaatacaaaaattagctgggcgtagtggcgggcgcctgtaatcccagctcattgggaggctgaggcaggagaatcacttgaacccaggaagcataggttgcagtaagccaagactgcgccattgcactccagcctgggggacaagaatgaaactccatctcaaaaaaaaaaaaaaaagtgtctgagaacgtctgttacttcagaatcccccagcactacatactgttgattttttttgttttgcttttgccaatttgataaataaatgatattttatttttatttgtgaggttgttatttatttttatgtgttttggtaatttaatttttatggcctttatccatttttcttttggactgctggtctcttctgcatttgtaggagggtttttttttaaatattaaaactattgccctttacttttttttttccatttgacattatttatgttgttgacatactgattttttatcacccattttttgtttcattttaatgtaatcagatctcttaggtttcctgtcatgtttagaaaagattttctacactaggattatataaatgtttatctatattctgaggttttatttcatgttttagatttaagtctttgttccatttagagtttttcttggtataaagattgaaatatggatgcagttttatttttgtccttagctaaccaatcaccccaatcctgtataatggataatttatctttccctcagtcatctggaatgactgaggttatgtgtttggtgcctaagccgtgggactcgctgtttacaccatggggtgtgtactggttcattcccgcactgccataaagagatacccaagacagcgtaacttataaaggaaagcggtttaaattgctcatagttgcgcatggtgtgggagacctcaggaaacttgcaatcatggcagaagacgaaagggaggcaggcaccttcttcacaaggcggcaggagagagaaaagtaaagagcaaagtgggcagtgctccttagaaaaccatcaggtctcctgagaactcactcactgtcacaagaagagcacgggggaaaccgcccccatgatccagtcacctcccaccaggtctctccctagacacgtggggattatggggattacaattcaagatgagatttgggtggggacacagccaaatcatgtcagggtgccaggatggaggcctgccgcaggatcagctctttaaccctctttaggtaaaaatatgatgctacgaagcctttcactttatcacaccaaaaatatgagcttagccttcatatttcaaaactttttagaaatttgtgcatagtatttaagttttcagagttaacatactgctttaatgtctttttacccataaattctacttttttatgttcaaaaagacattatgtgtttaaattctgtaataattaagttactagggacacataaaagtgatttgattaaaagtgcatctttcctttaattgatgtttaacttttcttaaatgccatgtaattggtaaaagcagtaataataagaagtactgaattctgctgtgattttttttcccgtcttaatgcatttcaatattaaacttaatttttgtaatcaagtaatctgacatattgaagtataattaattttctcttttcagataattagtttgttaaatgtgtttacaccacaaaaaactctagaagaatttcaagatgtgtaagtatcatttttattcagtaatgcactgtacatcaaagaatgaacatctagaaaagacagcaactgctttttatacttaggaaatgtaggtggcaatacattttgtgacatcacagataactttctctgttgcagagaaatatttagaaaatttgatggttatatttaattatttgtactacatgggttttcatcttcgtaacagataaaggatgactggaaagaattcttcagagcagaccaggatcactaatgtgttttgctgaactataaaatgtttttctcaaatccctgatggccaggattttagggttcaggagtttatgagtattacttgaaatgactaagtcactaattctatttaagattctgtatttccagaatcttaagtagaatcatcttactaacagtgaaatgaagtattaatctattgagaggcataatgcccaacttcatcctgaatttattggtgtgttcagtcattaacaaatatctgattgccctctgtgtgctgggcactctctgggacttggcctacctggcttccctggaggctgtcagggaagatagacaggcaacatgataaatgaggaaagcatgtagtccattagaatgtgctaggtgctgtggacaaagggtggagctgggtcaggggatcaaaagtgctgagggttggacttgaggctgcagttttaaataaggtggctggggaaagacctccatgagttggtgacattcgaagaaagccttgaaggagataaagaagttggtctggctgggtgtggtggttcacgcctgtaatcccagcactttgggaggccgaggcgggcggatcacgaggtcaggagatcgagaccatcctggctaacacagtgaaaccccgtctctactaaaaatacaaaaaattagccgggcgtggtggcgggggcctgtagtcccagctactcaggaggctgaggcaggagaatggtgtgaacccaggaggtggagcttgcagtgagccaagatcgcaccactgcactccagccagggcgacagagcaagactctgtctcaaaaaaacaaaaaaaaaaacaatttggtgccgcagatactttgggggcaagtagaatggagatagaaggaacagacagtgctcaggacagcagtggatgcccgcctggtgttttccaagaccatcaagaggtggcatggctagagatgagggagtaggggaagagaagagggtgaacaccacaagcctctaggccattgtaaggatgtcttttgctctaaggcaagtcagagtaagagtcttagcagagcagtgagctcacctgccttctgtttgaaaagcgttaactctggcgtctgggttggtaacccactgtaaggggtgggggcacggaacatcagttactgctgtcgcagcagttctgttaagggatgacggagggtccgtttggcccagggggtaataggaaggtgagaggggaggagactgggtgccgaaatggttctaaagatagagccacggtattagctgatagataagatgtgtggtatgagagagaggaattgagaatgacacctagatttttgacctgagcacctgaaggatgaaggagctctcaactgagatgatgaaggctgtgagaagagcagactgggctagggatggaatcaggagttcagttctggagatggctttaagatgcttgttagacatcaaggtggaactgggaatagggaggcagaggaatgagcctggagttcaggagatatgtctgaattgaaggtaggaatttgggagctgatggcctgtaactgagatcactaagaaagtaagtgtggttacagaagagaagagggtcaaggaccagttgctgggtattttgacagcgagaagttagagacaggacagggcagggcccgctgggattataggactggccagtggatttagcagcatggaagacatcagtgaccttgaggaggacagtttcagcagaatggtggctacacaaacctgatccaagtgggattaagaaaaaaatgggagaaggctgggtgcagtggctcatgcctgtaatcccaacactttggaaggcccgaggtgggcggatcacttgaggtcaggagttcgagaccagcctgggcaacatggcaaaaccctgtctctactaaaaatacaaaaactatccaggcatgatggctgtttttttttttttaatttaattttcagttctgggagtccgaggcatgagaatggcttgaacccgggaggtggaggttgcagtgaggcgagatcacgccactgcactccagtctgggtgacagagtgagaccctgtctcaaaaaaatttaaaaaataaaaagaagggagaagaattggagatagcacatgagacacctctttggggagttttgcttgcaaagggagcaaagaatcggggcgttgctaagcggggagtggggtcaagtgtcctttttgttgttgttgtataatcacttttaaaaacgtatatattgtagagcaatttagagccacagcaaaattgagcgggaggtactgagttcctgtctgtctccagccccttacgtgcagagcctcccccgttctcagcatctcccaccagagggtacatgtgttgtgattgatgagcctgtaacagcatggtctttaggctggtaaggagaatttcagccaaaaatgtaagaagtaggaaaatttgtgtttgagattctatttaccatgctataaaaggttgttgttgtttttttttaatttttaacttgtaagacgttaagtttgttatttatatattctttggaaaatttttagaaagttccattataccaagttatctttttactttagccagtgcagtgattggaagtaagttacagtttcatgaaatttagtcataaaggaactttggataattttcaaataaataactgaccttttctccctcaggtatttggttatggaattaatggatgctaacttatgtcaggttattcacatggagctggatcatgaaagaatgtcctaccttctttaccagatgctttgtggtattaaacatctgcattcagctggtataattcatagagtaagtagtgatgtattaattttatttttaaaaacaatcatttggttgtcataatcctttacatacaaaataacatttaaaaaaaattgttaggcttgaaaatccaaatagatgatggaatcatatggtgttttaagagagtcattctaggaggcatctgtggagctgcctggcctgccaggctagaccagctgctgtggacacagccaggtactgcactctcagtcagatactgcgcaagaatacattgttttaaacgtttcattttaaagtaacttaaaacttagagaaaaatttcaagaataggacagagaacttccaactaccatttatctacattcacctgtttttaatatatttgccatatttgaaatcccatttttaatgagcaaggaacttaaaggccaagtagtcagtgagacagctgcttgagaactctctttcttaaataatgacccacatatccatttctcttatcctaaaattctgccgtgccagcttccctgcatcactggtgggagtggccagaccctgcaccacaagggttcagagcaggcctgtgggctcagcagaggccgggatttggataacagtgtgactgtactgtcaggaaaaacatttaataagctagggagcgataatataattaatataattctctctaagctgattttacaattttttgttattattacttgtacggctgtgtaagcagactatcatgatagattttttttttttacaatttgataccaatacttcagtagcaaagaaaatgaaataaacttcttcctgccaaaaaacagtacatttttcataaaaaagaaagatggaattgatgtaataggtgaagaacaattaaaacttgtcaaataagaccagtaagaaaaccccaacagttaacaaaatctgttttcaatgacatattacagaacaattaaaaagctacataaaaatcagtgttacctacttattagaaatacattttaattcacctgtagatccaaaaacatttagacatacagacaaaattttgttcaactgacaaaaaaacccacactacctattggattcatgttgcttaaagggtatctacagaattctcacctcaatattttcgtgttaaataaggtggaaatcaacagtccagagatggtcattagaaatgagccactgacaaacacaatatatttataacttgtataacatttcattcatgtgcatgttttgagcattgtggaatatttaatttgcatcaggctttccaaattccttaaatttataagatttgttctcagtgggagttctcagatgacttttgaaataattattaaaatgaaaatttatttgcaaactactagggtttagatacagaataccttcttgtatttaaagatccatctccagtttgcatacatcatgtctttcaatgtgccggagagaaacaaaggcatccccacgttctttacatttatagggttttttagaaatgagttcttttatgtcttcaagtagaactggaaagactgaagacactaccacattgtttacatgcatagaatttttcctcagtagtagttttgtttcgtattttcaaagggaaatggaagagttccatgtgctttttaatgtgctcagaggtaactggaacatataaaggcgtcatcacattcctcatatgcatgttatgtaaattatactgttttcctccagtataatttctttcatgttttcaaagataactgaattaactgaatgttttccccaaatccttacattctcaggatttctacagagtatgagttttttcatgtttacatacaggactggaatatctaaaggctttgccacatgccttacagtcatagggtttctctccagtttgagttctttcatgtttacatagagaactggaatatctgaagacttcaccacattgcaagtctgaagacttgaccacattccttatagtcaaagggtttctctccagtatgagatttttcatgtttacctagagaactggaatgtctggagacttgaccacattccttacagtcaaagggtttctctccagtgtgagatttttcatgtttacatagagaattggaatgtctgaagacttgaccacatcccttacagtcaaagggtttctctccagtgtgagttctttcatgtttacgtagagaactggaatgtctgaagacttgaccacattccttacagtcaaagggtttctctccagtgtgagttctttcatgtttacatagagaactggagtgtctaaagacttgaccacattccttacagtcaaagggtgtctctccagtgtgagttctttcatgtttacttagagaactgaaatgtctaaagacttgaccacattccttacagtcaaagggtttctctctggtatgagatttttcatgtgttcaaagggagctggaatgcctgaaggtgttaccacattttttttttttttttttttttgaaacagagtcttgctctgttgcccaggctggagtgcagtggtgtgatctcggctcactgcaacctccacctcccaggttcaagcagttctcctgtctcagcctcctgagtagctgggattacaggcacctgccaccaaatttggctaatttttttttttttttttttttagtagagacgggatttcaccatgttggccaggctggtctcgaactgctgacctcatgatctgcctgcctcagcctcccaaagtgctgggattacaggtgtgagccactgcgcccagccacattttttatattcataaggtttctctccagtatgagttctctcatgtgtttggaggtaactgaaccgactgaagcctttatcccatttttgacattcattgggtttctctccagtatgagttctttcatgtcttctaaggaaactgtgttgactgaaggctttgccacagtttttacagttataggatttctctccaatatgtgttctttgatgtcttcacatggagcagggatgactgaaggctttgccacatttcttacatttatagggtttctctccagtattatttcttttatgtttctgaatggaactggaaagagtgagtcttttaccatatttcttaaacacatggaagatttttcacactgtgagctctttatgtctttgaaagtaactacaaaaactgaatcgtttcccacatttcctacattcatggggtttctcttcagcatgagcacctttatggttatgaaggtaaccagaatgtccaaaggctttatcacatttctgacatttataaggtttttccccactgtgagttcttttatgtttttgaaaataactgcaaaatctcaaggctttaccacctttcttccattcacagggtttgtctccgttgtaaattactttgtgtctttgaagtaaatagagaaacttaaatgtcttcccacatttcttacatttatgaggcctgttaccagtgtgtgttaccatgtgtctttggacatttgtgagagaaatgaaggttttctcacattgtttacatgtgtgtggcttcaccccacgtttctcccattcatatagtttgtgtccagaatgagataagatgtgcctattaagggatgaaggacatgtgaagacttgtccacacacactgcattcacgtgaatttacatcagcagaaatgctcttcttcaggttcagatttggaatctggccgaatatttctccacaatgactaccttctttacattcacagagtctttctcccacaggacttcataaattctttccagaattattgaaatgactttcactgttctggtcttcccatttgtttccatttcctggcttccaggattctatggcatcctgcttagggatctccaaggtcacagggtgacagtctgtggcagagccacctagggcctcctggcccgaattttttctaaaaaacaattaaaatactgagtgagactagaggcagagataatataattttatcggaaatagatattcttagcattccctggattattactatactaattttatcgacagattgccattagattttatgttccaacagcaagaggtcatcttgctgaactgaaatctgtggggaagaagctagtgagagagaagaacagcagagcctgttactacagaaataagcagatgggttttagatggtggagtggtaataattttttcagatctcttttgccaggaaagattggttccatcacagccagtgaaggcctcccttgggggtagaccccaccgacccacagagggcagggttgtctcgtctcaagcctcaggtctgtggcccaagggcagcgtcagggatagctcttgtcctcccagggctagctgacagcctcccatctgccatctagtgtactgttttttaaaatggaacctttgctgccatcagatggtcagttaaaataatatattggtgactttgctttaaaaatagtaacactaggcttctgaattaaagatctcctgatgtaccattctatttctgttcctgaagtttccacagaccttcatatcatttaaggtactcttgatatctcttaaatacattttatttatgctttagaataatttcccagattattagtcttactacattaggccttattcattttataaggggaaatggtttgtctgacttgttcccccttgggccccaaggtaagtgggaaacaatggcctcctgtcactgggggctttgtgagagctgcagcgtcggcaggtcttttttatggaatagctggtgcctgcagcctgagtcagatggggcccaaaggagtgtttggtttgcccagcacgaggtatagaaacctaagaagccttcagaaaatggccccgttgccatccctgcctcctgctcaccatccccacccacctggcatcttgctgtgtcctccctgtcaccttgttccctgctgcttcccacatccatggccttgccaggctctccccacatctgtgtccatgtgggagagtgatgcacgctcactgtggggaagttccaaacattgcacaggtgtataaagcaaagggggaaactccctcttgccccctgccccccccgccccacccctgcccacatcccaggaagggaggagccctaagttaactgttctgtgtggactgcaccatcctttgttccatctacagtaccatgcacagagatagacacacttttaattttgcctattaaaatggtttaatacaagacataaattttaagtattcgaaagataaagttttgcccatgatatcccaccgaagtatatactttatataattcaaaaaatgaaatgcaagtaacccagccctctgttagcacctggagatggccagtgagagcacgctggtgcatgtcctgcctcactctgcatggcacctctctgttgactgatgttaataccagcatatctgtccttatgtccttttgaacttatatccttcaaagacaggatcaccttgtatataactgtgtagcaacttgctaaacaggtagcttggtttgttttttttaaatcaaggatcaaatatttctataaatatttatgaaaaacagatacctccacctctccctttatttctctctccctagaagcaaactccttcagttcatttagctgattattttggtgtctatttccatattgaaataatatgcttagctctttcttcattgatcctttttcagtttggggcataagatgctgatttagcttcttaccaacccagccctcaccctcggccttcctcgccctcctcccaggctggtggatgtgatggtgtttagctcgttgcatcatcgtgagcgtgtaaatgctttgcacagcaggccttcccctttcaccttttgttccctggagttaacaaacacttatcctctatttgtgtgaggtttttgtttgttttggggggtagtttctgtgttcttggtggtaattcaaccctaactcttccatcaggcatctgaattttctctcagcacatgcagatgtcttgggtatttcatcagtttcatcttctcaggaacctctcccaagcctcagccctgttcccctctgcactggctgccgctgcacctgctcaaaggagctgtcctggatctcccttggtgattttgtgggggtttccttcatctgcctcccatgttggattccttgcttgctgtccttgtctctcagattacccccttgttttggtgggatgcatcctccaaaagcttcctaaattgccacaggggagagaaattttttgaggcctcaaatgtctgaaactctttattctgccctctcacatgatgagtagtgtggttgtgtgtagatgtgtgtagaattcttagttacagatcagttgcgctcagaatggcggaggcagtgcctgtggtagcaaggcatctagcatggctccggagtttcttagtgccatctgatgtttttttagatggagtctcgctctgtcacccaggctggagtgcagtggcatggtctcggctcactgcaaactctgcctctcgggttcacgccattctcctgcctcagcctccctagtggctgggactgcaggcgtccgccaccacgcccagctaattttttgtatttttagtagagacagggtttcaccttgttacccaggatggtctcaatctcctgacctcgtgatccgcccgcctcggcctcccaaagtgctggattacaggcatgagccactgtgcctggctgatgactaaccttttttaagtgctgtggttttgggttttggtttggttttatctctggaaacttttaaactcagttatttattccttgtattctgagatgttttgatgtatgccttgatgtggacattttttctttagttttgctgggcacttggccttcagtctggaagcacatattatagaggtctgagaaatttatatcatttctttcagaatgtcctcttaactccattctttattctttttctctgaagcacaagttaattgacactcatttgctcttaaaagttcctttttacagcattctgttcttgttgcatatatatactatcatctctgaggataagcttttgttgaagggttttatcactccctgcattgtctttctctactgagagttccttttttagtgtgttaggtccctccctgtcacacgcaaggctttccccaaatgtctggttggatcatgtttaagattgaaacattaggccaagcacggtggctcatgccagtaatcccagcactttgggagactgaggcgggcagatcgcctgaggtcaagagttcgacaccagcctggtcaacatggtgaaactctgtctctactaaaaatacaaaaattagctgggcgtggtggcaggtgcctataatcccagctagtcaggaggctgaggcaggagaatttcttgaacccgggaagcggaggttgcagtgagctgagatagtgccattgcactccagcctgagcaacaagatcaagacttcgtctcaaaaaaaaaaaaaaaaaaaaaaagattgaagcattaaaggctgactggaagtgctgagtgaatgggtaaattgttaaagaatgggtgtctcttggaccacaggcagccacaggtgtcaccttctgtaggttttttctctgggcaccatttaatttctctggaaaaggccccttcagtcccttggtggagggatgtaagcctggctgctggggtacagggctgtgcttctcatgtgacagagcgcaaactcaccaggcagccctgttgcaggcaggcctcgccgtgccttccctgttggtacccacaggactgtgcatgcggcgcctgtggccctgcacctggaagctgggcatcagtttctctgcgtgaagggccagcaggagtgaggaaggagtggagcctcacttctgggatggagatggggatctgggacatctactacgtacttggactttcaataaaatgaaaacttctccaagtgctacccttgcctcgttctgcctccatagcacctgcagttcacttgctgagcctttcctgggtgtcgtggccagttcaggaggttggcatttccttctgttcagcaaggggattccaccacagggcgnnnnnnnnnnnnnnnnnnnnnnnnnnnnnnnnnnnnnnnnnnnnnnnnnnnnnnnnnnnnnnnnnnnnnnnnnnnnnnnnnnnnnnnnnnnnnnnnnnnnnnnnnnnnnnnnnnnnnnnnnnnnnnnnnnnnnnnnnnnnnnnnnnnnnnnnnnnnnnnnnnnnnnnnnnnnnnnnnnnnnnnnnnnnnnnnnnnnnnnnnnnnnnnnnnnnnnnnnnnnnnnnnnnnnnnnnnnnnnnnnnnnnnnnnnnnnnnnnnnnnnnnnnnnnnnnnnnnnnnnnnnnnnnnnnnnnnnnnnnnnnnnnnnnnnnnnnnnnnnnnnnnnnnnnnnnnnnnnnnnnnnnnnnnnnnnnnnnnnnnnnnnnnnnnnnnnnnnnnnnnnnnnnnnnnnnnnnnnnnnnnnnnnnnnnnnnnnnnnnnnnnnnnnnnnnnnnnnnnnnnnnnnnnnnnnnnnnnnnnnnnnnnnnnnnnnnnnnnnnnnnnnnnnnnnnnnnnnnnnnnnnnnnnnnnnnnnnnnnnnnnnnnnnnnnnnnnnnnnnnnnnnnnnnnnnnnnnnnnnnnnnnnnnnnnnnnnnnnnnnnnnnnnnnnnnnnnnnnnnnnnnnnnnnnnnnnnnnnnnnnnnnnnnnnnnnnnnnnnnnnnnnnnnnnnnnnnnnnnnnnnnnnnnnnnnnnnnnnnnnnnnnnnnnnnnnnnnnnnnnnnnnnnnnnnnnnnnnnnnnnnnnnnnnnnnnnnnnnnnnnnnnnnnnnnnnnnnnnnnnnnnnnnnnnnnnnnnnnnnnnnnnnnnnnnnnnnnnnnnnnnnnnnnnnnnnnnnnnnnnnnnnnnnnnnnnnnnnnnnnnnnnnnnnnnnnnnnnnnnnnnnnnnnnnnnnnnnnnnnnnnnnnnnnnnnnnnnnnnnnnnnnnnnnnnnnnnnnnnnnnnnnnnnnnnnnnnnnnnnnnnntcacagtggaagcccaatggaaactgaaactgcccccaagatagtaaatcaaaaccagatcacacctgcagggcccggggtgggtggaggacactagggccaccatggaagctcaggggagcagagacagtggtatcttgcatcccagtctaactcattagtccagcccttgaagaagctgcatggattctggagaatgaccccagacagccacaggcttacggcactggcagtcctggccgcagctgctgtgcaggtcaaggtgcagttgttgctggagcagattaataaggcctcaggtctggcatgttgatggggcaaatgcatcctccacactgattagaagagaggcccagacagcgcccacactgctgcaggctggacagcagtgttctctcacagccttgctctaagcctttgctaacgttcccaccctcccataacatggccgcaagagacctgccccagacttcgcttatgccctgacccctgacccctgacctcacgaaccctgcaagtggaggagccctgagagtgtttggggtcttcgggtttcagtgtctacttagagctgtgtccattcatcctcaagagtgcctggctgttcttacccggtgggtggccacaggtacctgtggggaaggaccaggcaaggccagacagtggacacctgtcatgatgtgctccttcctgggatacctctcaagcagtgggcctggatcccagagttgagcgggcagtgggggaggtcagcacctgccccactcgtgctgcgggtgctgtgggtaccctcactgctgcccacagggtagcgttgggttccaggcattttgggagccaagccccgatccaggcgtcacttggatctgtacttggcatttgtcttctttgttctgagtgattttcaagacttgaaggggcagaactgtctttcctctgctgtcttgaaattgaagtgaggcgttgggaagctgcctcaggttgtatttcgggggtgactagagagggtcccagggtgcggggagagcacctccttagccacctccccattggccacacagagcacccacacaagcttgggattttatcaccacagtcttccagcagacggcagtaaagtgtgcttttcctgttaaattagtatgtgatgacagttttttgacagatggcagtgtcttcagatgagcgtgtttctggcgcactggggttcacagagctggcaggcagcccgtggagatggttccactgctgcgtctgtccttggtagaaccaggctgtccttgtcttccttgctcctgtggccgtgctgttagttctgggtgggctaggcttcagggcctgctggctggggaagtgtgtgcatttcacacctcagaaatcagcctcctggagagaaagtgcccactgcacaccctctgtggcctgaggaagcgcctgtttctgcttctcccgccagcaccgagtctgcttgctttccatcgctgccaagtgatagactaaaaatgggcattcattttgggtttttaaagaagatttttgtgagattgagcattattttatctgttagtaatttatgttctaaaatgcctgttcttgtcgtattctttgattttaaaaaaggaaacaagaagcgaattcgttcatttggtcttagctccctgactgggtcctcacagcggagcgtccctggttgaatgtgggctgcttctccccggctttccttcatgcagggaggcagcccggcttcttcctctcaggcctttctgggaaccgggggtgtctgcacagtactctaaggtggaatggaggggctggggggggcctcttttggggccaggtagagatgaatnnnnnnnnnnattgtgactgcatttttaaacattatatgtatatcatttaaatcttacagaatctaggaagcctagaaacaggtcacttagcagcatggcagtgtaattgtacctgttgtcaatgtcgaaatggcttcctgcttgccctgatgacagccccacagccttcactgaggcacgcctgcaaccccccttgtggcccatcagttgggatgtcttacaggcaggtgctaggcagtgttattgaacctgcaacttcccgggtaaagtatcctcatgccttacgccatgtcagtggcttggcagtttgacattgcaggtgcactactcttgtgaaaagaatgggtgtgggttgtttacaagtcacagtttctcgagtgagtttgcaggccgaagtccccaggcaaaagtcaaattcctaaggcctgaggaaggggctagggtggaggatcagcaggaagaaaatcccttagttatgagggaaaaggttgcagaagttgtgttaaggctttgcaagtcgggtggaatatgatgcatgtcttcattctgcagacacttcccaagtgtctgctcgcgccaggcgtgcttctgagtgctgagagctcacacagtaagcactggggagggaagagaggtggcaaccagaacatgagcaggtgagtttttgtgccacgtacagatggagacagcagcaccagtgctggcgtgtctttgtggcgaaggtgagaagattggaggtggatgatcatggaattgctcttccaaggagagaaagagccatgggaagattccaggatcagatgattctagacctgtgctgtccagtatggcagccactaaccacaggaggctgtggagcactcaggatgtggccgtgctgcagttgtaaaatacatactggacttncaaggctcagtactaaaaagagaatgtaaaatatctcagtatttttcttatgttgattacattttgaaantgacatattatggatatattgggttaaaaaatatactgtatgactaaaattaatttcacctatttctgttcatgctgttgaacatggctagtagaaaatgtaaattatacacatcgttcacattatatgacattgtctgtggaacagcactgccctggactgacagagagcatgaggaccttagcaagagagagtcagactattggggatctcaagtccaggcgtggagagcaggagggggccgtgtgtgttggactgacagagagcatgaggaccttagcaagagagagtcagagtattggggaactcaagtccaggcgtggagagcgggaggggggcatgtgtgctggacgtgtagatgcatggatggagggtagataggacagcctgagggcctgcgagaccacagaaagggcaaatgagggccatgaaggtttccactgggggtgaggggcaccatctgacggctttaggctgatttgttttagtttcaatttgagagtaagattttccaaagttgttcccaaatctctgagttcagttcactccctacactctcacactggcttcacgaccctcacggatgtgaagtagtttatttagcatgcttcattcattttactaatttaagccatttctttcctaggatttgaagcctagcaacattgttgtgaaatcagactgcaccctgaagatccttgactttggcctggcccggacagcgtgcactaacttcatgatgaccccttatgtggtgacacggtactaccgggcgcccgaagtcatcctgggtatgggctacaaagagaacggtgagtatagccggggctggaagaggctgggatgtttagaaattgctctagcagtggtctcgagttttttctctttcctttgaaccatatgatatatactgtggggactgttacacccagaatatagcatgatccagagataagaaataattaattgtgtttttccatggttaaaatcattctcttttaaaaattcacttttaaaattgttatttttgaactttttaatcagagttaagctgtctatagccaagtgtgcaaatcctgagtgtgcagctcagctgaggtgagcacacccacagcagcagcagctctggcctccccatggcccctcctgatcccacgaggctggccaatctcctgatctccagtaccatggatcagctttatttgttggtctgcatattatttttttgaatttgatgtaaatagaataacacatgttttcatgtaaaattggtgtctttttacatcaaaacttagcttattctagcaatatcagagctctttgaaacttgtcttttagcaaatttgttgaaaataacgaaatcacgcttacttatttttaaaaagactgaaagtttgcccgggtcatctgaaatgagttttgctacaggttcatcttgctgcgttgtagcttgtgttcccaccctgaggggcacagcttcatgtgcttcctgtggaggggagacaaaacttgatcccctgttcacttctcccctcggcccgccagcagggcgcttagaggcctctgctgtctgtctgaggccccacagatgagggtgggcaccgtggaagtctgggcccctctagcagggcctcacctgcagtcctgcaagccagccagcctgtgccgccagtgagtgctgctgcctttctgacggggcagtctagaaaatgatcgctcaggaggtgtggtatcaacaacgcacagaggctcctgccggcaagctagtgtaccgggtttgtcctgggagggggtttgaagaaaaaagatgggggactctagctggtttttaatcccctggtgtttggtagtggacatctggtctgtcgggtgcatcatggcagaaatggtcctccataaagtcctgttcccgggaagagactgtatccttcacaggggacccggtacttggccatggaggctggggtgggcatgtggccctgaaaagctttgtgttcacaggcacttcttgtttctggttttttgtttgtttgtttgttttaagctataaagtattggactctttggcactaaaaccccagattgctacaaaccgaaggctaaaatagaggtcagcaatcattcatattgtgtaaaatgtcacccttagctagcaatttatttttccatatttgtgtgtttagtgcactgttagaattccttttcctcacttttgttttgttcatggcacttcataattttatcatttcattttattttcagttgatatctggtcagtgggttgcatcatgggagagctggtgaaaggttgtgtgatattccaaggcactgaccgtatccttccccgcgaccttggccccgccatgctttcttaatgcctcaggcagcatgaccacctgcttacacgagcgctcacgaggacaaagtcgtaaaatccactccagactgtgttctaaggggggctttactgtatttgttaattagtgtcacaagccaagtggttcaatttcattctttatttttaacttgactacctgtgatgattttgagacttagagttaggttaaaccaattatattagctcttaattttgccaaaaatagctggacacatagaagaaattatttactctttgataagtatattctgatatttaaatgaaaatactgtattatttagtttattccattaatttaactaggaaagatgctatctaaatttaataggctagtgtgcttgtgtgctttaattaagtactattttgttagttactggtatgcattgaaatattttcccccaaagtaagaactgaagcacattacaaaagacctaagtgaaagagattaaaatgaaaattttgtgaggaacaatatgttaaactttcttgtttgttactgtgctgacattttgtagaattttttttaaaaatctgtctagtgggttatattgtgacatactggggaagtcaaaataaatgtaaaatgaaagagataaactcatactgtagtcagcaagtcatgttagagatacagcagaaaggagaataactactctaattgttacaatagccttctttcctcatttgccattcttccatcctcagtattttttaccctaacatggttcttcacatcttccctttttcatttgtgttttaaccacttagtttttcattagtctttgactttgttttcgttatgaaagtttaaattggtctccatccttgggcagattgatggttgcttttaaggaaatcaagctccatagtcagtgttttgtatgtatcttaggaaaataatttcagattttaataattttatcaaagtggtctccttataaattcttcacagtgcaaacttgaagtgaaaatatttttattcctctcattttattgacctttctttacattttctatatcatagattatataatatgtcaagttagatattttatttgttctactaaattttctagcagtttccatagcctcatctcagattcacttgttgcaacctataaataaggacgtctttattttgcaagtaaacttaattaaaaagggaaaagttgaaaaattaaaagactaataatttagaaatatctacttaatgttcagtttgtctcaattcttactcattttgtgccattccttgttttattacaaaaagttttcttcaaaaagtacaaaaatgaaaaatgtgagtactttttggtgcattttagtaagtaaaattaaaattcctgctatacatatgaacattaatgtcagtaattaatggtgttatatataaggttacctaatgttattcccaaaagccacacagagtttaacatcattttctaaagaaaattttgccaactctttcaaatattagattgaaatttgggagatagaaaaaagttgcagaaatcagactgagggtctcagagatttgctttaatttgcgacccggggtagaaaaggaactcctgtccctgcggtggtctatgagaaagagaaagctttagccaggccacctcgggccccagctcagactcctccccttggcagccatgcatccttgagaaatttagggcctctctgcgccttggtttccccttctgtaaaatagacctgcggtctgcctgcagcttcacgagagttagacgacagggtccactgggcttgtcggaattattgttccccttcccccgtccctctcatctgtcccccgtccctcctacctgtaggatgctggggtggaggcctctcggggaatctgtgggtctcctctcacaactggtttaatttctagtcctttatcattaacccagcagatatttctctcacctgcccatttctgggtgcctagtctgactgagatgcaaagaggctcctcccagctgctgaattgagggtggatcgtcaagggcagggcagagcaggagaacagagcagaggctgccatcatccagaggagaggtggaggcccccagcaggcgggtaggggtgtggccggggagatgggcttgtactctgctttgaagctggacccttcaaggagccttgctagggtttggagatgtctgttagacagtggaattcaggggcaaggtctgggatagagagatcaaagtgggtgtcatccatctgtcggtagccttgaagcctaggactggtagcgagcacttgcaggggaggaagagaccaggacccgggacttagcccccttgaggtggagggacaaagggaatagggaaggaaatggagaaggcactcaggtgacccctcctcctagagcgtggtgactgagggaggctcattcacatgaggagatgaggacgggggattggcccctgggccttgtgatggctgctggcagccatgatgggcacagcatttatggagtggagggaagaaagcctgatgggagtatgtttgagagaaaatgagaggctgggaattagagacacaagtgtagacagctcttttttctttccttttttttttttcctttgaggcagagtctcactccattgcccaggctggagggcagcgatgcgatctcggctcactgcaacctctacctcctgggttcaagcgattcttctgcctcagcctcccgagtagctgggattacaggtgcccgccaccacgcctggctaatttttgtatttttagtagggccagggtttcaccgtcttggccaggctggtcttgaacgcctgaccttgtgatccacctgcctcggcctcccaaagtgccgggattacaggtgtgagccactgagcccgaccgacagctctttatggaagtttttgctgcaaataggaataagaaataaagcgataggtagtgagggccaaaggaaagcagctactgcgttaacatgggagaaaacaccatcatttaccaacgtggtggaatgtattggtagagtgcaaaatgtcgatgatgttggagaaggaagagttgagggagctcgtccttgagtcagcacgggggttagggtctagagctgagcaggcttagtgtagccgggagtccagatggttgctgtgtggcaaatggcacacagatgctgggtggatgcatcctgggaagtctgtgggagtgagcaggcagaagaggtatcaaaagtataagtgggctgggcgcagtggctcacacctataatcccagcactttgggaggccgaggcaggcagatcacttgaggccaggaattcaagaccagcctggccaacatggcgaaaccccatctctactaaaaataacaaaaattagccgacagttacggcaggtgcctgtagtcccagctacttgggaggctgaggcacgagaattacttgagcccgggaggtggaggttgcagtcagccgagatcatgccactgcactccagcctgggcgacagagcgagactctgtctttatttatatatgtatatatggcagaaggaaaaggtgtgagacagttttcacattttggctaaataggtaaatgtgggcataattctgatttgacaatatgtatgaaccaggagtaggaaggagaatttgctagtgaattgaatgccagaaacccatttcctgagcgggtcttttggaagtataacattttggaagaactgagttcatgtactggttccctaggttatttcatggtgatgtaagttcatttttctaagacatgcctcagtgagcacttttttaagctgctgttgatgctatttttttctcacttgcattctcttgtatagcgagtacagtttcagtgtcactttcccacatgtaatcctaattatcccaagcctaacaagcaccctgtggaataggcaaagctggtaatgtctgcattgaacaaataaggaaacagaccccaaggaagcctgactttcctgacacactgagtgtttaatgcagagttgagtctgaaacccaggtcacgcactttgaaaggaaataaaatgcattacctagggatcgcagtgatggttgggaagagtcagttccaagtaaaatagagcatcatttgaaagctgtcgctgggctcagtctaagcccagttgcttggttcccagctgtaaactgaggaggtcagataggtctctccacaggtcccttgagatcctctgttctttagagagctgtgaatgaatctaaggtagcattagtatgaaaactgatttcaatttgcttatgtaatgtttatctaatttcgtgtttaatcatttttgccataggtattcttagttataagataaactttattttgaactagagtgggaaggtgtgtagacttcattgtgttgatttaataaactgtgatcatagtttatgaagatgcagagtgtaagagttttaaaaaatagtgtaacttggaaacccaaaccttatctgaatattatttcaaaattccgctgctgatccagtggggtggcctagtcgataggtttaaatattattcaagtgatgctgccgcgtgtactgtgaatacaaggtacttcagttgtattttcctcaagagactccttagatattgatcagtggaataaagttattgagcagctgggaacaccatcagcagagttcatgaagaaacttcagccaactgtgaggaattatgtcgaaaacagaccaaagtatcctggaatcaaattcgaagaactctttccagattggatattcccatcagaatctgagcgagacaaaataaaaagtaagatatcctttttttcttatacttgtgttttgtaattcaggtggtgctttcactctttcatgtttgtattctaaaaacctgtgttttgggagagaaagtcattttaggcctgaagtctgaggtacgaaggcactgaggagagaaagcttaaaggtctagaagctttatcctctataagatggcttaattgaagcctttggccaaaataaaaataatcaaatcagtctgaaagaatcttatgttacagttacagcaactggaattcaaaaagttttcaggtaagaagaacacttaatgcagattctagagtcagaagcgatgtgacagtcgttcgatgaaaaaggtccttgctccccaccttctcctgcaccctttactacagtgtgattgtttaaggaaaaagaaaagatttgattctgtccgcatgaaggtaaactgtgccttaatcagaaaagccccagtctttgcttattcaggttgtgaactttaattgccaaaacctaggtgagccttatatttaactaagttattgaacttgtttttctttttcctaaataccagtctgtagattaaaaaaaaaaaagtgtaagttgccagcactgtatacagctaggccagccagaagcatctgtgagtgttttatcctgtgggaatgtgagattgttgtgtggtttaaaaagtctgttctaatttcatttcgatgtgacttagagaaaaatactcccccgtgcctcatgcccacactctgggcagtgccacccgcagcttggcaattcccaccttccttgctgtggtttcccagccttgggccctgcccagacattggtctgaggctgcctggtgctcttccccaccaccctgggggcccaggtttctcttccccttgcaggtccagaggcgtaaaactacatttggaaacctggtttgtcatgaaagtggacatttgactttttcttaaaaatgtttgggttatggccgggtgcggcggctcacgcctgtaatcccagcactttgggaggctgaggcaggcggatcacgaggtcaagagatcgagaccatcctgcctaacacagtgaaaccctgtctctactaaaaaaatacaaaaaattatccaggcatggtggcagacgcctgtagtcccagctgcttgggaggctgaggtaggagaatggcgtgaacccgggaggcggagcttgcagtgagccaagattgtgccactgcattgggcgacagagcgagactccgtctccaaaaaaaaaaaaaaaaaattttggggttatattcatcttgaacctatcaaacatttctcaaaattaatatatctttgttctatctgtgttgtcatatttagttctttattgtatgattctgtttgtttcatattaacagcattgatttaatatttgttgtcaccctagcaagtcaagccagagatctgttatcaaaaatgttagtgattgatcctgacaagcggatctctgtagatgaagctctgcgtcacccatacatcactgtttggtatgaccctgccgaagcagaagccgtgagtatctgttttgaaaagatttatatagagaggccaggcttatatttccttggatcttgtctgtccgtccagagtggctacatatgggtagcaagttctccatttgggggctcccagttacagaaaggccaagtgttgtctgagacctgggtcgcttgctcttttgctgctggagccccagctcagagtacctcgggaatgaacttccgctttggtgctaccagtctccattttgcaaatgctgctgtgagctcatagtttattaagcatctgttctgtgccattggctttggttacatcctcttgtttaggccactcaaccagagaggctgagcaacttgctgaaaaatcacacgtctgtttatccttccctaaaggcattgtacctcctggttcccccgctggaggagctccactcgatgagtttggtgctcacgtgcgtgtttctgtgtcagcactggtgtgagtgagctttagctgtgagggaaatcactgcgtagtggcaggcttccttcatgccatgagtgaaatacatgtttatgtcatggcctgtggttttgccatcagtttaaacattgttttatataaaaagaatccaatttataagcagacttttataacagtccatttatgagttggacattggatttgggagttctcccatgaagaaaatgtaaaatttgttctaagaaacaacagtaccttccatagctgccagcacagtgccttgtccataatgggtctctgggaaacagcctgtgatgatgagtttctaatgacatctgggcagatgtctgcgttttgaggtcaggtgattattaagaggaacataataactcttctttggttaactttttcataattattttgattctaaagtttatataatatcacatgacaaatctttattaaaccacgtgttgaattaaactaaatccatatcataaatagactagaagtcttccaagcaattttaccttttttagtgcctcattttttttttgaggcattactgttgactttacatatgatttaatttttagccaccacctcaaatttatgatgcccagttggaagaaagagaacatgcaattgaagaatggaaaggtaaagatggagcttattttgatccttccttatgacatttcttccgatcctgtagagcagaggcttttcattttgtgacatttcccttcaggaaggggcaagaaaccctgcaacccacgtagcctctttctccccagtttccagtagaaaatgaacttgaagagaacagagttagagaggaacatttatgaacttcttatcatttgcttcaagagggaaaaataatatttttttcatggcttttcacatattgatttataaactgagcttagcaattgtatcatacttatattgattgatatgtttttaagccatgtagttgtacatatgttttaaaatctagtttgggggaaattgcagtttgaaaatatgcaaataggtattattaccactataagattaaccaaacaacccacagcaaactatacctgtaatgaagaggttgaactaacaatttttcattaagaagcaggatcagtagtaactgagaaccacagtcagagtcagtcaacactgatgagggtcatgccccagggccatcctggggtgtgggagtgccggttacctgtgtgtgcccgtgctcagcagtgcatgcacacagcgtgctcactggcctcagtcaatgctcactggcctcagcgaatgcttgcaacgtgctaatgttggtttatgaatactgacattttaggaatccctaatcacttacttcgtaggtaattagtttttcttacagatgaaagttgaggaaaaccgaagttgaaattaagaaaagacttaggcctgtggattcatttctggccagtgtggggggcttctagcccacatgtggatgctggttacctttggagaaccccaagtaaccacatagagaaacatattcaaatgggtgtgagaatatccaatccctcacagtgttctgtgggagccactccacttcataaagcccccttatggatccagaaccaccctacatgttttgctgccttactagttgcattgaaaaagatgtaatgtagtccaggcgcagtggctcacacctgtaatcccaggactttgggaggccaagtggggcagatggcttgaggccaggaattcaagacaagcctagccaacatagcgaaaccctgtctctacaaaaactacaaaagttagccaggcatggtggtgaacacctgtaatcccagcaacttggatggctgaggcatgagaatcacttgaatccaggaggtggaggttgcagtgagccaagaccatgccactgtactccagcctggatgacagcatgagactgtctcaaaaaaaaaaaaaagaagaagaagaagaagaaaagaaaagatataatgtatcaaaacatgaatattttggtccaggtagactatattactgaattgactctatcttacaattaaaaataacaaatcgcaatgcctttgttccagttgatttggaagcagagtttagagatacagtgaaactgtttagaaactgattaagcattttcacttgtatttttattaaagagctaatttacaaagaagtcatggattgggaagaaagaagcaagaatggtgttgtaaaagatcagccttcaggttagtgattgctttaattgattgtatgatatttttctttccctattcaacttttttttttttgagacagagtttcgctctgttgcccaggctggagagcagcggcgcgatctctgctcactgcaacctccgcctcctgggttcaagcaattctcctgcctcagcctcccgagtagctgggactacaggcatgtgccaccatgccctgctaatttttgtatttttagtagagacggggtttcaccatattggccaagctggtctcgatctcttgaccttgtgatccgcccgcctcaccctcccaaagtggtggggttacaggtgtgagccactgcacctggcgtctttcccgattcaacttttataaatggcagcaacatgtgaaatgccagcctggctagcatcagatttaaaaaccactgtgtgaatagccaccctttttggcttgtcatagtggtggtggtggtggatgacattttactgatgtgccaggcactgaactttgttataagcatttctctttcatctttgcaataactgctgtcacctccatttacagatgaagaaattgaatttaaagccttttcaatgttgataaccctttgtactggtcccacccaaaataccaatctaagtaaaatggagtatggtattctttttgagaaaattgttgatatcattcttccatttttctgcttgatctactgatcttcatagtggtggaagcctctaatgaccaggtagttgtatgatcatgagactctgatatgagtcgtgttcacttacgtctgaaggattcttcctgtttactaaatgaaacgctcatgttatatcattgtctctctcccactcccactgggaagcatgcacacacgtgcgtgcggatgtgcagagagcacagcttactttttattcttgaattttatgctcaacatgacgtatgtgccaagcatctagagattatataacttcagcaagaacttaggtgcttgttaactgagcacacacgtatgactgcagacgtcgatctcagagagtgcatgttgtatttttattcaaaccagactaaaatatggataataggaaataggatagtttcattcgctttaaaagattaaaatgtcagttttctggagttataaaaccataaaatatacaaggccactaatttttttcctttttctagtatatagtctttatttattgcaaaagatttctttgaaagttgatgctttttttcctgtagatttagtgtttatgttataaattgttacaattcaagtgtctggtgacactggaatcctagtcaggcttaagcttttgtgatactgcattttcagataaatatagctgtgtccttttgatgtctgcttgaaagcagcaggtattttttaagtagctaacatgattatacatggccacatgtatgtttagctactgagaaaaaaagaagaatcttgcaaggaaagacataggaatatgggactcttggcccaaagaaagactcaaggaaaagttcagaaagtccagctgactgacttcttgtctatactcatagttagggttgggaaactgcaaaaggacagagccgagaaatggcctgcagtctcgctgcctggatttgcagcaatgtcgtgcctcagattttattatatttggttttcttagcacagatgcagcagtaagtagcaacgccactccttctcagtcttcatcgatcaatgacatttcatccatgtccactgagcagacgctggcctcagacacagacagcagtcttgatgcctcgacgggaccccttgaaggctgtcgatgataggttagaaatagcaaacctgtcagcattgaaggaactctcacctccgtgggcctgaaatgcttgggagttgatggaaccaaatagaaaaactccatgttctgcatgtaagaaacacaatgccttgccctactcagacctgataggattgcctgcttagatgataaaatgaggcagaatatgtctgaagaaaaaaagtgcaagccacacttctagagattttgttcaagatcatttcaggtgagcagttagagtaggtgaatttgtttcaaattgtactagtgacagtttctcatcatctgtaactgttgagatgtatgtgcatgtgaccacaaatgcttgcttggacttgcccatctagcactttggaaatcagtatttaaatgccaaataatcttccaggtagtgctgcttctgaagttatctcttaatcctcttaagtaatttggtgtctgtccagaaaaagtcgatttatgtgtattaattggccatcatgatgttatcatatcttattcccttttatgctatgatttattctatcttttgtatttcagaagacatataattaaatctatttaataaataaaagtatatagcttttcttagattcgtgatgtttggggctgagaattatcacggctaaaaccaagacacttatgtggacatcttattttctttaaactgttgtctgggatgattgtacattcagctttactgcacgatacaattttaagttttgcttagtgctgcttgaaatcctagctactttatctcttttcttcttggtcttctagacttcttatgaatttaaaatgctacctagaacttcaccttctttattaggtgcgtaacactccatcttaattaaatatgatggcagataggttcctgcatccatggcctaacgttggagtagaattttacaaaatgctcactagagatcactgcagtcatttcctaagtgcttcctttgccagagactggcctgggtcctttacttaccttccctcgttcactttccctcggccaataccacgtgcttgattttctttcttcactggaagaaagcagataaactcctctttggtctgttttcagaggccaggctgattcagatgcctgttgctattgttgctctccattgttgggaggcattccttttcacaagaatgttctgggaaactcttcagaggacgtgaaggaaataccctgaagagtcatgattaactattgactattctctgatttaaaactgctcacctgaaattgatacttttagactttacgatcagtaaagtattcagaattcgtgaagatgctgagtgtgttaagtgtcactgcaggagcggagctgtggggatcacgttttgcctgcctgtgcccatgtctcttcccttgagcttattctgttgctgattcatatcttgtgttcaattttcttggaagcttttcagtcgacattctgtagagtgtgttctgaggaggaactgtgataagaaagtttattataaatattatctaaaatatatggctctctctgcaccagttatatcttattggttggtcatatcactggaaactggaacccttgattagcaaaattaatattgaaataagaaatagttattttatattgtgtcatttggacactttcaagtacaaaatggtaataataacttggattgaggcggaaacacctattttatggctatctatctaaacatcttaaaatggccttctctgtgatacactttcttttaaaagacttcactaaatctatctttaaaaggaaaaacaaaagggagaggttgaaaatgcgcaagctgccctgcactgtgtgatgctccctccccgggagacgtggacgggggacgaggcacccgcagacgcccttctgctcactcgctcctctgtgcattcagcgagccacttgccacagatggagcccgtgacggtgtggagggtttcctggaaaggccatcttccaccaggtagaggcgagcgtgcctaggacaggccacagggctccacagaaatacctcaccccagcttcagggttctctctcctgagcctagatttgccagggtcttggtgccacgcaaatggtttcaaactgatctctatggataaatgctgatgttggttaaagaactgaaaaatgtgctcaactgtctcatcttttctattttatttttgtaatttatattgtacacaacccaggaagtaactattttggacatgtatttttataaaccaggtaatttactattatcctggaatttagactaggtctgtttcatttgttgacttagtttccagccaagaaggaaacgactgtctcccccatgtccaggtctcagtttcaagggcagagtccagagagcagacagagttgtgtgcgagcaggagagcagtctggaaaccctggctgtgcacaccgtgtcagccgtgggcctggagatgggagcaggtgagacccagagccccagtactgagaggaggaagccctcttacggggccccttgcccaccccaaggccgtgtccgaaacacggagcgggtgctgcttcaacccgcatttaacgctgtgtaagtcgcgataaccacgtccgagtctgtctggttgatttctaatgtgactcctctggtatttcctcctggtaataaatacaagtgtgacctttcagattgcatatctcaaaagtaacattgctaatgttttataataaaatatattatgtgtgttttggttggtgaaaataatacagactacattttaaaagataaa

SEQ ID NO: 40 - DNA, 39671 bp, Mus musculus
ctgagcgccgcggcggcggcggcggcggtggcagcagcggagcagaagggaaccggaccggaagggtcgcagcgccccgcgcccctcacacccactgcgacggcgacggggcggagcagagcggggcggggcgaccgggtccaggtcgtggagctgggtgccgccagaacgcatcgccgccagcgtgccctccctctgcctccggcgcggcggcgcggagccgaggtgagccgggcgggcggctaggcctggcggggctgctcgggccacgcagggcctggggtgcggggctcagggggtggactgctcggtactgcccggctatccacggttccgcggtcgttctctcccgcctggtgtgtgcagccccagggctgcaggccggctgtctggccgggccccagcagacctgcccgcagggatctgtgggcgcctttcctccagctgtgaggcacgtcgctgcaccccgctgcatgccctggagcctgagctctggtccccgcgaccttggcggtgactgcgaccctcactggccctctgctttcccctcgggagtaatggtagaatgtctagggtttggtcggggttgttaacgggcagtgtaactgtctcaaagcgttagggcagagaagcctaaggcgcacatttgagagcatctgagtgggtaaataaatgctcccttgctgatgtgagtgtcgtaggaactccccctcatccgcttagagtcctcccccacttctgccccccctcccgagccttgtcattcatcttcagtgcccagcaaagccagagtgggccctgcccacctcctccgccactccttcccctcttaacagaagcagatctctgctctcctatcctaagctcacctgccttgggcatgccaaaatcatttatttacctcaggacctttgcacttcgatttctctatgttcagagttgtctataagatttttacccagctgtcttctctcacatcgcttcctcctgtggttcagtgtcttgttataggcgaggcctacctagcttgaccacccttttccctcgcttagtcattctcgctcatcagtttctttaattttccatccagtacctactctggattgatgctatctgatttattgccccgtcctttttgtatagcatggtgagtacaggtagttgtttcatctgtaaagtcagatcagtgaatgaacagtaagaccatccctgcctattattatctctgctttgtccattttgttggtgactttaacttgtgaaacttgtaagcaaacagacgctgattctcactttgtgaaatattttcatgtttttaatctctttctagtagctgtcagaacaatttgtgataaaaaaaatacgttttggtaagagttttgctctggcttccttccacacattcaggagttatctactggattctgtattatctaggtcatgctttctgctgggctctggggacacaaaggagatagcaacagggtaccgtcccccagagagtccaggagccccatagagcagactggcatgcacacagttctaggacaggatatgacaccagctatagtgaagggtctgtgccctagaaatggagggtgtggggtgggggtgctggagggccttgagcagggacagacagaaagtgaaagggcaagatcaacaaggaactctgctcagtctggagccaagaatcagccctccagggcaagtgtggggctttatggggtgctggagaccccagagctccagaacttggttcagcaatttttgtaaaagccaggattccaagtttgtatctggactctgatatgtcagtgttggcaatagctaattaaaactagctatttggtgccaagccaaaatgcggacctcatgcagcactgctaacctcctgagcaggcagtgtgggagggagaagcatggaggagcaggaactgtagcctgaggccagaggagctaggccctgttccccagataccagccaggcactcatttgagtgtggctggcacactgggttccacagaggaagaaacggaggctcagtgcttcagcagtttgcttcagcgcaggcagccagtgagaactcgaacccagattgccctcaatctaaggttctcagctctatttgtgtttggttttcgatttgttctggaagaacaatagccaatctataaatgtttctctcctccctttcagaagagtcctgcatagttaaaaataattgtcgtttttggggcataatctctggagagctttggttttcctgaggttttaatttgcagggtctcgggactttataattacttgttaacggatactttgctgtgtcctttatgaatggtcaaaggtatacttggatttgtcagtttcaaatggaaaaataagtcttaaccttctgtacaaatcaaaatgccaaacaaagtaattattaatgagttactaatttttaaaagcttataagataaaacaaaaatctgatcttaaaagaaaactataaacttgtcagtaggctgctatatttgtctacatacaaagttatctttcacacctggctaagaaggtggcaattttattaaaaaataattattaatggtttatacttgacctctgtgtgaattgatttcaatagcagtctgttagttgtttatgatggggactttcaaatttgttaaaaaaaaataaacagcctagtatcagtgtctacaggtttcaactctgacagtcttgttccatccctgaccttagatccttgacatcccattgttctgtccatgaactttttagtctatgtccctaaaagacagggcctctcttaaacttttaaaagcagtaattctttcatagcatcaagtaaccagtcaaaactcaaattcctaggtgtcttgtgtatcttacagtttctgtaatcacttgaaagtagagtcaagtttttgttgtgattattggtcttttcagttctctgtttgtttttatgttttattttatggtgtttgttttgtgggttgtttgtttgtttttttttctttcagatatgacttcatactcattatgagtgaatggcccaggctggcctcaaatccatggcaatcctcctgtttcagcttcccatgtgctagaattatagtcaaaaggcaccacactcagctagatgtcttcagtgtgttgcttttcctgcttctcttctgttttccttgtagttcacttgtagaagcagctggtggttctggagtgtctccatggttgggttttacagatgccatctctgcagtatgatatagagtttctgtctcctgagacatacgaggtgaatctaggtgacacccactgagattgagggtggactcaagccatggtgccttctcagctgagccggactcacagctagaggcgtcctgaagttctgtgctcatcaatgtcttacagatgagggtagctgcttggcactggataagtaactgttccacaaggaacctggcttgagacctgaccttaaccttccatactgccttcccacacttatccttttactaagctttgctttaaactgacaatgcctgggctgaacaatgggccagggttcagaaattagccaggtacagcctctaccactgaggagcttggagcagagctttctacacagaatggaaggagagcttggtgctgtttaaagggataggccgagtaaggaaccttgcatgaaaagtaggtccttgaagagtagaagggacagggacatcagctaaggcagatggagccgctgagcagaagtctgcaggtgtgtctggtatccaagagcgggccagagggcttgctgtctgcccttgtgctaaggacggctcatcaagctctcagagtcactgatgaaagcattcagacaggaaaagggtggaatcgctgtgtattttcaccagatctccttttaaaatttcttattgtggaacagttacagatcttcaagaagctgcgaaatcccgtctattttttacccagttttctccatcgattgtatatttatataactccagtacagaatcataacaggaagttaggcattgctacagtatgtgtacaattcagtatcgttttctcatgtgcagattcctgaaccaccattgccaccacaggatacggaaacctattaccatccccacggtctcccctactgcccctttgtagctgcctaactcaccagcttccactaagcatattccctggctatgcagtggcaaataggattccatgcttctgcctaacaatcccttagaacagttgctcttactacatcttctacctatggttagttgaatttaaagacttgagaatccatgaatatggagagctaccaaatcagtgctgcggcttttttcagtgctgactaatattccacagtctaggtatgtagccatggatatttgtgctatttctagttttgatctgtcacagaactgttctgagcatctgtggctggtccttatgtgggcagatagctctcagctaaggggcttggtacctgaaaacagggctagcagggaaaaatttgccaggcattaagtgttgagggtgagcaccatgttttgcatcgagtacatactgtaataaatgaacagaacttcagaaaggaggccctgcaaggctgctccaaggctcttaaatatcaaatggatacgtttgcctaactacaacgcagcatcaagtcaggaaattggatagtgatgttgatagtgatagtggtagagcgtttgcctagcatgtgagagtccttcagctcagtccccagcatggggcagttaaattgccataagctagggtttttttcccgtgagaattaacataggctaatgagaactttatgagaaaaatgtcaggagcatgttttgtaacagggcgactaagacgcttttagacatagcaacagtccgtttaaattgtgcatctgaaatgtcagtgtgattaaagggttaattgagtgtgaatcactcagtcttcctcagagaaaaagtgtgcaggtgagggacgcctgtgttgctctggtgtggtggtgaccagccctcagacaatgctttgtgtcccacactattcagagatgtgggactggtgtgttaggaggaaggaggatgctgtggtgagacacacctcaactcagtgctgggccgcactgggaatttgggcaacaccttactccccgaaacctcagcttcttcctttttgttggatgatagtgcacccctcataggttacttgagggaatctgaaatgtgtctcccagaacctgagctgttctcctctctccagtcatctgtctcaacccaccctccctgccggtgtcacaaggccattttataacatttcgttttaattgaatttttttgtttagttttttaatgtaaatatatgaggtttaaaacagaacagaaagttttaatgggaagaaggaatgtttctcacgtcccatttttctgttcttgctggtgtgtagtctggagtgtgtgtgtgcacatgtatgctcacctttgtaggtgttgtgcgtgtatactccttgaacacagattgacatttattatgtgaattttattcaagttactttatttcctttttgtatcttagatagctttccacgccagtacgcacagaccctgtattgtgtttaatggcttcattgtactttatgttttgagttgtttacagtcttgctggttagctattttccattcttgtacagatattttttaatattacacacatatccgcactccatatatttctgggcctgtaatttctgggttaagattcacatgcatgtacactattagctattacttgtatgattggccaccttacagttctcaccaggattcacacgtgtctttgtcggtcgtgtgaacaaacatgaggacaggccttgcctctgtgaagccttcccttatgacagtctctgggcactgttctactcccttctgtgctcccttgacctgctctggagtgaacccagggtctcatgccaggcaagcactctaccaccaagtttcctgcccaacttgtatctccctactttttgagaagaagctcatggcctagggaaaagagagacctataaacacctttatagccccagctgagtgtgctgccaagactgtagaagtggcttggatggagccctgtgttggaccgtgacagtgacagcagtgtggctaatgcagttgcttgaggggtgcttgtacttccagcttacaaaacaagccggtccttctacctaaaatgacattccaactgaataaatccattagtagctaacttacatgttttctcaggttgtcttgtgtgtgggggaagggcggggggggggggctctttatcttgttctcctcagcccatgtgtaacaagaggagtgtttaggggcttcttagttgactttcttcttgcctaacaagataactttattttcattttagaatgattttaaatcttgagatgaaattatataattcttgagcctagtctatcagctctaatccccaagttcaaggcagctagcctggtattgtactagtccagctatggaatgtgagcagccatagcaaagagctatgggaatgaaggccaggtctggccactttcacgaaacaggcccatctgtaggttacacagctcataccagtgtctctaatactggtaaaaggcttgtgtctctggcatatggctctcaatctgtggtttatcacttgaacctgaatccatacacttagaggactattccacttatctctagaagttctagaatcaatcattccaaaacaatgcccccatctgtggccgagacttctagacataagctgatggcacaagaaggaagtggatgcgatgcattagtgacatagtagtctcgctgtggctgggaagaacgtgtggattcttttctccagaggtggctctttccccacccccaaccccattcctgtttttaatatgaactcactgtcttgtgcatgctagcactcggctactgagctgtgtcgcagccccaagatattttattataatccagtcctttaaaagatgtggcctttgtgcatctcaaaaatcccttcctttcagggctagagaggttgagagcactgactgctgtcccagaggacccaagttccattcccagctcacagctgttcaggcacacacacaagcattcagacaaagcacccaggtgcataaattaaataaatgttagaaaatacttgttttaattctttcttttcattgtttcatgatcttacactactgaaatgtctttttggagtggagggggttatatgccccttgcttaaatggagagcgtggccaagctgatttacccattttgaccatgccatctgaagtcccagcagatcagaaccactgtgtatacaatctgtatgtgtatgcatacaagctcatcagctcactctgcttctctctctcctcaggggtctgacgaaggcagcagccctcaggatcctgtatgacactacatcatgagtgacagtaaaagcgatggtcagttttacagtgtgcaggtggcggactcaactttcactgttctaaaacgttaccagcaactgaaaccgatcggctctggagcccaaggaattgtttggtaagtctgggctgttctaatagcacagacgaagcctttagtaaaaagtgaaactactgagtaagactttagtagcactgattaaaaaaataatctctcttgtagaatttgagctaaactaaatcagtccttgctgtagttatatacagtcatgtgtaggatacaaactcaatttttcatttgctctgttgttggctttattgatttatttgtttgttatcttttcatttgccttgccattatgatatcagaatgattggtgtaaccggaatttggcgttttattcatttcttcatcatggccaccttctcccccctcctccttttattcccaatcactcctgttcatttccaggcgccatcattgcagtgccttgccattcaatggcaggatgaggccaggcagtgtcattatcacaccatggattaaccaggaagggatgctgtgtgaggggttgggctggccgtctcttctttggtgtctctcttcaactatgtgtccagcccaggacgtcagaaccattagtctgaccctgaaccttaggctcttgcatggtaagacagtcagctgctgcgacatcactggccagacaaaggtaacgtttctcacgtgttttctagacctctgttgtcagcacctcccaaactttttagtctgtagtgttctgaacaaagctttttttcccccctgctaatcaacaagattattttttgtctttaaaagaaattgcgattgctggtgattgccgggtgtggtggttcatgcctttaatccccatacttgggaggcaaaggcaggtgatctctttgagttcaaggccaacctggactacaaagtgcatccaggacagctagagctacacagaaaaaccctctctcaaaaacccagaatatataaataaaatactgtgataagataaaaacatttcatgtttataactggtaggccaagagaattgaaaatgaaagaactctcccaggcattctgggaggagagctttggtttcctgtgacgacactgagcctagcgtcatcagtgggttcagctgagactccgctgcagactgatcagggagacctgcctgctcttttcctcagtgagggcagccggggccctggtgctcgggattgcagattaggaggctcagaggagagactgaggaaggagaaggcgctacatgaaagagtgtgtgcacagtgggggcttaacagtgaaaatgtgctttagtgcagatagaatgtcctttctctcaactgctcaggagcagagtatttctgagtttagacttttctcacatttttcagtatttgtgtttactgataggcatctgtaattccaaaatctgaaatctgaaattctccaaaatctagcaccatgatagaaaattatagaaagaatattatatatttgcttgattgtaacctttcttatttggaattaataatttgataagaggattgccgaaggggaacaggaattactttgggggcgtttactttagtgaagtgaatagtgtatattatataaccatgccatcctccgtgaccctctctgtatatgtaatgcagttgaggacaaggaaggctcattgacttttgtctcccatgggttcagggggtaggtctaggtctaaagcagttgttggtgtcttgggactttaattcacttagttaaagcttgatgactttgaatcactgatattttttatatgaccagggctctgacccaatctctgttcaggatcttcataatgatgaataaatcaatattaataaaattccttagaatctctcaataaattatattcatctccataggacactgattacattcaagaactgtgtagggctagagaggaagctcaatggtagagcacttgtctagcatgtgaaagtacctgagtttcttgccagcaccaaacagaaacatgtatacatatgtatgttatatgtatttaaatatacatacatgaatttgtgcacatgtatatatattcatgtgtacatacttatatatatatttatatatatacttgaatacatatgcagacatatacagatatacccatacatacctacatatacatacatatgtacacacatgcttccatacacatatatatatatatatatatatatatacatatatgtgtgtatgtatgtgtatacatatatatgtatatatactcactttaattttataactgtagctgagagttttatagtacccacccaccttaagttctaacataggaaagtaaaacttcagaagtgattgtacctctcccctccccctttctacttttgtatttatcctttggtatcagataggataggagggtgatctggtaatggcacattcctataaaacaaaccaaaaaagtttacttttgctaaaataaactcaacagtgggtgagctgctactttgacaataggctctgaccaggtggtggtggcgcacgcctttaatcccagcacttgggaggcagaggcaggcagatctctgagttcaaggccaagctgatctacagagtgagttttttctcgctctgtagtataggacagccagggctacacagagaaaccctgtctcgaaaaaacaaaaaacaataggctctggattttctgtcttagatggttaagatccagtcttttttctgttgatggtccagagctgctttttgtcagcgtcatactaccagtgaacctttagggtgtgtgatgggcagaatactgtttcctcagatagagccacattctaaccctggaatcctatgaatatgtgaccttacaaggcaaaatgaattttgcagacctgattatatcttaatatccaagcagaaggattactgtaagcagcaggccaaactgggttacatagtgagttcatggccacctttgatggaatgccatctaaaatccaaagcaacaaatcaatgacctggaggtgggaggattgccctggtgggccgactgtggagtgctgtggggcagggatgcaggaagcttctagaagttgggaaaaggaaggaaatggattcttcccagagccttcatgagggtcacagctgagttgaccttactgttagccccttaggactcgttttggacttctgaactccagaagatagataataaatgtatgttattttaaatcagtaacgcgtggccattcagtagccacaagaacagcactagaagttaatgtagaggcaagtgtgtttctacagctctgagaagtaaaatgtgttagcaccagtcagtggtttccaaactagtcagttccattaaattagaccatggtagacacataaggccagctgtgcacaggaaccacagtgtaggttggttctggtcctgatggtctacagacttacatgtaaagagctggggccaagataaaatattctgaccctagttttatttttgcttttgtttgtactgttaggcgtcactcggggcttcgggtgtgctctgcaagcctccttgctgagaggctcccaggccctccctcccttcatgttccaaattgcctttacagttttggacctatttgatttgtttctgtttttgttccttagaagatggtactaaagcttattaggaaataggttttttaatgttaccgttttagagtataaatgccaactaaattatatttactgtttactcagatgtagtgtctgcttttcctctctccttctaaaaccccgaggtgttcagcccaaaatgtaaacctgtggttccgtgacatgcttaccccttttctttaagtttttaatattgggtttggcagttcctaggagtaacagttactgtaaggtaaggagtaccctaatttaaaatattagtataggtagatcgaacgggcttgccttttagctttctgtaagcatgaacattggtctggctgtacattttcttattttcctctataaatataaacaaaccataaataatgtccagaataaaatgtctttgaggctgttgatgtgaatgtctgtgagataggagacttgagttctgagcccagtacagatctttgacccaagttctttgtgaccttgggcagcccactgtgtcttaatgagtgtttacattttcacctctaaaataatggcttgaaacttttgattcaaggtgataaatcaaagagctaaacaaaagagaattacaatcaccagtgaatgaaaaagttctaataaatttctgcaacattaaaataagttggggtcttggtccagataacactgcagaggaagagagtgagcagaggggttgtgtgaaacaggaaagggccttgaaccacagagctctggggcatgggaaatgtagatatcacaatatagaaaatgaggatgagatgggggaggaggctaaagccaggaacattaaaacatctgtgaaacagtccagttcccaccatgtccactgtcctccatgctcagcgtttgtccttacagggctaataagatactgaagaatcaatattacaccaagcaaacctagcataggaaacccatcattgaggcttccctgtttcttggtcatttagattctgagagagactgcttgaactgtcctgtggctcgagaataggaattaggtcctggggctctctgatagggcctgggtaacctctgctttgttttggtgccactgaaaggccataccctaaaagtaatggggttaacttgagtgaggcacggcccccatccagttatcattcactccttgaacttatacagtggcgagtctaaactgttcatgccccatgtgcccagtagaagcaaatataaattctgaagaaggatagcattgccctggatttcagattacttctagagcagctttataaatgcaaggtccaacacaataaaaaaaatggctaggtgcacagggagataagacaaaaggatcagatcaacagaagattccagcatcattagatccaaaattttaaatagctgtggtgatatgttcaagatggtaaaagaccagatgaaagctttggtggaataacaagaactttaaaaaagagaactaagtggaaattagatgtgaaagtgaaagctatggtaattgaattacaaacctaaaaaacatgtttgcaaatattagttgtaactgaagagagagttagcaatgtggaaaatacatcagcagaaaataaaatactcctaatgaagccgcagagaccaaagagtaggaatacagaagagacgatgtgttaatgttttattccataatacattaccataaaattagtggtctaaaattgctcacattgattacctgatggtcattcttcatcagagaatgcaaattaaaacaatgttcttatggacatggtgaaatacattcagcccaaagggtaaaaagtaagttcatgatgcaaatgttggtgaaaacgttcacacacaactcttaggcatggattctgggcacactgctgatagacacagacactgatggaactacgtcagaagagagtctggtcttatctgctaaagtagaatcggtgcgctcccgcttagctctctgcatgcatgagaggcatgctgaaaggactgcagccatgcacatgcatgtcgatggcagtgattcttgtcattacttgaaaagtgaaaataactgagttagtgagagcagcaagtgacagtctcacaaaggaatgttatagcaatgacagtgaattctagtactcagattcgtgggtgagttataaatgcagtgttgagtgataggtcataggcaaaaataagagatagagttatgtgtaacatgttgagtttgtgagagcaagaaagtgactgtcttaaagccaaaagttaggccaatgttagtggtgcacacctttaatccaagcacttgggaagcagaaacaagagaatctctgtgagtttgaggccagcctggtctacacagtgagttccaagacagcaaggactatgtagaaagatcctgtctcaaaacaaacaaaaaacaaaaacaaaaaaaacagaagcagaagttattttctttcttgaatgacaaatggacaatgataacaattgggagggattgttaaggggacatttggaggctccaatagagcatggctctttgtgatatatcattgagcagagaaacaaaaaaacaaaagagtgactctcagatataagcctccctccccactaaacagcactgaagctgggagcagtagagcaatggccttagtgtgttctgtgaggaaattgattttcagcttaaaagacagactatcaaagccgaaggcagagtaaaatcattttgttgtctggggacattccttaaggagtactccaacaatgagacaacacaagagcttgtaatacaagaggccagatggaggataagttctgtgaagcaggctttgagatgtcttcagaaaagggctgggtcaattctaagtgtagaagtctgagtgggagaacacggtactggtggtgggctttggaaaatggctctaaggaaaaagatgtttattagaaccttgtggaaggaagtatagaaagaggtgtggtctgcttagaaacaaaggcatggagtgttcaaacacttgataaactgggaggacggagaacccattgcctccatatagcagacattctaattttgtgtgtatgattggcagcaaggattgtgtgatctttgggaagtgaagtataatttcagctctgcaactagtagtatttacgtgagcacatgtactttccggatggttgtcagtgtttatagacagctgggggaaacagcacagaggcctagctgtcagtttaaaatgaagatgctagcaagcatgactgtttaagacaaaggtttggaggaagaggaggataaagagataaagagagcaggggaaagcgtactagtcaccttatgttattggggaagagcaaggtaaagtgcattacaggaaaccctgacgtaccatcaaataaggctgtgagggtggggaggagccaagtaggtggctaaaccctcagtttcatactaggcagtgtctgtccctttgagttacgagttgttctggagctgggacaggcaggagtagaggagcttgtctccatgcgtttagaactagttcatttgagtaattttgtacatcaaaaaatgttttattgatataggtatatgtgtttattttattgccttagttaggtttctattgctgtgataagacaccagaatctaaaacatgaggagaggaagaaaggggtgccagggcaggaacctggaggcaggaactgaagcagaggccatgaggagggctgcgtactgacttgctcctcctggcttgttcagactgttttcgtataccatctagaaccacatacccagtggtagtaccacccacgtgagctgggctttccacatagtcgctaatcaagaaaaggctctgcagtctagtgagggcattcactcaattccttctagcaaaatgactccagcttatcaagttggtaaaaaactagccagtacatacatacatacatacacacacacacaaaagagaaacataaatatacatacataaatacacacagagagaacagagagaaacacatgcatatacatacacacatacatagagtgcttcaaatacatatatattataaagtagctaaattcagctaatttacatatacagttttcttacatgttttctgcagtgagaacatgtaacatctacttttttaagcaattttaaagaacacagtataagctgagtaaggcagttatacacctttaatctcaatactccagagtcagggggcaagcagataactgtgaatccaaggccaacctgatttacatagcaagtttcaggagtacatagagaaccttgactcaaagaagaaaaagaaaataaagaaaagaaaaaaattacacagtgtagtagtagtgttattaactgaagacaccgtgctgttctgtgtagcccttgaactcagtcattattcttgtttgtctaaaaattcagacagaatcttttgagatcagaaaggtgaatccaagaaacacacatacaagtgtacacatgcacacaggtttattaatgatttattttacaatagatctttataccatatattcatatgagtagtgaacttacctttgagcatgtgggctcacctatgacttgtatatatacatatccatataaatgtaataaatgcagtggttttccttagacagttccacaatggccagtctttaagttaaaaacaggtctaattacattagagttattgagcagaaagaattaacagaaagggataaagataaacaatattacaaatagaataaactcccagaagcggtgtttaaggagacgcctgggctcccaggttgtacgtagcagtcctgagcccttgttgagccatcagaagacctctgcatgacgacgcagtattgttagctggaaaccctaagacatgtcatcatgcctctcgctctccatagctagtctctgcagaaaaattaacactgacttccatgaagggatgtgagcgctggaaactggagcttcagatcttactcacactacacaaggacgcatcacttcctgcacgattttatatatagcgagtgcttacattgggagtttgtatcttggtagtttaccgtgagctgagactttggcttctgtttcctttcagagtctttggcctgggaaagcataatcagtcaaaacagatttattaaattccttccatgagctcaactatggcatttccagaatatactgacattttaatcagtgataacaaggaagttttaaatttcttgttgtgttaaatggaaaatttcgtgccttgacctgagttttgtgctttggattaaattacctggttctgaacctgctaatcttagctaactgaaaattataagtaggaagaattgctgaatccctctccagctgcagccaaaaagcatggtgcctctggggagggactagcccgtccagcccggccacttcactttctggatgtacataaagcttgattggggaagagcagaaacatttctccttgccttgttattctctttgaaagacagtacatcaaatgtatttctccattgctattttcaaaagccattttaataggctgtttattatatttcctaattatagtgctgcttttgatacagttcttgggataaatgtggctgtcaagaagttaagtcgtccttttcagaaccaaacgcacgcaaagagagcctaccgtgaactcgtcctcttaaagtgtgtcaatcataaaaacgtaagtcatggcgctcctttgtgtgctttgatgttagtggtgtgaccagaccgaagattggctgatgaggagagaaactataaaatagattacatttttttcaaaaattaaaaaatattctttattacatctagttattggggggggggatgccactgctcactgtggaggtgagaggacaagctgccaggtgagcctaatcttgataccaaccctaccccatcctaacagctaaccctaaccctgagaataaataacctgccagaatcagtccctaaccttgaccctgacccttacctaacccctaaccttagccctatcacctaaccctgaccctgaccacaattggttctctttaggagagaggttctatgtgggactctgggatctcactcaggtcagttatcagtttgtgacagtgcctttacccccttccctcttctcagcccctgaaagagatcagtctatgacatctgtctccagttttagatgagtggagactacttaagattgtactaaacagtttatgttcccctttgtctcaatacttgtgctagacctctctatatggtgacattgagtatgccactaagatcagtttattcttttgtcacattgtattcttttaatttggggggaagctggggattgaatccaagctcttatgtacacaaggcaagtactctgcctctgagccatatcctcacctccactcagtttggtttttgaattggttttagttggttcaatgtttgttttattttactcttcaattttgtcactttacaaagatatgtttattatttttaaaaattcaggtagtataagttagaaagcaaaaatccctgggccttcaaccaccagtcacaagtgtgagcatttcagtaagcatccttgcttatgtatatttacatatgtataaatgagaccaagtatgctactattcctctttttataccaagaagaatgttgataaatttcatacactttaatagacacaactgtaatatatttttaagtggctgtatatacagatatataataatttagttaacaaattgtgctgggttgtgttgttgttgttgttgttgttttttgtcaacttgacacaagctagtgtcacctggggaagggaacctcaattgtgagaatgccttcatcatactggcttataggcaagtctgtgattgatgtgggagggcccagtgctcctagactgtgtttaaaaaacaaggtgagcaagccgtaagctatgttcctccatggcctcaccttcagttcctgcctctaggttccttgcttgagtttctgccctgactttcctttctgatagattataaactataagcaaataagccctgtcttccccaggtttggctacagtgttttataacagccatggaaagcaaactaagatacacataattttgttgggtagattatttccagttttgctttttctgttagaagccatggtgtaatgaatgccctcttcatacaacttggtctacatatccaggcaggttattgctagccaaacaatcagcctagccccggttttcatacacgctgacaagctgacgtcagggcgcactgtcagctatgcttgatgggaggcttctgagggcacatcttccttcacattcaccagcactggctgatactggttttgcttttctttctgccagtctgctacatgacaaataatcttatcttaatctgtgaggttgaatttcttttcatatgtttatgggatgtgtgtgcatgtatgtgtgtacaaatctgtacatgtgtgagcatgcctgtatgtatgtgcaggtctgggtgcacatgtgaaagctggaggttgatgtcaggcgtctttatgaattactccccaccttatatactgaggcaagatgtctcagttgaacctagagcttgctaatttggctagtctagctatccagcttgccctagtgatcccgtctccatcttctgagccccgaaaatacaagtgggacaccattcccattgacatttgtgtgggagctaggagtctgaactcaagtcttcactgagccatatctcgagccccaactgtttattcattgaaaatttgcttttcatggttgcggctctacttttatcttacactgtttggtatctttttaaaatcacttgtaggtgattttacatatcaaagttattaaccctttccatttggggattttgctatatagcccaggctaaccttgaactctgaggctgtccttaaacttgcaatctcctgcctcagcctcgtaagtcctaaagttagagaaatgccacccatgcccagcttcaactgtttctccccctttcccatttgatctcatatgttgctctagtatgctgattttttatttaattttggctttgttttaatgtagttaaatatcctaggtttcctatcatgtttaaaatactttgttacaccaggaaatagaatgtttgcccatattcttctctgctttatactttagaattttagactttatccattttgtttcccaagactgaaggtggatacagtttccttcccattcttgctggttaccccttctatctgatgagtaattaccctttctcttgttcatgtgaaatgactgagggtgtgtgtttgaaacacatggtttgtaaacacagaggccacaaggagcaagcagtaagattggctgcttagccccgtaagggaatataaggctatgagacctcatattcatcaccataaagtataagctcagccttcttatttaaaaacttttcagaaagttacatatagtatttgaatttccagttagcacagtggaaactatgctagcatagcatagatacttaagatatatctcgttctacctgcatgtatactgcaggctagcagaaggcaccagatctcactatagatggttatgagcccaccatgtggttgctgggaatttagctcaggacctctggaagagcagtcagtgctcttaaccactgagccatctctccagcccccagcatagtgcttttccaaccattatttttatattttacatatatttaaattccatagtaatgatttaagttactagggtcatgtgagtgattctgttaaaagcacatcttacttccagttggtggttaagtattccaatgctgtgcactaggatgctttggtaacaaccatagtaatgagaaatattgggttctgcaatcatttttctacctttaatacatttcagtgtacaccaatttttatactcaatctgacatactaaagtataattaattttctcttttcagataattagcttgttaaatgtgttcacaccacaaaaaacgctagaagaatttcaagatgtgtaagtatcttttgcatcagattgaaaatttagaaactcagtgatttatatttagaaaacataggccatttgcaagctcgggaccctagggtgccacagtgccaaagaacaaggatgcctgcggtgttgcttttaatctaaggctgtgagcctgaggactcagagctgtagtatataaggcctagcattctgattccaaaacatgaaagtctgtttcagctctcagaggagagtctccttcattctctagatttgctcattcaggatcttgctctatgctttgtactcagtgcattcagactcacataataattactacccaaacaccctccaaaacacccctcacgtaaggctgccagcgcagtattccttggcctagtcaagttgctgacttcaattcctcgtcacagggtagatggggaaagatcacagtgaggcagtaggagaaaggcttaggggaggagcggtttgttctgcagatactgggacagagtggaattgacatggaaggtgtagccagagtaaacgagcagcagtggagcttagctggtgtgtgctgctacccagaggtctgggtggctgggtatgtgtgacaagggggtatggcttagagaagtagcatgcatataggaaaggaagccagagtgagatttcccacatagcagtgatcttacctgacatattttaaaagaacacttggttttgaggggctgagaatccactgtgagaggtaggacaaaaaggcctagttagtatggggaggcaatcactgcagttcatatgagaggttcaagtgggtaatgggaagggcttgagattagacaccaacactgtctgagggtgaggcctagcatctgccgatgctagatgtgagagagaaattgaaagccacacataaaggcttttggctgagatatggagaactatgagaggaccagacttggggtgctaagtagctagactcacaagtagttttagacatgaattcagagacactattgactgtccaagtggaacagtgaagtgggtagagaggaaagaacctggtgttcaggaggggcctggattaaaggaatggaagaataatctataaatggtccttcaaggcacagcaacctggatagcaccaagacaggaacagtgagaggagagccaggatctgactccagccgctccaacaaaaggaagcaattaggcacagaaagcagccaagttcttagcactggcctttgggtctctgcagatgtggaagtcatcagtttgggcagacactaggcatatgctgagtcagaatgtcatgacaagcagtggaggggagttagagatgatgtgtctaagcacctctgtgggcttggggtggggctattatgctgctggtggaccgtgagcttgaaagttgtatggtcagccttaaaagacagatttcacctaggggatggtagcacatacctttaatcccagcactcaggaggcagaggagagggatctcagagtctgtggccagcttggtctacagagagttccaggacagccagggctacccagagaaaccctgtcctgtctgaaaaagccaaaaaaaaaaaaaaaaaacaccaaaaatcaccagaaaaaaaaaaaaggtttcattttttatagcagtccaaatacataaccaacctgttcggaaagttcagagttccatttacccgctgtataaaccctctacattagcagccctgccagaatcatgtattgttaaagagcaagaatctacagcagcatggtatagatgttgaaaggatgatctaacaaaagatagataggtggacagacagacagacacatgggttaataaaagtagaaaagtttgtacgagattgtttccatggttaaaaaaaagttctgtttataatttgaaaggcagaaaaacaatgagtaagttagttgtttgtatattctttgggtaattttacagactcctattatatatttgattcttttcaagctactttattaaaagtgcttttacttccagcatgcagtgttaataccccgtcggtactgcttcataatgattgtgagctaagactcatgaaggaatgtttaaaaatattactaatgagtgtggttggtctctttttgaatactcaggtacttggtaatggaactaatggatgctaacttatgtcaggttattcatatggaactggaccatgagagaatgtcctaccttctctaccagatgctctgtggcatcaagcatctgcattcagctggtatcattcatagagtgagtaatcacataactgtatttttaaaaggaccatttggtcgtcagtcatctagttacaaaagaacttaatgtttttatgtatgagtgtttgtgtggtgtatgtgcacatgtgtgagtgcacacttattcatgtgtgtttaaaggccacgaggtcagttttggccttatttcctgaacctggagggaggctggtggtctcctgactccgcctctccgacacccccagcactggtttccagttccatgtgtaagcaccctggcctttcacatggccgccgggggtttgagttcagttcctggtgcttgtgctcactccctgatccatccccaccctaagaacgtctttttcttctttttaaagtttggtactttgagagtccaggttaagccgtggagtcatactgtgtacaaaacactgttcagatcagcttttcccctcagccactgtaaacacagaggtagggggccaccctactgcagaacaatcttggttttctggtttagccttccagtttgtagtaactttttttttctatgtagccccagctgtcctggcactcactctgtagaccaggctggcctcaaactcagtgatcctcctgcctctgttgccaaaggcctgtgctggcttcccttcccttgtgcacccccataaccaggtttttcaaagtgtagcctttgctgccaccaagtggtcattccaagcaatagaccttctgatggtaaagttcacttttaaatagtaactaagattcctaatgaatcattctatttctaaaaattcccccagacctccaaataactgaggccactttttagttttatttaggacactgaattttccatcaacaatatgatgcttattttcttccctcatgcagaaggctttttaaaagtgtatttatttttattttatgtatggatgttttgtctgcatttatgtctgtgtaccacatgcatgaatggaggccaggaaaaggcatcagatcccttggaactagagttccagatagttgtaagccaccgtgtgagtgttgggacctgaaacaaggtcctctggaagagcggccagtgcccttaaccaccgagccatctctccaccctcgcccctcttcctgtaggcattcttattgtctcttaactgttgctttttgtgtggtgctgagatggagcctcagatgctgctcataggaggcaatgctttactactgagctatggccgtcagccttacaatacacgtttaatgaaatgtatgctttatgataacttcccagatttacaagctgtattgatttttgaggggactgttttcccttacttggagccggaggtgagggcaggagaatgcccctacttcctggaaacttcatgagactatggcgtgtacttgccttttgtggaatgtttggtcctttagcctacaagcaggtgagacagagcccaaagtagtgtatgttttgcttagcacagtgtttagaatccatgatgatctgagacaatgttgtgtgtccaccttgctccctgcctagctccctgtcttaccggttccttctggatcccttgtacactcttacctcacacactcacatctgcgactgcttgggaaaggtatgaacgttgtcattgagatgttccaaacaaccctcaggtacatcaaactggatgacaggcctctgtgagtgaggaacccaagtgagcctccgcatggcagtgtatggtcccctttaaatagggcctcacatagagaaacataccttcacttttgctgttaatgcaatttgtcacgcctgtcatggagaactcaggatgagaagggtcatcagttcaaggtcagcttgcgccatatagcaagactcttgtctccaagaaacaaaatggcttcacaataaataaaacttttaattatttgaaagttttagagtgaaacaggacaaaaggtaaagttttgtccctcgcccttaccacttttactttatataaattcacaaaattggggaaaatgaaaacctctctcagccctgcagccacttggagacgcccacagtagcaggctgccgagctccttccagctttgcacaggtgcttcagtgctcacctgcgccagtgccagccagcccgcctgcccagtgtctgtccttcacagtttcaaagtcggactcctctcaacagaaccaaatcagcaaatgggttgatttgcatttgtattcatcaaggatcacatggttgcataaatagttatgaagcctgcattccctcttctttctcctatttctgtctccttttgaagcaaactttgaatttagtttttgttatttagaatttgttattgttgtttgttttggttttggtttttgccttttttatgtggcgacagggatgaaggcagagccttgtgcatcctaggccagcactccatcactgggctgtgtcaccagcctgactttccgttctcttaatgaattactctagtgctcgtttctgtgtctcagggcagtgtgtttagagctctttgacctttttcagtttgtgacataagatactgatatattcctcgtccacaaacccagccgtcatccctgtgaccctcttcccctaccttcccactttagttacaatatggctctgtttggtcagggttgtgatttacatcctcataaacatgaaagtttctcatttggcaggcatcagctgggatgccccttgcacagacacccagagctttatttctattagcctagctggccagcagatggcagtaaagtagacagctgttcctgtcaccacactttttaggcgggtatggtctggaccaggggctgtttccccttctctagggctcattgacagatgaaggctttcactgctgagtggtttccagtgctgcgtgtgtactgcgtttgtcttctttggaagcggtgctgctgtgactgcccacgcggctgtgctgcttgtctgcatgctcaggcctgctagtagtaaggtgcctccatactcttggggtcttcatccatgcattcaactggctgcagatcaggagtatttggaaaacaaacatttcatctgtactaaaaacagacaaatttttgtgtgtgtgtaattactccctatataatagcattgctttagttattataatcatctagatatgagttagacaatcccagaggttgtgtgtaggttatatgcaaatgccatttcatgttatgtgagagacttagaggctttcaggttttgagcaaagaaaaacatggccacctgacatgtctagaggcagggtctcagaagccatgtgcctacctaccctctttcccgttcttacacacttcagtagccgctcatctcacaagcccttgttggtgtgatactgtgtagttaacatgctgtgattcatttaaatacgtgaacaatttcttttctaggatttgaagcctagcaacattgtagtaaaatcagactgtaccctcaagatccttgactttggcctggcgcgaacagcctgtaccaactttatgatgactccctatgtggtaactcgatactatcgggctccagaagtcatcctgggcatgggctacaaagagaatggtaagtacagttaggactccagactgtaagcagtgaggtagcattcccaccgtcactggcacgcccttccacaaggaccattggagacagtttgagcactgtgcctgcaggccacagataagaacagtttcttttgtcttccccaactctggctggcctgaaactgccatagaactctgccagcctctgcctcccaaatgctggaattgaaggcatgtgtcaccatgctgaacctcaatgtttgatcacagagtattgtgcactggagcccctgtgcctctctctctccgtgagcaggcccatgtcacccacagcactgagacctctgtgctctcattaccctggttgccaacactgaatggcttcactcgtttttgtaataatatgagtggaataatgtaccgtgttttctttcatgtaaagctggtattttcttagatcaaaacttcacctgttctagctgtgtcaactaaataaatgctaaacattagctattaataaattcatgtgattatttatgaagggacaacaagggagctttgctgaagtcttctgagatgagtctgagtgtgaatttttgtacatattttgtcacctgctctgagaggcacagtgcccctcagtagctgtctgtgcttagctctcccttccctgtctgaaacacaggactcagtcaggccccatgctcaactccacactagagggcagttactacagagccatgctcaagcagggccttacccagagtccagcccttactaacaggctgccacctttctgatatggccatttaaaaaatgctcattcagatgtggtgtcaggagttgacagaagttctacccaatgaatatttgctggggctgcccatgtctgggaggtggtttagaaacgagatgcgaggctctggctgttttttaatcacctgatatttggtagtggacatctggtctgtcgggtgcatcatggcagaaatggtcctccataaagtcctgttcccaggaagagactgtatccttcacagggagagacccagtacttggccctggaggctggggtggggctggggatgtgaccctgagaattttgtgtttattagaactttctgtgtctggttttttgtttgttgcttttttttttttttaagctgtaaagtattggattctttggcactaaaactacagattgctgcaaactggaggctgaaggagaggtcagcaaccattcatattgtgtgaaaagcgcacccttagctaggcactgatatttccatgtctgtgtgtccagtacactgttagaatccctttctcttcacttttgttttgttcatgacacttcataattttatcatttcattttattttcagttgatatctggtcagtgggttgcatcatgggagagctggtgaaaggttgtgtgatattccaaggtactgaccgtatccttccccagaaccttgaccctggccatgatctccatgctgggggcagcatgttgtgcctgcgcactgcatactcaggaggaactgtcgggtgcagactgtgttttctgagggtcttatttttacattggtgtcacagaccaagtggctcagttttatactttcactcaaatacctgtgacagttctgttaatctaaaccaggtatattcgctattttatcagaaatagctagatgtgtaaaattactatctttgttaaatatattctggtatttaagtagaaatactattttacaaattagtcgattctgttaattaactgggaaaggagcagtctaaacttaacaggatagcatgcatgtgtgatttaagtcatatatgatcctgttagttcctggtgtgatataagagctgaggcaggctattcagagttaagtgaaacttgtatcagaagcaatgtattatactttctcgtttgttactttgttgacattttatagacatttctaaagattccaggcagacaggtatctgtgacacactggggaaggtaaatttaaacacagaagatgactcataccctggtcagcaagtcacatcagcaggaggttttgtaaagggagccgacggcatagggcactagctctgtcccctcgtgtgttcttccattttccacattcttcacactaacatgcgtcttcatgcttccatttgtgttctaaccccttatattttcactggtctttgattttgtttttgtcatgaaagcttactgtgtcctctgtctggtagcagacccatgcttcaagagaaaccaggctcagtagtcagggtttagaatgtgtgtacttcacaaaaagtgctttaatgtttataatttcatgaagcaacttactcaaaacatgggtccctcagagtctgagcttagaatgaacgtattttactctactcatcccttcacattgtcctcataagttacaaaagatgccaagttaaacatagcattttagtttgctctaataatttatctgacttttttctataactgtaccttggatttacttgtactgttacaagtaaggaagcctttattttacaagtaaaatcaactaaagggaaagttgaggtattctgcagccagagacttagaaacgctgtgtggacttgtcatgagtggtcaaggtgatgggctatagtgtcagttaagagtactttgtaacatttatttgtttatatttttatttattaataattactttttccaaaaagtaaaaataaataaaaatgtatgtacttttgcatatactttaatgattttaaattataatttaaaatactttatatattaacatgttatgatagcagtagttgatgttttacatataaggttacttaaagtcctttacagtcaggccaggtgtggtggtgcacgcctttaatcccagcactcgggaggcagagacaggtggatttctgagttcgaggccagcctggtctacagagtgaggtccaggacagccagggctacacagagaaaccctgacttgaaaaacaaacaaacaaacaaacaaacaaacaaacaaaaagtcctttatagtcacatggaaattaacatccttttctaaaggaagttttgcttaccttttcaaagattaaatcaaaaagtttggcgatttatagaaaggctccagaaaccaagttgaggttctcaagaggtttgcctgtgatgttggtagaaaagtaagtgttgtcctcacagtggcttgtgagaaagaaaacacttgagccaggctaggagaagcctaagctcagatggtgcccacggcagctgtgcatcctagagagactcagatctctctgggctatgcttcctttttttgttttgttttttttttttttttgttgttgtgttttgttttattttgttttaaatgaaacctgtgctctacccacccagaaggcccaccatgctttctcaggtaagccccacctgcaccccatgccacctcctgtcatctatcaaaatgaccctgtagcactaagccagacatactgagttcctgcccatttctaggcacctcatccaagtgatggggtaaaaggctcactgccaagatgacttgagggtaggttttctgtgacagtaagaagtaggggacagagcagaagcttagagtcacccagaaagaaatggcaaaggctcactccaggccagtggactgatagcacagttgggcctggaggctgcgtttgctctgagggcctgcccttcaaatgactttgtggatttggagcatccaatctatgaagtgtggaattcaaaggagagatttggagtaaggaaaatgtgggaaccgttggtctggtgctaagcattgaagagatgagcaaaggctcaaggaaaaggagtcagcactcagaactgacaccgggtttagtgggcgcctcaggcaacctttgtggaaacagttgtcaagatgactaaggagggaggtctgaagagagtgtgctctggagagcacgaatgggtaaggattagagatgcaggtctcagaaagcaggggcagggaatgtaaaggaaagtgcttgctgttaacatggaagaacatcatgcttgagtgagaacagaaggttccggtagcgatcacgttggggttagaacagcaagaaagaagaatatgagacagttgtccttcagtaggtgagagggtgaggtaggtgggcttggcttttagccaggagcccagatggttcccagtggtaagtagcataagatatgggggtggggtatcatagcactgttatgattagtcttcccagtgagcgctgagcatgagggagaggtgttaaagtataggagagatacgcgtgagccaggtgtcctgttttggctaagcacctagataaaatgtgtgcatcattctgatttggcaaagcatgtggaaggagaagaggaggaggaggattttctcagaactgagtttgtgtggctgccctaggtgctttcccagtggtgtagatgcacattctgagaacgcctgatacattccaagctcttgcttatgtgattccgtagcttgcattgtctcatgtacctgtttacagcttcactgtcactttccacagtcccagtcatcctaagtatagcaggcatcctgagagcaggcaaggctggggtcagctgccccaggagtgaggaggttgctctgaggaggactgactccagcaccctgactgggtagtgcatgctggctgtgaaccccaagtcacttactctgaaaggaagaaagaacacattactagatgctgaagggatggactgctgccaagagaaacagaatggcctctgaaacatcattgtctaaggcagtttcaggagggagtgtggtctgagataggccagaacccaagcccctcccctctccatgcttcccttccttggacagcctgtctcacaggctctgctgcccagctgtgagagaggtcagattgattcatttagagagagacctgtaaatctcaggtagctttagtaggaacattgatttcagtttgcttatgtgatatttattttctgtttaatcatttatctcataggttaaatcatttgtcataattttattttgaattataataggaaaacatagattatgttgatttaatgaaccatgatcatactttttaagattcagagtataagagtttttgttaatggatttagaaatccaaaccttatttaagtcttattccaaaatgtttctgcggatcctctaggatggcctagttacttacttgttcatagatatgttagaactttcctttgcatgagaggactgtatgtattatgactatgaagcattttagttgtattttcctcaagagaatccttagatattgatcaatggaataaagttattgaacagctaggaacaccatccgcagagttcatgaagaaacttcagccaactgtaaggaattatgtggaaaacagaccaaagtaccctggaatcaagtttgaagagctctttccagattggatatttccgtcagaatctgagagagacaaaataaaaagtaaggcactcttttatctcgcacttgtttctctagctcttaactctaaagtccgtgtatgtcaagaggtgcagtaatggaaaccctgaaatagaggctctcagagtctgacattcaaaggcaccacagagggaatgctttaaaggacaaaagtcttgaccttgctaaaacattgtcactaaatacccagagcagtctagaaaccccttaggttacgcagtgagtgggaaaacacttgcctgcaagtgtgaggatttgagcttgtctccccagcatgactcaaagcacaagtgtggctgcctgtgcctgtgacccacactctggggtggagagcagtggtcctggaagcttggtgacagccagtctaggggaactgggtgcttctagttcagtgagagaccctgttataacagaaggaggggaagaacaataaggcaagacagccaacttcccctctagcctcagagtacatcttacactcaaacattcatgtgcatatatcatacacgttcacgcacacacataagacccatattgtgatgtcaccaatctgaattcaaaacaatttcaaatataaagaatacttcaataaggattctagacagaaaccattgagtgtggcccagtgggaaaggccctcactgtcctaatgtgtccttcctagaatgtggtcacctgagaaaaaacaatagctttgctgtcctccacaccggggtgagcagcaccttggtcacaaaaaccccagcttttctttgtgaacttttcattgctgagaccttgctgaggcttcttattacgttaattagcttcttgatttttttcttggctactaacctctagattaaaaacaaaagcactgtttacagctaggcaaagcagtggtccctgtgaggctatactctgggactgtgggttactcagaaggttttaaatttgttctaatgtaacacaaagaataatactcctgatacttcatgtccatactcctggcaacaccatcctaagagaggtgcttgctacctactgtactgtggcttcatagcttcaggtcatctggacactggtctgaggttacctagaacccccacctcacatgctaaaagcctggtttgtaatagtggccattggacttttaaaggttgtgagccgtgttgatcttgaaactcttaaacattttctgaagtcagcatgtctctttactgtccatacgctcacatttgattctttattgtgtggcttcctcttttccacggtagcaacataagtacatcatttgtttacatcctagcaagtcaagccagagatctgttatcaaaaatgctagtgattgatccagacaagcggatctctgtggacgaagccttgcgccacccgtatattactgtttggtatgaccccgctgaagcagaagcggtaagttctctggaaaaaacgtctgcgtagagggctcactttaaaatactgggcccactgtctttggatcttccttctgttggtccagaatggctacatgaggatagcaagttgttacttttagggccctgacttcaaaaatagaaaccttgctacctgaggcctaggttggcccctctcttggcactgctgctggggctgaagctgcagagctcaggagtgcactgtggtggatgttggccttatgtttataaagctgatgtgtaataataacttaggaagcatctgctcatgcctggcactgggccatgagctttgcttacatcttagtcagagcctcaagtcagagaacctaagcagccttcccaagtgacacattagctcacatctccccaccacatctgggcatctcaccctcttaagttttcttcacagcatcccttgtagatgtcctttagttatgagtaaaatactaacacagtgggtgttcacttcatgccagctggggagcactgttgtagcctgggtatagatgtaactgccattgtactgttgtgttacatcaaaagaatcaggtttatgagcagccaggctatggaatgttccattcgcgagctgctggcttgggcatgggtgtcctgtcaggaagaactgtgaactggaagtatattctaggaaagtaccacacctccctcagcccccacgcagttgacctcagagctgcctattgttagtaagtttgtgattccatttgggctatgtctgcagaacattttgaggtcatgtgatgtactggctagttttgtgtcaacttgacacaggctgcaggtatcacagagaaaggagcttcagttgaggaaatgcctccatgagatccaactgtaaggcattttctcaattgttgatcaagggggaaaggccccttgtgggtggtgccatctctgggctggtagtcttgggttctataagagagcaggctgagcaagccaggggaagcaagccagtaaggaacatccctccatggcctctgcatcagctcctgctttctgacctgcttgagttccagtcctgacttccttggtgatgaacaagcagtatggaattgtaagctgaataaaccctttcctccccaacttgctttttggtcatgatgtttgtgcaggaatagaaaccctgactaagacatgtgatgattgagatttattattgatgcttgcttttggttaactttctgtaactgttttttaaactgataaaatattctttcaaaataaacatctagaacatgttaactaaactaaatccataagtagactcgaaacattctaagtagcgttatcttccgagcatggcccattagttttgagctatcgacctgacatgtcgtttcagccaccacctcaaatttatgatgcccagttggaagaaagagagcatgcgattgaagagtggaaaggtaagaccggtcctttcttaggacgtcccatagtccacaagaacatgctcccatagccctatagaacatgctttttactttttattcatactagcctcttaggaaggacctagaaaccccagggtcttctcttcccgtgttcagctcagaacaactgtgacaccagcagtgttagagtagaatatatatgacatcatactttgcttcaggtgaagtgcaaggacttttcatgatttcccatcatcacatactgataacaggcctggaggtcagtaagcatatcacacttcttgatagcatgggagtttaaagcaaacccagtatacaggccacatattccttacaagattcctgtctaaacagatatgggggagcccagacatgggacatgtgattgtctgtgtatattaagacatgtagttatgttttaaaatctagtttggaggaaattgccaaaaataggcaggaaggtattactagagctttaagatgtgctacacagatcagtgaactaagttggttaacaaagaagcaaaacctggaggctttcatcatgacttggaagcagggttaagagtaactaagggccatagtcagcacaggtcaccgttggtcatagaccttccagactggccagagtgggccagtagcccactcatgcacacagtcatcatggcaatgagcatcatctgtgcttacaaaatgctgctaatgtcagctcctaataacgccatgtggcagccaaaggaagttgaggcatcccagggccaggctggtgcttgagatctggaggcagagttcggtgccggggaaatgacaagtgtcttgacttctgtttctctttgaagagctaatttacaaagaagtgatggactgggaagaaagaagcaagaatggggtaaaagaccagccttcaggttggtgattgctttaattttgttgtctaatattttctttgtctattcaatgcttataaatgtcagtgatgtgttaatgtcacttgggccaccttagtgtgacactgtcaccttctggcttgtcctaatgctggtggcagtgactttgcactcatgtcttttgaggtgccaggccctaagctgcatttgaagcattcctgttgtgaccttgcggcagctgttgtcagctctgttgagagaggaagggattgggtttgaggagttttcgaaatgtgtggctgtctctgctcagatccatccagtttagaaaaggaaggactttgtgcagacctaagaccctgtgtactttattttgctcaggccatgctaacacatgggtaggaggaggtaggatagctttatttacctttgaaattaaaataatggtttcctgactcgctagacaaaaataaaatctacaccaggcaccaaactttcctttttgggtgtatattttagaaagcatttttatcacaaaagattcatttgaatcctgatgctttttttctgtatacgaggtgagatatgtctgttgtaaatgaaatgtccatgacacttggatgctacgcagacctaaacctcttgtggtaattgtaagataaactcatccattttcttttaaggtctacttgaagtatatcttttaagtaatcaacatggtcttatgtgaccacagggtgtggggggagggtattgtagggaaagtccaagactgttttgaaactgaaccaaagaaggactcaaggaaaaatcctagaagctcaaagtatagttgagcagtcttggttctgttgatcattaggatcaggaaactgcaaggcacaaaatggagaggtagcctgaagccccatgcctggcgtgcaggatgcgtgcctcagattttattccatttggttttcttagcacagatgcagcagtaagtagcaaggctactccttctcagtcgtcatccatcaatgacatctcatccatgtccactgagcacaccctggcctcagacacagacagcagtctcgatgcctcaacaggacccctggaaggctgccggtgatatgtatgttggagacggcgcacttgtctgtgaaggaactctcacttccatggccccgagcgcgtgggagctgatggaaccaaatcgaaaaactccatgttctgcatgtaagaaacacgatgccttgccctgctcagttccagtaggattgcctgcttagactataaaatgaggcagactatgtctgaagaaaaagtacaaaccacactgttagaaattttgttcaagatcatttcaggtgagcaattagaatagctgagtttcttttccagttgtgtggtatctgtggtgacagctcatgtgtaactgtggggactcgtatgcatgtgaccacaaatgcttgcttgaacttgcccatgtagcactttgggaatcagcatttaaatgccaaataatcttgcaggtagttctgcttctagaataatctcttaatcctctttagtaatttggtgtctgtccacaaaaaaatagattatgtgtattaattggccaccgtcatatatcatatcttacccactttatggtatgatttattctatcttttgtatttcagaaggaatataattaaatttatttaataaataaaaatacagctattcttaaatttgtgatgttttaggctgagaattaccactgctctatgtagacactctgtgccctttaaactgcccactgtgggatactttatgtacagctttctgcatgacaaagttcccagttgtattccatgctgcttaagacatctgtcaccttaaatcctgcccacgaatttcctttttcttgttcctttggacatggatctagaatcctccacagaacttcaccttctttatcacaaagcaccccatctcaatagaatgaagcggcaggctcctgaacccactgcctaatgttggcatagagctgacagagtggcttccccagaatggtcattgaatggtgcctccttccctgaacccacccatcctttgctcccctctccttatttaaggtgaaaggtgatggggtctcacagccgttccctctgcagccttccctcctgacttttctttctcactgacagaagccaccccgtccagccagagcgcttggtctcctaggagactgagctcactcactgtgcctgttggctgctgtctttttccattttgtggaggcatttcctttttctaagggaattcctcagatgttctagaagcactcagaagaacacagaagaaatattctagagagtaggggttcattcttgaatattttctgatttaaaactgctcacctgaaattgatactttcagatcctgatctgtaaattactcaagatttgataagaggctgagttctctgtgttgctgcagaaatggagttgggacggtcataccgtggctacctgcgctcagagcattttctcccttgagcttattttgttaacgattcatatcttgtgttcagttactttgggagctatggagtgtgttctaggaggaaacttgatagcttttatgaaaagtaccatctaatatgtgattctgtctgcacccgttgcatcctaatggttggtctgatcattggaacctttaatggacaacattaatctgaaatctgaaataaggattagctttgtatcatatatggatactttcaggtacagagtggaaatgctagtgtgggtgggggctgagacacctgtctatggcttcaggttattgggccctgggagcctgaagtcccacagtgcatcagtcagcatcatgctgtgctcttcctgctgatgcacattctttaaatgacttcccggaaacttaaggaggaaatacagaaaggagctgtatcatctaccctacactgtaaggggagtgtgctatgatagaggctcaccctggtcccacgggcaggagacagctgtgagtggatccaggtgcccccaaagagcggctttctctctccccttactctgcatatccattgagtctgttgtggatggagtctgtgctggtgtgctcagggtcttgtgccaagaccctcttccatccaggcaagtgcacctatgaccggcctcagagccccaaagaaatacctcaccccagtttcagggtcctccctcctgagcctagatttgccagggtcctgggacaatgcgaatggttttgaactaacttctgtaggcaaatgctgatgttggatgaagaactgaaaaatgtgctcaactttttcatcttttctattttatttttgtaatttatattgtacaccctggaagtcactattttggacatgtatttttataaaccgggtaactaatgattatctggaatttgcactaggttagtttttgttgttgttggcttaattttcagccaaaagtggaatgactgccccttccaggtccgggtttccatttcaagcgcaggtctggagggcagacatgtccagccagggtaggagagcggcctcagaacacaggctgctcagtgcctcgagcattgggcctgcagacaaaaccaggctgtgctctcaactttagaacacaaagaccagacccccggtgtgagaaggagaaagccctccattggcccttgctgacagccggggcctgcatctaaagcaaaaaacccaaccctggtttcatctgggctgagtggtgtgtgagtctgtctgctgactcctctgatgtcccatgccgatagtcagtacaggtgtgacctttcagatcgcgtatctcaaaagtggctttgcctaatgttttataataaaatatgtcatgtgctttgattggtggaaaataatacaaactacattttaaaagagaaaatgtacagcatgtccaattcctgtgtgtttcaaagtgacagttgactgtatctctccacatcaccattttgattacaaacctaacacgaatagatgttgaagtgtcgtaatttcagacattcagaagggttttcaaacccaaagtaggaacgctgctgttagttctaatctctgcatctgtttccaaaacaatggcagtagattttaacttttaaaaattgtacaatgtggttggaatattggtgacgttgtattctcacgagatgtaaccaggagaacctgccaaactgtctctatgtatatgtctaaaagccgttaatggtg

SEQ ID NO: 41 - DNA, 132722 bp, Homo sapiens
gacgtgcgcgggcgtgcgcggtgacggcccgcgtctctgttactcagccgagcggccgaggccggacgacgcggcttggattgcggagccgcgagcagcgctgggtaacggccgcggcgaccaccccggacggcccctgtccccgctggcgggcttccctgtcgccgttcgctgcgctgccgggtgagtgcggcggacgccgcagggccgggacggcaggcggccccgtcgtgtttatgttattgtgccgctgccgccgccgccgccttctcctcagccgtaaccccctcctgggagtgggggcgggagcgcgcggtgggcgggggcggcgcgggaacaatagcggcgcggaggcgggggccagccgagggggcgtggggctgcgggacctgggtgcgctccgctgcccgccagcccgcctgccgccgcgagccccgcccgcctgtcctctcgcgtcctcttcgcgtgggtcctgcctccgcggcgggagaagaaaatggagcgggggggtgggtggcaagttctgaaacacttcggcaagggtcggacggaggtgtctttgcggcccgccgcgccctggctgcctccggggcggcggggagccggggagagcgcttctgccggcaggtccccaagcctgccccgcgcccatagggaccgtattttgcttctcgatgctttctttgtgctaacgttctgggcgaacgcaggcagcagcgctgaaaagggccagagtggcctgcagctctgggctgcagggcagagagcccaggcccgtggctcgggtgggaggtgtccatccagcttggcccgagcttcggtggtcagcgcgcatttctcttgagggtcatcggtggtgaccttttgactttttcaccccaccctcccatctctttgtctcgcatttgtgttcccgattcagagatggtagaaccaagtccattttaaagtaccctgatgaacactttccgtttttatttctgaaagttccctgcttggtctttactgcgaatttaataacatgttgactacatggcattgtccagtgattactatttttacctctgaaatccagcgatctttccagtagaattctggtccgtcagtccattgtgttttgagataagcatccagcaagtacctccttggcaattagaacatctgttttttcattcattcattcattcagcagctgtttagtaccgtactcagatgaagaggtttggtgtgaaggtaaagtatcctttcatggaagaggatgctttgactgaagtataatagatggacctttaaatgagacagttacataagtgatgtctgttaaggaaggtatggttatattctgggtcattttttaagcagtatatctggaagttcaagtgtaataggaagtagaattagatttggtctaaatatacaacagcttttatttatttctaaattttattttttccagtcttgcagccttacagtcatttgtaatggttacctcagattcccctgctgtggttaacgttaaacctaggaggtcagatgctctaagtgaacatgtttagtgctgtgcctgacaaaagcaagcaatcaaaatgggacttccttgagggcaggcctgtcttgcatctgtttctccaccacctagcctggaatatagtaagtgttcaataaaagtcggattgatgaaaagctctttgtaattgataatatttaaaatcaagccttaaaaaaaaccgtaatgttctccataaagttttggaagcttcatgcaactgtcgcatcagatggctaaatggtcagttcatgtacattatctgttatgatgacatgggcttttgaatcacgtgtaggtcattcactgtcctaaaataaaatcttgtctaaatatttttttaatatgataaataaagtaggttgtggagtgtgtgtttctgtgtatgtgctagtttatgtgtgtccgtgtgtgtgcatgtacgtaatccacacacaggcactcataaactggtatttcagtaggggtctaaaatgattgcatttataattttgtgaatattatttgaaagttttttggtgactcttattgtggaaaattgaggacaaaaccacataaatgttttattagaaatatttctaatattttagaaatgtttacttgaaatgtttggttttaagttctaacttgtattaacacaattggtacaaaatatgagcctaaaactcaaaataattgatttatcgaagttaaagctcttttccacttactaaatacagtttagcgtttgttttgtatttgaaagaatatgaaatgagttaactaatgagtttcttattatttgctgtaaagtggaaatgaagaaataagaaaataatacttttttaagatgatggttgaaaatctttgagataccaaagttttattgctttacctagttagggtatgtcagattctagtaggggttactgacaatcctttggcagtagctcacaggctgtgtaaagaaccagagttgtgttactttgttttccaaattgttggtttttaaaaatagctttattgcaatttaattgacataaaattcaccagttagagtgtatatatttcggtttttagtattttcacagtgttgtgccttgatcaccatcactaattccagaacattgtcatcaccccaagaagaaacaccatatccattagcagtcactctgaatttcacttcaaattatcctttaaagtaagagatatagcatcgattctgttagtaaatatattcctttagtaagtatgaaaagggctccttttaaatgtcctgtcctggcagaataggaaactatatccttcatactcctttagatcctgggggaaatgccatttggaaaggaagtcagtgcaagaataaattgtatacaaattaatgtggttataatcttaactatttgctccatgcctgatattatcaaagtgaccttgtgaggatgagatgttcagtgaaacaacttgaaggaatttgttgttaaatgactagtccccaactatcctagtgctaagaggttgttgaataggagcctgcttcttgttggtctgctttgccagcgggttgaattttgacatatttcagtcatctacatggttgagatgctttgttgcacgagtggaaatacaaaataatgtctgacattaggattccagtgctctagaggtctctggtcaagtcaatggtatgggtagtagcttttctgattcatgtggtccaaggaagtcattataaccacatagctttatatatgaatcatttgcctatgtcagtgaactgtgatgctgattgtcttaatcatgagctctttacctgaacatttagaagccttgcattcttactcttaatgcaggttaagttgaactttgatttcagaagtgagttgactgaaaggtaacaggagtattgaaatgagttatcctgtcattcaggtcaataggtggagctagagcaatccaggaatcagacctaggttcatttctcagttctgccatctggactttgtcatcaaattctggagctttaggcaagtgccttaatgtttttggctttaaaagtataaactgaggctgtcagaacttttttttatagaaggcttgttcctcagataggtggttcttgagaaaacatactaggacaaaaagagcccttcttgggtgataatcagaagcctaagttaagaacagtagtcaaagttaggattttgtaattttgtaattttcagaagccaaaaaaattgttgagttgaattttttctttaatatccagacttagaaaacaaatggaaggcttcaccataagctagagattcttggaaaggtaggcttttatttattccacagcatcatgccttctaatgagaccgtatgctcccagagactttgtggaagacataaaatgagttcattatcctcaggaagcttataatcaaggattagactgaaggcatcgctaaacagttaatttatgctcttttaaaaggtatatgaaagggttcccgccaaacaaaagcccacttcacatctctgtgcaggccaaatttcactgaaatccagtttttaaaattgtgtgtgtgtgtgtgtgtgtgtgtatgtgtgtatacgtatgtgcatggagagagacagagaggagacccctttttggaaaacttagtagcttccattctttttcttggaggtgggttatatcacaaatacaagagatacctgtgtttcctgttaccctttattatatttcagatttagttaaaatctgccattctttagaaagtcaaggaactcaaaccttacaatgattgctagcgtgggttttaaggtcagccctgagttctaatcgtgctccaatctaactgtggtataggctagttcaggttatataacatatttgggcctgttttattatctgtcaaatgagaataataatagcacgtaacctcatagggctgtgaggtttaaattaggtactgcatgtaaagtgcctggcactgttgtggtggctggaatgctagatacaagtattcaggtagtttttgctattgttatcacttatatttaactttgaacaaacataaaatgccaagtaaacgtcaaaccagtttaatgcacagtgtccattctaattctccagaatatgccatttgtttcactctgcatctctggggggtttatttaaaattcgatcatctcatgtaatctgaattgactgagatgatttatattaacatttggaccagtaatcctctctatcttaaaatttggaaatgttccagaagcaaatattgaagggaacatatttgccactttcacgattttttgccttttcccacaggagaaaattgcctaagctttcctaggtttgttatagacatctaaaggaatgagaatttaggagctacgaatagctttatcatgtgacacatttgaagaaaatggaatgctgtcacatcttttaaatttagtgttattgggatcttcgattctgtgaagattgcagatttgtcagagacctggtaaccacaacaattcattgaggcctggaggcctcttaaaaaatgagggagattatttattagtaccacttagaaatattatcttttctgtattttctgtggttttctaagtcttctgtttagcgtttctatgattataatggtggattaaatttcttgttccttctcaagagcatctactatgagatgacactggtttttacttcggcagtatttactgagcattgcactatactaatccaggtattcggtgatgtaggaaccaaaggaaatagaagtcagtttctaccctcagtgagctgagtataatttgatagaagataaggattaacgtaagcacatttatgtcctaacacaaggaagcaaatattgttagtcatttcattaggaatttcttttgtcattggggcatttggggccttccaaaccttacatctcttgccatgcctttgtactcactcgataaacctgagaaagcaagatatcttcttttctgattcctggtttaagttgagagtgtggtgcacattagtcaaaatccaaatcataagaaaaggcaaaccttatgaattcattttggaatacaacagggtatcaaaataagtatatgagaaatatgaaaagctgacagtagaaaagatgctactcaggtactaaccagagttctcaatctcctctgtattgaagctcttatgatgtaaggctggatctgtactagaaacactttttaaagtctctctccagtattgagaagtatagtcctccagtactgcctcttggtgctgagagactcaagcctgccacccaccatatttctggggaaactagaaacgaaaaatagccacacacaagcacttgctttgcttggcaggaaacatcaaaaccataagatgttatttcctaaaagtcattaattgggtagaaaaatcaccattttctgacttgttccaggaaggatggctttctgattttcagatgccattgggtcaaccaaaggtaagataaagaaaagctactgctgtgtggatttttctgtgacttgagaaagcgtcacttttcagttaaacaaaaaccaaagcatctagctttggctgttactattgagaatttaaaagtcttaatgttttaatttgtttacattttatattttgactaagtagtaatgaattcactttgactcaaaattccaaagatttaaaaagataaagaatctccttttctactctgtgtagccacctagttcttctgcctggaaactgttaaaattcctgtgaatacttccaaagatagtttatatatgtttaagtatataatcctttgttcaaaatccttggtccagatgtattttagaatgaaggctttttttgcagttgtggaaagataatgtagcacatctaccgtgttatccaaaatccctagtaagaggttgtagcctcatgattaaacacattaacatttctgtaaaaaatacagacataggccaggcgcggtggctcacgcctgtaatctgagcactttgggaggccgaggcgggcggatcacctgaggtcaggagtttgagaccagcttggccaacatagtgataccccgtctatactaaaaatacaaaaattagctgggcgtggtagcgtacgcctgtaatcccagctacttgggaggttgaggcaggagaatctcttgaatctaggaggcggaggttgcagtgagctgagatcgtgccactacactccagcctgggcggcagaggtgtagactctgtctcaaaaaacaacaacaacaacaacacccagaaataatcaaagacattaatatttttataaaagcataacaaatacaagtagggtgaataaagattataaaatcttatgctacgtctcgtcaggttttaccaccaaatacgtttgtactaaacttattttaaaaacgtatttttcacagctttatggattttggctttgccaatgaaggataggtgtcatacatatatacagtactgtatagcctctgctctgctccctccctttttatttaatgtaagttgttgcatgcaatatgtatcaccttttgcttttttgttttttgcttgttggtttgttttttgagacggagtctcactcttgttgcccaggctggagtgcagtggcacaatctcagctcactgccacctctgcctccgaggttcaggtgattctcctgcctcagcctcctgagtagctgggattacaggtgatccacctgccttggcctccaaagtgctgggattacgggtgtgagccaccgcacgtggcctgctttttgttttaatatagctgagagattattttatatcagtcatatcagtatgtaaatggcatgcttttttaacatctttgtggtattccatttgtcttactctgtttgggctgctatatcaaaataccataacttgagtggtttaaacaacagaaatttatttctcacagttctggaggtcgggaagttcaagattaggctacttagtcaatttggttccctggtgagggtccttttcctggctttataggtggccggcttctggatgtatcctcacatggcccctaagagctctagtctgttcctcatcctatcatgggggctccaccctcatgacctaatatagtcatgagaggcttagttaactcctaaaggtctctcctccagatactatcaagttagagggtaggccttcaacatatgaatttggagggacacagacagtccataacatcattatactggtataccatttaactcctttctgatgcatatttaggtagttttcagacttttgctatcaaaagccatggtgcagtggattaccttgtgcatacgtcgtgttgcacttaaatgcataggataaatttccagaggtagagttcctaggccagcgtatgtgcatttgtaattttatgtattgctgaagtgtagcctgtagaggttgtccaacttccattccaccagcactgtgtaaggatgcctgcttcttattacccttagacgtctttcatcttttaagggctgtttgtgttttctttcttttgaactgtccttgtctttgcatgtttttctattgctttgttgctcattttcctagatttgtaggattaattttacaaattggctccatgctattttttggaaatgtttttccccaatttgctgttttccattctatggtaggctattatgtatggttccaactttattttcttcaccagatatccatccatttgtccctacaccatttattaaataatccatctttgtcttaactgatttaaaatgccacctttaccatttacaaaatttccacgtgtatttggtaccattgtttccattgacccatctgcctgtttgggacctgagccatcctgtttttattattgtagtttatgctgtgttttctgctaggtctaattcccttttatttctcttccttttcagaagtttttttctggcttctatcttgtttattttatatgaacttctaaaaacaacccatctagtctagtctgtacccctcctctgccagtctttctgttggaatcactttttttattttattgtggtaaaattatgcacagctagatgcacaagcattacagtccaataagtttgcctttgtatacacttgtgcaatcccagatcaaaatacagaacacttccatcacccagaaccttttcttacatccttttcaagttaccttgctccccagtgattggcttctattaaatggattcagtgtactgttaggatttctttgtatttatagaataagtgacagctttatgatgtacctttatatccaagaataggaaaaacaaccttttcatttgttgaagtctcattttgagttcctgatagcatttttaaacattaaaatttttttttgctgttttatatatttaagtttttttttttttgctggaaatggcatctttttttccacttttatcttctatctggttatatataagaaagctttttattttgtatattagttaatatttcatatattaaataataagccccctgtagaatatttattatttctaatagttttgtagttgaattttttatttttcttatgtcatgccagcttttttgtttcctttgatttttacctcctccctcccccaactttttatactcttatattttttcttattgcatttatagtggtgattttagaagattatagttttcctccattatatgtaaaatgagccaaaatatctgtttatctgttgagtatttaaatgttatgaataataatgaaattagggagggattatgggaatacttaaagtagtgtgaagttttctctctaaagttaatgtaacttgaaatgaattgtggttttcaaaatgttaaatggacaagttggggatcacttgatagtgaatgtaggattagcagttaactgccttgtgtcttatttgatgatacagtcatgcaccacatggtgaggtttcggtccattacagaccacatatgtgacagtggtcccataaaattataccatatttttactctattttttctatgtttagatacacaaatacttcccattgtgttacagttgcctgcagtattcagtacagtaacctgctgtacaggttcgtagcctagggtcagtaggctacaccatattatagcttaggtatgttgtactatctaggttggtgtaagtagattccatgatgtttgcacagtgacgaaattgcctaatgatgcatttctcagaaggtatccccgtccttaagcaaggtgtgactatgtgtataggctgctttctatgtgcttagcacccagaggcagctcccggaaatataatttagtctggtgtcagagagcatgcagtcaaagtagaggtcaagatatgagaagtatgaagtgaatgaatgtagacaggagggtcttaagcttggaaaaatgcaaaaatcaagtcaggaaagcacaggagtgagagggtgcaaagagtgagtttgatttggcaactggattggggcaggttgctcatccttataaaattatatggtagttaggtacttagctgaacttcagtagagatctcattgcttaatggggattaaatagtttattttctgtctcttcttcccttcccctgctcccaccaaaaagctaaggcagttttctactgaaggacgcatacatcgttaagtaagctagaaacaaaaagttagaacctcgggaaaacaagtatccagactatcctaatggtataggagctaatgcatatttggtgcctatcatataccaggcactgttcttgtgctttatgtatgttaaattgtttaaacatcccacagcaaccctacaaggtgggcactgttactcccattttatacatgaggaaacaggcatagagagattatatgggaagttgttggtgatcttgttgggtggttttattaaagtgggaagaaagaagccaagttgaagatggttaaaaaacaatgaatgatttttctttttaaagacagggtctccctctgttgcccaggctggagtgcagtggtgtgatcgtagatcactgcagccttaaactcctgggttcaagtgaatcttcctgtctcagcctccagcctcccgagtagctgggactcggctggcgaatttttaagttttttgtaaagatggggtctcactgtgttgcctaggctggtctgaaactcctggcctcgtgatcttaccacctccgcctcccaaagtgctgggattataggcgtgagccaccacacccagcccctgaatgaaacactttgaaaaagagtgagaaatgagcaagtgctgacacagtgggtgcagaccactcttttaagattagctctgaagtgaacaaagaaatgggttggtggataaaggaaattgtgaggctcagaaaatgagtgaaaatggcattgctgtatgtaggaaaggggatgcagagtacgggtagagagtttggccctcagtagaggagagatcttttccatctaacaggaggaaatgcagaaaagttgtgtgcccttgcgaggaagtttggaagttggaaggtgaaggcctattctcctggctttcatcttctctgtggtttctgtttgctcaatgaagcatgagattcatacgggcagaaagggatgggagtttggggagtttgaagcagtttgccaagaagtattgattgttcatttaaggtttaaaatcttgaatttaaagtgatatcagtcagcctggttttgtgaccccccacccccccagcattatttagctgattagttacaggcacagattaaggcaggtagttgaatttacccagggtgagattttgccaggtgtattagagttctccagagaaacagcaaatcggagttataggtaggtagactgagattttaaggcatttgtttttgtgagggctggcaagtctgaaatctgtagggcaggcaggaaattcttggtcaggagttaatactgcagccttgaggcagaattttgtttttctcagggaaacttgtttttgctattaaagccttaccaagtgattggatgaggcctacccacggtatcaaggataagctcctgtacttaaacttgactgtttgtagatattaatcacatctacaaaataccttcacagcaactacattagtgtttgaataactgggtactacagactagccaaattgacacttaaaactaaccatcacaccagatcagttcaaaagaaggaaagggggacaagggaaataaggaccttttaactagaatgcttattgtgtggtggtggttgagtgtgtaactggccacagggtttgagtaagttaacttgaaagattgaatgccatggtcagagtggaatacctgaaagagagatttcacaagtatgacaattattgacattaataatgctcaggttaactttgggtgtgggcttccgaggtggaattcagagacaaatcctgaacgtgaggaggccaatgagttaaagagtctgaggtattaaaaaagggtcagtctgcatgcatggtgaaatcagcaactagtgaggggagtaagggtacgtactgtaaaccagttgtaatgtcctcaatgaataaggaagaattggagggaggctagacgaacaagaaaggttaaaggtagtgtaacaggctaagtttgcttgtcacaaattgggaatttcagaaggccaagtaaaggaattaggaggatgaagaattgagtcaaatggaggacgtacacagcagtgtggcagtgagaattcagagaataatagataaccagggagagctggattttttctggtgaccataagcagggatgtgaggtatgagaggattagtcctgatacaggagatggtggttatcacttttagtgttgtaggactctgtggcagtgctttcagactgttactcatgacccattagtaggttatagaattttgggagatcacaatttctgttacgttgttaaaagaaatgaaatagaaaataccatagtgtgtcatgtgtaataagggactaagaattttttaacggttttattgagatataattcacataccattatagttatctatttgaaatatacagctcaaagcttttttagtatattcctggaataatggagccatcatcacagcctaactttagaacatgtttgtcaccccagaaagtaacctcatactcactagcagtcactccccatttcttcacacacaccccctcctctccctggccctaaacagccacttacccactttcttctctatagttttgttcattctggctatctcttttttatttttttgagatgacgtcttgctctgttgcccaggctggagtgcagtggcgtgatcccggctctctacagcctccacctcccgggttcaagcaattctcctgcctcagcctcccgagtagctgcgattacaggtgcctgccactaggcctggctaatttttttgtatttttagtagaaacagggtttcaccatgttggccaggctgatcttgaactccttaccccaagtgatctacccacttcagcctccaaaagtgctgggattacaggtgtgagccactgcacccagcgcattctggatctctcatgtaagtggaatcatacactgtgcgatcttttgtgactggcttatttcacttagcatgatgtttttaaggttcatgtatcatgtatcagtacttcgtttctgtttttttttcttttctttttttttgagacagagtttcacccttgttgcccaggctggagtgcaatggcgtgatcttggctcactgcaacctctgccttcctggttcaagtgattctcctacctcagcctccccagtagttgggattacaggcgcatgccaccactgccagcttattttgtatttttggtagagatagggtttctccatgttggtcaggctggtgttgaactcctgacctcaggtgatcccccaccttggcctcccaagtgctgggatttcaggtgtgagccactgctcggccttttttttttttttttttttttttttttttttaaattagatcaggtcttgctctgtcaccctgttacccaggctggagtgcagtaccatgatcgtggctcactacaggctgaaactcctgggctgaagcaatcctcctgcctcagcctcttgagtagctgggaccacaggcacatgccaccacacctggctaattttaaattttttgtagaggcaggctctccctatgtttcccaggctggtcttgaactcctggcctcaagttatcctcccaccttgagctcccaaagtgctgctgagattagaggcatgaaccacagtgcctgaccttcatttctttttatggtgaaatattatttggttgtacgatatgccacattttatttacctacacttcatttgatgggcatttggattgtttacactttttggctatagtaagtaatatagtacacaagttatgaatatgaacatttgtacacaagtttttttgtgttgtatgttttcatttctcttgggtatgtatccaagagtggaattgctgggtcatatgggtaactctatgcttattattttgaagaactgccaaactgtttttcaaagtggctgcaccattttacatttccaccagcaaggtgtgaagattccaaattctccacatcctattcaagcttgttattgtctgtcttgaaaatagccacctgatgagagtgaagtgatagcccattgtgattttaaattgcacttccctgatagctaatgatattgaacatagtttcatgtgcttcttggccacttttatatcttctggagaagtatttcagattctttgcctattttaaaaattgagttatttatctttttattacgttgtaagagtttttttttttttttttttttttaagagatggggttcttgctctgtcacccatcctggagtgcagtgatgcaacctgggctcactgcagcctcaaactcttgtacacaaatgatcctccctccccagcctcacaagtagctaggaccacaggtgtgccctgctaatttttaaaattttttgtagagatggggtctcactgtgccgcctaggtgctgtaactcctgggctcaagtgatcctcccaccttggcctccaaaagtgctgggattacaaacatgagcttccttgcctggccaaagagttctttatatattatagatacaagttgcataacagatgtatggtttataaatattttctcctgtttcagaggtagtctttttactttcttgatggcatcatttgtagcacaaaaagttttaatttcaataaagaaatccaatgtatttgtttttcccttgtgcttttggaatcttttataagaagccaatgcttaactcaaggtcatgaagacaacttctgcattttcttctgagttttatagttttagctcttacatttaggtctgtgatccattttgagttaattttatggtgtatggtataaggaaggcatgtgaggtaattcttttgcatatagacatgcagttgtcctagctccatttgttgaaaatactgttctttcttaccaaattgtcttgggcattcttgaaaaaaaggcagatttatttctggactctgaattctattccattgatctatgtgtctattcttaggttcccacggtgtgttgattactgtagttcagaattttttgaaagttgtgtttcacatagatgtgtgagtatatttatatatagatacacacagaggtgtgtgtgtaatgggttatgttggaaaatgttggaaaacctatggtgtctccccattagttcactcgcttgtggcaacttagtggagtatgttccctctcaggtaatatacagagaagacaggttagagggtctgtctgtgagtgtatgaattccttttagattggatgactgatttttcttactttagtaaagttttcaagtgcatgtggactgaagggcagtaaggagggcatagaacagctatgggaattcctaaagaattcatcagagatgaatgtaacgattatggagtgaagtatttgaaattttgaagttagcagggttttgtactgtgccagtctttcatgatttaaaaaaaaaaacttttttgaatatattaagcatgtctgtgtcggataacttaagacattatataaggaaaattatatagataatttaaggtttgggaatgatgctatctccttctagagaggatttttgttgactttggcaggaggcaagctagtggcactagcaatcccgaatcatcttaatccagtcagagactatgatgtttcaaaactgggttccggagtctacgaaggctggtctattttatgttttatttacttctaggtatgaccccttggagttctagcataaagccagggatgttatcagccccacatgcccccaccctcacactttcttgggcccttaactccaatatttaatcctctctagtcatgtaaatctattgcaagttcaagctcagcttctcagccacgtctttggaattggcagatcccttcagggggagaaatggccccggatgccagactcccttatgagcttttccttactctcccagatcttggtcttcatgctttttcactaccttggcactctgatgccctcaaacaggttttttggttttgatttttaaaacattttttctggggacttgggcaggtgtccagtttttctagttgctctcagtacgataattggtttgaattatctagttcaccattttaaggaaagcgatttgttaggttgatcaaggtttatgtcataagattctctgtttgaaattgtagtatatgtggtttcagtttttcctgagggtaagattttgggtaccagtttctacagattatagaaattattagaaaagggggaaatagccttaggaatagaaatgggagggaaaatggcagagaaaactagatatttttgcaaagtttgggaaagataaaggtatagggtaacattttcatgtctattaggagtgtaaaagggcattcatgtatcaaaggcgctgacatatttgttgtaatgatattgtcataattaaaaggctgtagaatctaggtattgtgggggtggctttgagaagtatctacttagtcgtgttgaataaaatttttaaatttcgcagagaaaccctaggatactgagtcattaattgaaggagtcaactttggggctggacttatggttgtgtcttatagcagtataaatctgcgcagccagtagtatgtaagggattgcagaaagaatttaatttcatagaacccattattaatatgagagatacaaaatgatactgattttgatttagcatgccatcttcatttatgtatgaaaataaatgtaaggtcttaaagagtttttgtttttgattctctaagctattcccatacttcttaaatttcaaaattacaaagttttccatacatcttaatcattataattgaggaaaaatggtatatctttaatagccccttcttctcttgagaaaatgatagatactgggtgtatttcagaaggttttatcagcagagttttggttgatattttaaactttttgaggataggaattgtttagtaaaatgatgccctctcttttttggctccatcttccagtatatgtgtcataggaacctggtttaagttcagtgtgtttctttgttacacctgtcagtagaatcggctattactgttttttggttccttacaactgaacattttggtcaccgtcctcacccactttttaaagtgacttcattctcccacatcactcccaactgaagaatgttcagacatacacattgaaagaatattacggtaaacacctgtatacttcatttggatattgtggttgttagcttttttgtcatattcgtttatgtctctcctaaaagtaaacacattctcttacatatgtcatacttaagcccttaatatctagttcatattcaagttttgctaattattcccccaaaaggtcagtttgtgctgcaaccaggtactgtgatttctcacctagtttccatagctcttgtgaaggtgttttcgtgcatggatagtgttcaaattgatgtttctgttaggggacaatcactggagagtcctattcttccatcttattctgcccctctcctccaaaaaggtcaacttgtaactgcttttttcaaaccaatattcaatcagtttatgaaccacatttgatcgttgttgctttagtcacttatacaacagttgtcctgttttctagtttttttttttttttttacactcatgatattggcttcttgaagagaccaggccatttgtcatatagaatgtttcccatattttggatttgtctgattttcttgtagcaattaacttttatctcaattcccactgtatttcctaaagtagaagattgagcctaaagactggattatatttagtttttttttggcttagttactcctgtgtacgttatattgactcataacacaggcatcaggtggtttgcctaaagtgtgatcatttggtgttaaggtggtattcaccagatctatccattataacaatgggtttccccttgacaatcagcagatcagtgagatgacgttttggttccctttgaatatcctgttttccagcagccttttacctgtgtgttgagtctcttggtgagctttgaatcagttatttcatttgggcttgcaaatggtgtttttttgtttttctaaccctatcatccttttttttttgagatggagtcttgctctgtcacccaggctggagtgcagtggcacaatctctggtcactgcaacctccacctcctgggttcaagcgattctctcacctctgcctcccgagtagctgggactacaggcacgtgccaccatgcctggctaattttcatatttttagtagagatggggtttcaccatattggccaggctggtctcgaactcctgacctcaagtgatctgcccaccttggcctcccgcctgtcatccttcttgatcaattaatattaaccagctttcctctgttaagaagacctttccctcttgtcaactgggattgaactacagttcttcctaacaagatgagataaatgtttatttctcttcaatataccaactctttttaacataccaattttgaaaatttaaccaatttggagtagtcatcttcaaaaagtggcacataactttcagtctctctgtatcacagggatttttgtttttttcagaagttttatgatcatttcagtcattctttttaaaatagtcttcatttgtagaagttttagttttacagaaaaattgagtatatactacagtttccatataccccagacccaatttctcctataattaacatcgtatgtttgcatggcacatttattacaattagtgaaaagtattggtacattattaactaaaatccatagcttattcagcttttcttagtttttagctagtgtttttgttttgttttttcaagatcccatctggaataccacattacattttgttgtcatatctccttaggatttcttagctgtgagtttctcagatattcctttttgtgattaccttgactgctcaaatattttgtaggataccgttttattggaatttgatgtttttctcatttttagactggccttatgggtttctagaaggaaaatcacagaggtaaagcatcatttcatcacatcctgtcaagggtatgtactgttaacataatttatgacttgattttgactttgatcacctggctgaggtaatgtttgtctgatttttccattgtaaagttactcttttttcctccttttcatactgtaatactggggaaaggtgaccatgcacagcccacactttagggagttatgtcctgcttcttgatggcagagtatctacataaattattaatatttggaatccttctgtgcaggagatttttattttctcccatttagtaatttgttcagtcatttatatcagtatggactcatggttgcttattttatactttgggttatagtccaatactattaatacttaattttgctacacacattgtttcagatttggccattgggaacccctttagttagctcctgtgcctgtgacatacttccatcggtgtgggtgttttgtgagcacttactttctggcactgcaggatactcccagctcatcttgtatgttttctaccctagtcctgggatcagccgtttctctaaggagcactgtttcctttaattagaaaatggtattagaaacaaagatctaggtgcccttgttgctactgggatgttgtgttttaggtactctcagcagatagagcaaataaatatattcatatattagaaatatctgtatatctatgtgtctagagagagatataagtatttaatattatatatcagtatttatatgtgcataaatatttgtaaccatctgtatctatataagctaaacatgaattcttaatgtcttcaactctaatctattaccatacggatcattcctggtcctcccgttactgaccagtaaatttcctccaatagcgggaaacctgcctcccagcacacaccatttatttacttagttgttcaattccaacataggtcttatagcagtatcagaattgttaactcacacccaatggaaacagctgtatcaactaggagtgttttttgtttgtttgtttgttttttgttgttcaattcttcagaaatttctaagtggacaatcatgtcatctgcaaacagaaacagttttatttcttttcccccctccgtctgcatgccttttcttcccttttattgtcttattgcagtatttaggactttaggtatgatgttgaataggagtaatgggaggagacatttttgccttattcttgttcttggggggaaagtagtttttcaccattaagtactatgttcactgtagagggttttttgaggggagtagagtagatttttttaaaaaatcaaattgaggaaattcttctccattcttggttttctgaccgttttcatcatgagtggtgttagattttgtcagacgctttgtctgcatccattgatatgaccatttgatttatcttcattagcctgttgatgtggtggattagggttacattagtagattttagaaccagccttgcatacctgggataaatctctcctggttatggtgaataattccttttctacattattggattcaatttactaatattttgttgaggatttttgttacctgtgttcatgaaagatactggtctgtagctttcttttcttaccatctctttgttttattattattagagtaaggctgctcttttagaataagtcaggaaatgttccttctgtttttattttctgcaagagattgtagagaattggtatcacttttttccttaaatgtttggaataattcaccagtaaaactgttcaggcctggtgttttctgttttaaaaggttaataactgttgattcaattttctaatagatacagatctattcagattattgatatagtttctttaatagttaacaggtttgttcaggttatctgtttttctttgtgagaactttggtagattgtgtctttcacagaatattggcttatttcatcttactaaatttttggtgtacagagttgttcatagtattcctttgttgtacttttaatgtacttgggataagtaatgatgacccctcttccatttgttacattagtaatttgtgccttctctctttttcttcttttgttttttttgagacaaagagtctcactgtcacccaggctggaatgcagtggtgcgatcttggctcactgcaacctcagcctcctgggttcaagcgattttcctgcctcagccttccaagtagctgggattacaggtacatgccgccatgcccagctaatttttgtattttttagtagaaatggggatttcaccatgttggccagggtggtctcgaacttcttgattagtctggctagaggtttaacagttttatttatattttcaatgagccagcttttttttttttctttgtattttcctgtttttaatttcactgattttgactgtaattcttttttttcttctgctcactttaggtgttactctttttgatgatcagttgtctcacatttggccagtgagagtctcttgaggtggctgctgtgtccattttgatctgacctggttgatcgttgaatgcttccttgctttctggcaggataaaatgtatttcaacctgtacttatcttgccttaacctgggacactccttttctttaggaagttggcttcagtcttaattttatgtgattgctcacttctttcatctaaactttaaacagatttgacacattgagatcagcacttttgcctttttttggtagtcaacaagagcaactgaggtgtcctgttgatgctagtatttaatgtcttaaaacttgtcttaaaaacagaacattttcctgttcaatttatataagcaaaaagacactttaactgtatccagccaaactcttctatggcatctctgaaagtaatttatactttgccagtttgtacttttgctaagagatagttgaaaaccacacctttttaagaagttcagaaattgaggatgcggtattctgaattatctaatttgatttttctgcatctctacagttgtttcattacttagtaaagcgtttccaactttagcttcagggtttttcttttacttttaacaaatattatgtgccaacacttacaaatagtaactcatttaattattttaaccttgctggtagatatggttattctcctctctccctcatagatggggaaactcaggcaagatgaagttaagtaacttgcgcagggtcatacacgagtggcagggccagagtctgaatccagacagttggctccagacgccagactcctagccactgctttgtgctgcccctctttcctctgctagttaagtcgaaaaagttgtttgtgattctgcatcttgctttcctcttctcttattaattatagtataatgggtgtcactcttattaccataagccttagtatggcattgcgagcaccagttaattaagcaataacgttttgagatccctaattggaagaattcagagcggtgtattgctttgagttagttggccctttgctgcaactctggccatgagacaacgttatcttgaatagtgataatgtgtaaaaagatgaggcctcctttttttttaaaaaaaaaattaaattcatttagagtatgaattttaaagtagtgtagtcagtgatgatataagatcaaagaataagtgaaaacacttcataaggcacagagagctaaatgtgtgtaactgttttattggtgtacatagttactgctggaactacagaggaagaatcattattttatgggaagaacatatgttactggaaatcctagattcttagatcacaattctaaattccagttctttgatgtgttaacatagggtccattgcatcctatttactggtttatttttatccttgctctgcttcttcataattgtaattaagtaaaactttctggttccccaaggtcagggcatactctttttgaaaataatattaactactgctgatgagaggaagagagcaacaggaagcatttaaaaaaattttttttaaactaacggcaaatataaaatatttaggaaaaaggtaaagattaaaagtacctatagctagtaatattttggtgtacttctttttatgtattttgtgcacatgtgagagagatttatatacatgggtacacacatgtataatttgtaaggatacaaaaatcatattagcttacgttaattgaggactagagtactgataactgcttttatttaagtctaggaaatagattttgtttaaaagaaatgtattcttaatagagaaataatttttataaaataagagatttgcagcattgctttttttgtataagtatgctaagactgccatctctttatttaacaggaaggagttttaaactttaacttaataggaagatgtttcaggggttctctgaagtcaagaatgttttcatataatactagaagtgttatttgcctttttcatgtctgttctcaagagtttttctgaggccatgtgacttgccctgtgatgtggcaacagactgtatagaagcaaatgagagaacccagctgtctgaaattaagccagaccataaagggatttgcagaaatgtagaacaatgtgtgagaaacacattcacccgtccaaacccaatgaatggactcagagacatgaagaacagcggaagtgagactttcaatggcagtcttgcaagatcaggtgtctggtaggcaggcacacccggggcaggtacagcaggtaatttatctcctagcacgcaggtctcttccccagttcctcactggtcgagtactatggggttacagtcttcccggacgttgcctaagtttcattatcccccttaaaaggttatactccagtccccttccccccgtaactttcaatttcccaatagcaaaactttcttcccttttatgggctgacccctcctctacattctgatcacttatcatgactttataggtgcatgagccatgcaatttgtcacatccgcaggctgactgccagtacttagatttgtttctcggtctagaatggatggattgtcattggtgatgagtataggattgcattctaaattgtggcagttatttggcagggagcccttggacagatgtagtttattcttcaagggtctccagcttagagttacccaccccgtttactgtccaaccctgaaaatgggtagtctaccatacatcatcccagctgggtggggcaggatgatgctctactgtaacctgtatctggttcagggcaaaggtacttatctgcctgcgagagctatccctgattttccaaattcccacaaggtaagacctggcaggcatcaaatcttacagtctgggatgctactgtcttggttacactaattaccaacctcattggatagggaggagtcccctgccagtttccattttgaccttctgctttttgtatagtagcccatcccagccatattaacttcgagaaatggggccaacccatgttttctttttagatttttctcagagttaactttaagggttcctcagtgcactttccactggtcttttcccctcccttccagggtctcttttaccaatcccttgactcaaggatagtgagtccacccctgttcagctgtttgcacagctatcttagtggggaccttcccagcttgggtggagcttgtcttctttccaaatcttaatcagcaccaagttgccaggctggaagtggtgaaccgtgaactcaagaggtggcatttgagtcagaagtcctcttaacctaagggatgacagggtggaggatatggccagtatataatttcttaagcattgatccatggtttccatagtagggaggatctgtagctctgcccaaatatgggtgcccctataataactcatagggggataatcccaagtattttcttggggctgtcataatcctaaggagtactattgggagacatttggtccagggtattttagtttctagattagtttggtgattatgctttttgagagtttgattcattctttctacctttccagaggaagggggatgccaaggggtatgataatctcatctaatttgtaaaccttccataattccccttaacacccttgagataaagtggctcccattgtttgaatcaatattttctaccaggtcaaatctaggtacagtctgttctaatattattttgaccacattactggcagtggctgttggaaggggaaaggcttccacccagctggaaaggtgacctacgatcaccagtaaatatatcagtcttcctcctttgggcatttctgtgaaatctacttgaatgctttgaaatggtcttagtctgggaggtcttcctcctgtggcctgttttctgatcacctttttgtttatcctttgacaagttacgcaacttccacatacttgtttagcaggggtataaatccctgtacacccataccctgttgcatcatgcagagtcggggatccccaatgactccttttgtgtaatatagacgttagctctctcatcaggggtttacttatttttcttccatcgggaagtatccatctcatcttcagtttgagtgacccctatcctgtctaattcttctttcttctctctgataaactggggccttaatactaccttagggatgtctgggatcaggctaaatagtctaatttcttcctccagggaggcttgcttagcagcttcagctgcaaacctgtttgctacagcttctgtggtgttccctttctgaaaaccatttacatgaactatggctacctctgctggaagcaagaggctttctaaaacctgtttggccagttccaaatgtaccaattattttctcctgctatttattaggccccactctgtccagatttttccaaaagtgtgtaccactttggattttaagtaggcatacttaaattcagtgtatatagtgcctttttggccttcaaggagctttagggcctggttaagagcataataattcacaggtttgggctaaccagcaattaggtaatcttcctttctcacataaggagtgtttatttccatcaatgacaccatcactgttatgtcccttgccatctgtcactggagacagcccatccacaaacagccttatctcatcatgtagtagagcttccctaaggtctggtctaactttggtttggtattctatgatacctaagcagttatgatctgatgtctctttgttctcctctcctttccctagaaaactgtctggattcaggcaagtatttgttgttacgaccaagtcatctttttctagtaatacagcctcatattttagaatccgagaatcagttaaccatcttccagctctttgatttaatatattcctgactaggtgtggggtgcttactattagggccccaccaaaggttagctttctagtctcctctaccagcaggtctgtggcagctattgtttgcacacatttgggctacccttgagagacaggattgagaagcttggagacaaaagcagcaggttgccttttcccaccccatatttgagtgagcactccaagggccatgccctagtctactgttagaaacaggtggaatgggttctctaaagatgggagggccagggctgtaatgagggcctggtttagctctttcactgcctgaatttcttctgaggaccactgcaagtgatcaggttcctcttctaataacttgaccggccggatgcaacagggaaagaagaaggggtggggacacggggcagagccagtcctcctgtttggggcctgggcctaggaaagctaactaggggcaggaaaggggagccccaggctgtggatgcctctgcgggggaacgttgggtcagcaacggccagaggaaatcctaaggccaaacagtatctgtggcctccctacctttgggcatcttctggtcgccaatttgctgcaagtcacagctcccaaatctggttgtgcaggctccaaagcagtggagcctggcgcttctgccatctccacctcctggatctcagagctgctggatggctccacccaccacccgctgagctggccccacttggggctggcattggtggacagcatgttccgggcgcctctgctcctctttgctggggcctgcacctttcctggctgctgactcatagatgtcagagctgcaggacggctccacagaagccctgtgtttaggacacctcattagtgaaggagagtggagagtaaacccaagggactatccagaggaatgtcagatggagtctctttggctccctctttcctttgtcccctaagcctagaatttctgtttctcattttcagtcagtctctgtgtctgagcttttccctgtgtactcaactccccaactggaggtttcttgcacaccccgagaatcgctttgtctgtctctggccgtttccctcgcagaacggaactgcagattgggactctgcacttgccttatatctgggatacgtctcagtcacacacactcgacctccaaaaatgcccaaccaccaaggcagtacttagagtccaattttcctaccttggcttgtgcatgaggtttcctggttgctgcagtgcctgcttttctccgtatgtcacctccactgcctcctgaataacagtctcaggtttgtctatggcctttgcaaggagctgggacactcagacagagcgggccacctaaatcgggtgagattcatctcccttttcggccggagtctgactctacgcaggcataaagatcccagacgggcccccaagtttgtaagggaaacattcacccgtccaaacccaaataatggactcggagacatgaagaacagcggaagtaagacttttagtggcagtcttgcaagatctaggtgtctggtaggcacacacacccacggcagttacagcaggtaatttatctcctagcacgcaagtctctcccccatttcctcactggtcgagtactatggggttacaatcttcccagacgttgcctaagtttcattatcccccttataaggttataccccagtccccttcctcacttaagtttcgattttccgatagcaaaacttttccctttcatgggctgacccctcctctacattctgatcacttatagtgactttctaggtgcatgagctgtgtggtttgtcacatctgcaggttgactgccagtacttagatttagcatgccttgaaaatggatcatttaaaatgttttctcacacaatggcactcttttcaccaggttttccttttttttaaattgtcgttttccatcaaaattctagttaatcatgcagtggaagtttattatgtttaaataaattttaaaaagtttaagtgctcacttctgtttaatatattaaatattgatatatcaacataaataaaagcttctgttaacaaagttctttgtttaaaaagtataaaggaatagtgataaccaaaaagtttgacagctgccatattatataatatcaaaaaattatttattacttactactcatctcaccagcaaaatcattggatcctgcacagggatagatacaaattttgcaaaattttaattttcacttgatagttttaattttttcattggcaataaatactgtcatttatttttcttgaagtgataggcacactttgttcattttcaagaaaatgtcttccacataccctagcccaaataacatagtttgtgtgtcattctttcaagtaaaaattgtattatttaaaaacatgtctcacaagtgcttttcctgcaatggcccctgtacttcagtatatagcaacagtgcttatgtatacttcccatttcatcataacagataatgtggatattcctcttttatatgtgctacaccagaatttaacaaggtaactgcagggagaatctgaaactatattaataaatttttcatattctattatattaaaatccatttgtctatcttgcgttttaaatgagtgttttgcccatttataagtttgaaacatcatgtattagtcatttggaaaatactgatttagtgaggcctgcagatctttcaaatgtgtttctttataccaccattgtcatagtgtggtttgaggactgacagggctagcagaaaactccatctgtatcaggtatttgacggtcaagatttatgtaattaagaatttttggaaatagtaagattgttaaatttctaccctgactgatgagtattaaaaaaaagaaccacagattatcagtatgtggagtgaaagatggacatcacaacatatatggcagatattaaaagaataaaggaatattataaacactcaaaagctaagaaacaatgtagatgaaatggaacactcttttaaaaaatattcattgcccagatttacacaagaaaacagctacgtatttattaaggaaattaaatttgcagtaaaaaagttcctcacaggccctgtgatatcatgagggaataatttgatgtggctcctacttctaaaagcagcaattctcaaactttttaagagttttggaatgtctgtgttgttaaaaattattgaatatctcaaggtgctttatataggctatagctattgaaatttactctattagaaattaaaactaagaactctaaaaaatatttattcatcagttcattgacaaagtaataacccagttaaagttaacataaaattttatgaaaaataactttttcaaaagaaaaaataatataacctattgtgataaccctgtgggttgcttagcccctggaaaactgctgtacacatgtaagagaatgccagtgaaaaaggcaaaaggtaggcatttctggaatggaacttttatttctcagcactttataggttttttaaagagaaggtgttgctattgttgtatcagataacacagatattaaaccaacaacagtaacaaaagacaagggcattatataatgacaaaggatttaattcaacaagatttgtatctcctaggtatatatgccatacccagtgttgtagcacccacatttataaaacaaatactactagacttaggaaaacgagacaaccacacaataatagtggaggactgcaacagcccactgacagcactggacagatcaccgcagaaaactaacaaattctcgacttaaattgaagttttgaccaaatggacgtaatacacacgtacagaataccctacccaacaaccacagaatacacattttactcatctttgcatgctctaaaaatgaccacatgctcagtcataaagcaagtctcaataaattcaaaaaagcagaaatcataccaagcatctgtttggaccacagttgaataaaattagaaatcaataccaagaataactctgaaagccacgtaagtacatggaaatgaaacagtttgctcctgaatgacgtttggctaaacaaaattaaggcagaaatacaattttttttggaacaaatgaaaatagaaacaatatatgaaaacctctaggatatagcaaaatagagttaagaggaaaattttagtgctaaattcctacatcaaaagaaagatctcaaattaacaacctaacattgcccctaaaggaactagcaaaataagaacaaaccaacctgaaagctagcagaacaaaagaaataacaaagatttgtgcagaactaaacagaattgagaccaaaaaattacacacagaatcaacaaaacggaaagttctgtttgtccttctaaagggtaaacaaaattgatagactgccagctagatgaaccaagaaaagagagaagattcaaataagcacaaaaatggcaaagatgtcattacagtggataccatagaaatacaaagatccttagagactactgtggacatttttatgtgcacaaactagaaaatttagaggaaatagataaacatctggaagcacacagccttccaagagtgaaccaggaagaaatcaaaatcctgaacagaccaataacgagttataacgttgaatacataataaaatctaccaaccacaaaaagccctgaaccaaaaggattcatagccagattttactagatgttggtagaagagctgataccaatcttactgaaactattccaaaaaaatcaaggtggagagatatcctccctaactcattctttgaaaccagtatcatcccaatatcaaaatctagcaaggacacaacaacaaaaagaaaaacagaaatgcaggccagcatccctgatgaagatagaggcaaaaatcctcaacaaaatactagcagactgaatctagcagcacataaaaaagataattcaccatgatcaggtaggttttttcctagatacaaggatggttcagaatatacaaatcaataaatgtaattcaccacataaacagaattaaaaaacaaaaaccatattcttatgcagtaaaatccagcatctctccatgataaaacctcaacaacctaggcatcagaggaacatacctcaaaatagtaagagtcatttatgacatacccacagccaacatcatcctgaatgagcaaaagttgaaagcatttcccctaagaaccagaacaagacaaggatgtccactctcaccattccttttcaacatagtactagaagttctagccaaagcaatcagacaaaagaaataaaagatgtccaaataggcaaagaggaagtcaaattatatgcttgttgatgacatgatcctgtacctaaaaaaaccctgaaagattccccgaaagactcctggacctgagaaacaactccagtaaagtttgaggatacaaaataaatgtacaaaaatcactggcatttctatacaccaataacattcaagctgagagccaaattaagaactaatttacaatagacacacacaaacacacacaccacacacacacaatatctagaattacatttaaccaaggaagggaaagatctctacaaagaactgtaaaacactgatgaaagaattcatagatgacacaaacaaatggaagaaacgtcccatgcttgtagattgaaagaatcaacattgttaaatgaccatactgcccaaagcaatctacaacttcaatataattcctatcaaattaccaatgtgattttttttcacagaattagaaaagacaattctaatattcatgtggaaatacaatagagcctaaataggtagagcgatctaagcaaaaggaacaaagccagaggcatcatattacccaacttcagactatactgcaaggctattgtaaccaaaatagcacggaattggtacaaagatagacacatacatcaatggaacaaaatagagaacccagaaataaagccacacacctgctatgaactgatcttcaactgagtcaacaaaaataagcaatagagaaaggataccctattcaataaatggtgctgggaaaactggctagccatatgtagaagaatgaaaatagactcctacctctcactatatacaaaaattaactcaagatggattaaagacttatttaagacctccagctataaaaattctagaagaaaacctaggaaaatatcttttgaacatttaaagaatttatgactaagatcccaaaagcaaatgcaacaaaaacaaaactagacaagtggggtttcattacagagcttctgcacagcaaaagaaacaaacagggtaaacagcgtacagaatggaagaaagtatttgcaaactatatatccagtaaaggactgatatccataataaataaggaatttgaatcaataagaaaaaataactcgattaaaaagtggcaaaggacatgaacagaccttctcaaaagaagacatacgagtggcgaaaaaaggtgaaataatgtgcaacatcactaatcatcagagaaatgaaattgaaaccacagcaagataccatctcatagcagttagatggctgttattaaaaagtaataaaataagacatgttggtgaggatgcagagaaaagggaacgcttacacgctgttggtgggaatgtaaattagtacaacccctatggaaaacattctggagatttctcaaagaactaaaaatagaactaccattcaaaccagcagtctcattactgggtatctacccaaaggaagagaaatggttttatcataaagacagctgtgcttgcatgtttgttgcatgcagcactattcacaatagcagaggcacagaatcaagtgttcatcaacagtggattagataaaagaaaatgtggtacatatgcaccatggatactacagagccataatcaggaatgaaataatgtcctttacagcaacgtggatgcagctggaggccattatcaagtgaattaatgcagaaacagaaaaataccgtatgttcttacttataagtgggagctaaacagtgggtacacatggacgcaaagatggaaacagtagacactagtgactccaaaaggaggctgagggggtagggttgaaaacctccctcctgggtactatgttcactatttgtgtgatgagttcaacagaagctcagaccccagaattatgcaatgtacccatgtaacaaacctgcgtatgtgccccctgaatctatacttaaaataaatatactcataattctctattaaatataattttcactataaaacaaagttttagttttcttatctctgacttgtgtagtttcagatgagaagtctgttgtaattcttagtgtttctgaataagttctaggaattgttcatcttatagtttcctggcatttgccctttgcctaagacttgtgaggttttgctttatgcatgtgcaaattagtattcaaacaaaaacataagaggatccctatgccaatttctggtgctctctattctctgaatctctctcttctctctatactgccctacaaattctagtcaccttcacctccttgatctgtctcctcaacttggcaaagtttccatactgtgtttggtgtgaccctttctgcacagtgttctggaaagagcctcctgccagaatggcaggacagttataggacttacctaatttgttttccttctgtctgttgctagtgtctgacaacagtttcttatattctgtccaatttctagttgttactgtaagagggtaaatctgatcccaattactctaccatgttagaagcagaagttatattaatttttatttttagagttgcctcaagaactgctgttctaaaataaactgaaccctatttaatatataatggataatactggacagtgaaatgttttttccttaggaaaatctaaacagctgtgggtctgggttaaaccatattaacagccttgctaatgaaatgtaaaaagtaaaagaagaaacgttaggtgcttccaggacactcatacttgaagtacaggttgaacatcccaaatccaaacatctgaaatctgaaatgctccaaaatatgaaactttttgaatgccagcatgacgctcaaaggaaatgcttattcaagcatttgggatttgggatgctcaactggcacatatataatgcagatattccaaaatctgaaaaaattagaaatgaaacactttttggttacaagcattttggataaaagatactcaagctatagtagatttcatttttcaattggtaaatactgtttggtgcttattatgcgccaggcagtatgcttagacttcaagatgagtaaatacaacaagcattacctatcttcttggagtttatagtctagtgaagaagaggattaattgtaaaaataaacaattagaactctgatgagtacaatgaaagagaagaacatggtgccatgaaagtatataaagatacctgatttaggatggacagacagggaaagcttccctgagaagctggtagctgagctgaaatttgatacttgaaggatgagcaggagctcaatagtaaggagaaggaagtaagttgagtagaacatttgcacagcaatctaggctgagggaaagcacatgcagaagcgatcaggagagagcctggcatatgccaaggaactgagggaaggctaatgcagttggactgcagagagcaatgttttggagggagtggtggaagatgtggcaggagaagtatgcagggcctatatcacacaagactgagtacaagttattcagaatttattcattcattcatttatttattgagacggggtctctgttgcttaggctgcagtgcagtggcgctgtcacggctgatcacagcctcaacttcccaggctcaagcgattctcccacctcagcctcccaagtatctgggactacaggcacacaccacctcgcccatccatttttaaaatattttgtagagacaaggtctcaccatgttgcccaggctggtcttgaacttcctggtctcaagcagtcctcccacctcagcctccaaaaatgttggaattacagccatgagccaccacacctggccataattttattttttataaaaaaaaattttacaataaaattcagatttgttcttattgggagaacagtagaagtcattgaatgaggaatcagtgagcagattttaaataagaaaacataattttgttattgtgaagaatggatagaatatggcaaacctattagggaactattgcagttatccaggaagacatgatggtagcttgaaatgtagtcgtgtgaatggattcaagagagatttagagggaaacagtataatcaacctgttgttgataggaggagtaactcctcagagtagttgtgggtaatggaatacatgtttctaccgtttgctgagacaacaccggaagaggaccagattggtttttggatatgttgaatttgaggtgccttttgaatgtccagatggaaatgtcatgtaggcatttgagtttgaaatcagaggagagatcagaattggaactcacacttgggttttattatattgaggtagtaattgctgtgggtgtgaatgagattagccagagcaaaggaatatagaaagagaagagcagtcctgtattttgaggaattccccctattgaatatccaggtagaatagtgaatcattaaagaagcctgcaaagaactgatttcagcaaacctaggacagtgaattattaaagaagttaccgtgtgttgctttcctatggctgctttaacaaattaccagttctactggcttgaaacaacagaagtttattctcacagttctagaggccagaagtctgaactcagtattagtaggctggattcaaggtgtctgtcaccagggccatgctctctccagagtctccaggggagaatctgttcctttcctcttccagcttctgttggctgctggcattccttggcttatctccacatcactccagttactgcctacacggtcagattgcctcctccttttctgtgtgtctaatctccctctgcttctcagacagctgtaatgacatttagggcccacaagataatccaggacaatctcatctcagaatctttaatgacatctgccaaaatttcccataaaagataacattcgcagcttccaaaggttaggacccagtatcttcaaggtagcatttttgaacctgccactcaagggaagaaaatgcttcaaggattcaattgatcagcaatgtcaggtgtttctgaaagattaaatgtgaatttaaaaagtccaatcagtagcctcagagagtggaagccagattgagaggtgttaggagttaataaggtgttttgtagctagacgttgcaagatttcttgattgctttttctctgtgagatggaattattggagattgaaattttgaaaagaatggagaaaattttgtgttggagagaatggaaagtaattttaacaaagagggcattattgtatactcattgtatactgttgataccatgcatgaaatgatagctgaatcgtctgtcctcttgtgttactttgtccatttgcacttggatatagctatggagaaagcagcttgctgggttcatctggggttggtattttgcaagacaggaatctaaggagtttgatatgttggtttgcagtagtttgaatcctctactgcttaccccgtgaacatttttggtgtacctccactctgtcccatttagccaggatttacttaaggaatgcaaatgaaatagttggtaaaatagaacaatatcagagtaaacaaagatcacatattttcactcttaattatgggtcccctctgtaaccacaagaagcaacgatagttggtcacttctgaaaattgttataatacagtccagatgtgacttagaaagtctagggtaacagatttgctttttctatatgcatttttaaacctgcacagattttgtcagctacttttgtttttagtgctatttataactccctgttgcctttattcctaaagagctactgctgtttaagatggttgccagattggccatctgctgtttcccactagtcatcgatttttcatcaggtacataaccaaagcatttcttcttttcagtccttttggggagtttcacatcagtccactgtatagaagctgatagaatattttggtggtggcattctcagcatacatttctgaactggcagactgttttcttaccaggatctcattgttgatatactgcctagcttcctaatgctgcaagattaatcttcttgagtaatttaaattcaaaatgtatttttaaaatatcttctataagcaaggctacaggctgaatacttttagaaatttaaaaaaattaattaaaaattttctaccttccaaatgcatatagttcttggggagacagtgtgtttgtcaatatgcccaaaccatataattagaattacaaagagacaaggaaaggtaaaatgctgtataagaattcaggaattctagataagattgtgatgtgattgtgcatatctcgcattctgtcttcctctttgtccaccgaaatccaggtagagtcagtaaacaaaatctaagtagatgctttctaaaagaaaatcatctaaaacaaagtgatacagaagggttaaaagttttttaaaaaaatccgtgaatgcttgaaaaagattgtgcaatttcaaaagaaaccaagaattgtaataatataagatgcggcagaattcaaggcagaaaacattaaacagaaaggatcattttttaatagatcatagtgggagattttaaccattgtctctgagagtaaagtattcggagaataagcaagaccataggagatactaagagatctagataaacttggcaggaacttccggtttcattgcttgacccaatacttctgtgaattacccactttatttctttattgttaaccctctctctcaactattgggtaccttctcaatttggttaatgagtcacttggcatacagttctcgggttctttgacattttctggtagaaagtgaatcctaagtattttgcgaaataaatttcagggttcttgtagagtcataaagaggcaaatgaatgaaatgaattaggcacatttcttttgagtccaagatctaattctgttcacacacacacacctttgcctatcaagcctaaccatgaagaaaatgatacgtaaacttctaagtgatatggtacacatttctgcttccaaaatgggatagatatacttttccatagttttacctattattcttgctaagtagagctaaaatccctggacattacatttaaaaacaaacataagaaaacagaaaaatggagagaactgggtggatctgctcaggacccagataatatcacagtaaaagtcctgagttttcttattaccttatgtatttcagaatggtgcagaaaagctggcaatccagaaatgttgggcacagacaaaagccccaggaaaaaaatgatgctctttagctggggaccaggaaaagggtagcctagcaagacagaaaataaccacttcagccaaagaacatagaagagtcaccctgattagcaaagaccaagtgaggacctagactttcacagtgtttaggctgtaacaagacaactcctcactccatagtggcagcagagccaatatgggaagcagtaaccataggcagggagcctgaactcccacgtatgcttaatatgagtcccgtcttcccttcacccccaagttctttggtatacaaaagcctgtgggcggcaagccacccaggcaccgaggcaagagacaggggacacgagctgttccagtataataaaatataaaacaagaatagttataccagatatagatcttagatatgattatatatgaatatcattaatcattagtttgtagcaattactttttattccaatattatgataatcctcactctataatcatagtctaggaaaaaccaggccatacagagataggagctgaggggacatagtgaggtgtgaccagaagacaagagtgcaagccttctgttatgcccggacagggccaccagagggctccttggtctggcagtgacgccagcgtctgggaagacgcccgttaccaggcggatcgtggtccagcagtagcaaaaggtgtcaaggaacaacacccgctccttagcagactgggaagcaggggggagggtctccctttccccgggggagtttagagaagactttgctcctccacctcttgtggagggcctgacatcagtcaggctctcccacagttatccggaggcctaaccgtctccctgtgatgctgtgcttcagtggtcccactcctagtctgccttcatgttccatcctgtacacctggctctgccttccagatagcagtagtaaattagtgaaaatactgatagtccctgatatgcagaaataatggcgtaagctgtctttctctgtctcctctccctctctgtctcctctccctctctgcctcagctgccaggcagggaagggccccctgtccagtggacatgtgacccacgtgaccttacctatcattggaggtgactcacattctttaccctgccccttctgccttgtatccaacaaataacagtgcagccagacattcggggccactaccggtctccgcgcattggtggtagtggtcccccgggcccagctgctttttctcttgtctctttgtcttgtgtctttatttctacactctctcgttgccgcacacagggagggacccaccgaccctgtggggctggtccctacaaaagcctagtgagaaacctgcacttccaccccccactaggcattttttccaccagagcaatgtcaaaggaagcttactataatggaatattaaaagtagatccagtcacctaatgtaataacccaaatatccaggtttcaatgaaaaaaacctctcataccaagaagcaggaaagtgtcagctcaaattagaaaagacagttaatacatgctgacactgaaataacacagatactagaattatttgacaagaatttttttattgtactttaagttttgggatacatgtgcagaatgtgcaggtttgttacataggtatacacgtggcatggtggtttgctgcacccatcatcccgtcatctacattaggtatttctcctaatgctatctctgccctagctccccaccccgcaacaggccccggtgtgtgatgttcccctccctgtgtccatgtgttctcattgttcacctcccacataagagtgagaacatgtggtggttggttttctattcctatgttagtttgctgagaatgatggtttccagattcatccatgtccctgcaaaggacatgaactcatcctttttgatggctgcatagtattctatggtatatatgtgccactttttatttatccagtctgtcattgatgggcatttgggttggttcccagtctttgctgttgtgaacagtgctgcagtaaacatacatgtgcatgtggctttatagtagaatgatttataagcctttgggtatatacccagtaatgggattgctgggtcaaatggtgtttctggttctacatccttgaggaatcgccaactgtcttccacaatagttgaactaatttacactcccactaacagtgtaaaagtgttcctatttctccacatcctctccagcatctgttgtttcctgactttaatgttcgccattctaactggcgtgaaatggtatcttgtggttttgatttgcatttctctaatgaccagtgatgatgagcttttcttcatgtgtttgttggctgcataaatgtcttcttttgagaagtgtctgttcatatgtttcacccactttttgatggggttgttttttcttgtaaatttgtttaagttctttgtagattctggatattagccctttgtcagatggatagattgcaaaaattttctcccgttctgtaggttgtctattcactctgatgatagtttcttttgctttgcagaagctctttagtttaattagatcccatttgtcaattttggtttttgttgccattgcttttggtgttttagtcatgaaatctttgcccatgcctatgtcctcaatggtattgcctaggttttcttctaggatttttatgtgttatgtcttacatttaagtctttaatccatcctgagttaatttttgtataaggtgtaaggaaggggtccagtttcagttttctgcatatgactagccagttttcccaacaccatttgttaagtagggaatcctttccccattgcttgcttttgtcaggtttgtcaaagatcagatcgttgtagatgtgtggtgttatttctgaggcctctgttctgttccattggtctatatatctgttttggtaccagtaccatgctgttttggttactgtagctttgtagtatagtttgaagtcaggtagtgtgatgcctcgagctttgttctttctgcttaggattgtcttggctatacgggctcttttttgggcatgtgcaaagacactcataggctcaaaataaagggatggaggaatatttaccaagcaaatggaaagcaaaaaaaaaaaaaagcaggggttgcgattctagtctctgataaaacagactttaaaccaacaaagataaaaagacaaagaagggcattatataatggtaaagggatcaatgcaacaagaagagctaactctcctaaatatatatgcacccaatacagaagcacccagattcataaagcaagttcttagagacctacaaagagacttagacccccgtacaataatagtgggcgacttaatacccaactgtcaatatcagacagatcgagacagaaaattaacaaggatatccaggagttgaactcagctctggaccaagcggacctaatagacatcgatagaactctccaccccaaatcaacagaatatacactcttctcagcaccacatcacacttattctaaaattgaccacataattggaagtaaaacactcctcagcaaatgcaaaagagcagaaatcataacagtctctcagaccacagtgcaaacaaattagaactcaggattaagaaactcgctcaaaaccacacaactacatggaaaccgaacaacttgctcctgaatgactactgggtaaataatgaaattaaggcagaagtaaataagttctttgaaaccaatgagaacaaagacacaatgtatcagaatctctgggacacagctaaagcagtgtttagaaggaaatttatagcactaaatgcccacaggagaaagcaggaaagatctaaaatcgacaccctaacatcacaattaaaagaactagagaagcaagacgaaacaagttcaaaagctagcagaagacaagaaataactaagatcagagcagaactgaaggagatacagacacggaaaacccctcaaaaaatcagtgaatccaggagctggttgtttgaaaagattaacaaaatagactgctagtcagactaataaagaagaaaagataaaagaatcaaatagacaaaataaaaaatgataaaggtgatatcaccactgatcccacagaaatacaaactaccgtcagagaatactataaacacctctatgcaaataaactagaaaatctagaagaaatggggaaattcctggacacatatagcctcccaagactaaaccaggaaaaagttgaatccctgaatagaccaataacaagttctgaaattgaggcagtacttaatagcctgctaaccaaaaaaaagcccaggaccagacggattcacagccgaattctaccagaggtacaaagaggagctggtaccattccttctgaaactactccaaacaatagaaaaagagagacttctccgtaactcattttatgaggccagcattatcctgataccaaaacctggcagagacacaacaaaaaaagaaaatttcaggccaatatccctgatgaacattgatgcgaaaatcctcagtaaaatcctggcaaaccaaatccagcagcacatcaaaaagcttatccaccatgatcaagtctgcttcatccctgggatgcaaggctgtttcaacagatgcaaatcaataaacataatccatcacataaatagaaccaatgacaaaaaccacatgattatctcaatagatgcagaaaaggcctttgacaaaattcaatagcccctcatgctaaaaactcaacaaactaagtattgatggaacttatctcaaaatagtaaaagctgtttatgacaaacccacagccaatatcatactgaatgggcaaaagctagaagcattccctttgaaaaccagcacaaggcaaggatgtcctctctcactactcctattcaatatagtattggaagttctggccagggcaatcaggcaagagaaataaataagggttattcaaataggaagataggaagtcaaattgtctctgtttgcagatgacatggttgtatatttagaaaaccccatcgtctcagcccaaaatctccttaagctgataagcaacatcagcaaagtcttagcatacaaaatcaatgtgcaaaaatcacaagcattcccatacaccagtaatagacaaacagagaaccaaatcatgagtgaactcccattcacaattggtacaaagagaataaaatacctaggaatacatcttacaagggatgtgaaggacctcttcaaggagaactgccagccactgctcaaggaagtaagaggggacacagacaaatggaaaaacattccatgcttatggatagaagaatcaatatcatgaaaatgaccatactgctctaagtaatttatagattcaatgctatccccatcaagccaccattgactttcttcacagaattagaaaaaataactttgaattttttttttttttttttgagacagagtctcactctgtcacccaggctggagtgcagtggcatgtgatcatagctcacagcaatctcaaactcctgggcttgaatgattgtcccgcctcagcctcctgaggtctcgctatggtgcccaggctggtctcaaactgctgggctaagcgatcctcctgccttagcctcccaaagtgttgggattgtacccatgagtcatggcacctcgccctgacacaaattttaaaggagtcatcaagacagtgcttcaacaagcagttatgaacatgcttgaaataaattaaaaaaaaaggaagttttcagcatagcaaataaataggtaaagaaaaaccaattggaaactttataactgaaaaatacagtaaccaaaataaaatcttaatgggtaaaactgtagcaaaactgacacaaaaaaaagaagacacaaatcatcaggagtaaaataagagatacaggttgagtatccttcatctgagatgcttgggtccaaaaatgtttcggatttcagattttttcagattttagaatatttgcattggttgagcatcccgaattcaaaaacccaaaatctaaaaatgctccagtgagcatttgctttgagtgtcttgttggtactcttaaagtttcagattttggagcatttcggatttcagattatcagatttgggatgctccaccactctggagcctgtggacatgaaaaggatactatttttaaaaatctacagaaataaatttgacaactttgatgaaataaactaagttttcagaaagtacaacatactgcaagtcactcagtatggcatagataatttgaatagtgctacaacttaatagaactttataattttaaaatgaaaataggcccgaatgatttcattggagaattctagcaaaggcttaaagaagaatttacactatttctgtgtagtctctgccagaaaataagggaatacttcctaattcatttatgaaatcagtattattttgctaccaaaagcaaagacaataccaaaaaaaaaaacctaccaataaagaccaactcctttttaagtatagatgtagataatccttaacaaaatgttaatcagtataatccaacggtatataaatagaattaaacacaatgaccaagtggactttattttgggaatgcaagattgattcaacatttgaaaatctgtcaatgtaatctatcaatgtaaccatattaacaggatcatgaagaaaatatatcaaatgctatagaagcatttgacaaaattcaataccatttatgattaaaactcttagaaaactaggaatagaagcaaacttcctcaactggataaagaatatttatagaaaataaacagcatcatacctgatgaaagactgaatgctttccccttatgattggaaacaaggtgacaaggatgcacacactcacaactcttattcaacaaaatattgggagttccacccagcacagtaaaacaagcggggggaaagccctgacaattggaaaaggagaaatgaaacaccttccttttcgcctgtgacgtgatcatctgtttagaaaatcctaagtaatctacaaaaaatctgtggaactaataatgtagcaggatcacaagatacatttaaaaagcaattgaatttctctacactagcaatgaacgtgtgaaaaccataattaaaagtgaaatactatttggaattgctaaaaaaaaagtgaaatacctagatatcagtctaacaagacatgcataggacttgttggatgaaaactattaaatgttgatgaaagaaatcaaagacccaaatgaatggaaagacatactgtgctcatagattggaagactcagcatgttataaatgactattttcctaaaatagatgtaatacaagtttaacaaaatttcagcaggttctttttgtaaatatagacaaaatttttctacgatttatatgaaaagacagaagaaccagagtagctagtttttcatacagttttgaaaaagataaggtgggaggaaacactctatactcaatttcgacttataaagatagcataatcaagacagtgtagtattggcagacagatagacacataggtcagtggaacagactagaaacccagaaatagctccacacaagtaaagccaattgattttgacagacgtacaaaagagactcagtggaggaaagtggcctgttcaaatggtactggcacagttggatagccataggcaacaaaataaaccttgacctaaaccttgtgcaaaaattaactgcaagtggatcatagattctaaatgtaaaccctacaaccataaaacttaaaacatggaaaaaaaaatctctgggacatttgtgattcatttgtatcatggaatcctactcagcaataagaagggaatgtgatgtatatgcaactaatcagaactcttaaagacattatgctgagtgaagaaaagtcagctcgaaaagtcacatatgtatgactgcatttatagaacattcttgaaatgacaaaattatagacatggaggacaaataacagattagttgttgccagggattagggatggggttatgggaacagagagggaagtgaatgtgactataaagcaggtagtctttgtggcgatggaacagttttgtatcttgattgtgattggtggtagtgacacaaatctgcacctgtgataaagcgatacatagctatacacacacactgtactaatgtcagtttcctagttttgattttatattatagtaagatgtaaccatgggagaaactgggtgcagggtacaggggacctcttttgctatctttggaacttcctttgaatctaaaattatttcaaaattaaaaaaaaatttttttaaattatcctagctaaagcatcaagtgaaagttcttaagagaaaaaaagaaaacaagggaagggaaggtacaggatgtctgggaaattgtctgtgacatttaaactggtttttgcccagggggcatttgccaaatctggtttcctttcctcagcatcagagagcattgaggaacctgaggaaataataaggtctttctttctgggatgatgaatctgatacgttcttcctcttcaccttaaagctgagactcagctaaactggaaaccaccaccaatcccaccatccttcaagattgcagggaaagttgattttctgcatgcttcttagtttttaatgtgcatcagaatcacatggaggacttgttaaaacaaagattgctgggcaacatccccagagtgtaagattcagtaggtctggggtgagacttttaaaatttgtacctctaataagtttccagatgatagtgattttgctggtcgggaaccacactgcaaaaattatttgtatagctaaaaccttgtcggagtgaatatgggggcaagatcactgctgagaattttaagcaaccagctgacccttgtataatttgcagtgcgaatttaacgctgtgtaggtgatctaaaaaaaaaacagaaaaagaattccctaagataatttatccccataatggcagtatacatagactggcagtgagtatccccagactcttgtagaagctaacagaaattctctttggagaaactcatctccatcccagagttgaaagttttcctagaaataaaattctaagtaagtagaacaactgtgatagtcaaaaagaaaaacataaagaaactaagcactgtgagcaggactcaacagcagacctgctggaaaataggaataggcagctacagaatatgaagtaagtgtttcatatgtttcaacaaaagttgaaaatatgttccaagattcagaaactataaagactattcaaagagattttttaaaaatagctagaatttatacaattgaaaattatagtagttgaaactttattaaaagtcctcaatagggctgggcgtggtggctcacgcctgtaatcccagcactttgggaggccgaggtgggcggatcacgaggtcaggagatcaagaccatcctggctaacacggcgaaaccccatctctactaaaaatacaaaaaattagccgggtgtagtggcgggtgcctgtagtcccagcagctcgggaggctgaggcaggagaatggcgtgaacccaggaggcggagcttgcagtgagccgagattgcgccactgcactccagcctgggtgacagagccagattccgtctcaaaaaaaaaaaaaaaaatcctcaatagatgaatttaactgcagattatataaactcaaaaaaggaaataatgaactgaataattactcaacaagcattcaagagaaacagttgaaaagtacgaaagagaagttatacatatttaaaaataaatatttatctgaatggttttctgtaagagagaatggtaaacaacagttaaaagaataatggctaagaattttctgcatcttgtgaacaacactaaactatacattgaagaagcacaggaacctaaggtggttaaataaataaatcctcacttagccttgttacaataaaacagcagaacatcaaagacaaagaaaagatctttgatatatctggggaggaagacagatttaccgtgaataaggtcacacccagaagacaggggaacattttcttaaattaaaataaaaatctagaattttatactaagagaataaatccagggaaattcatacgtttcttgcagacaaaaactgagcatttgcaattaggaagtcttcacttgaaatttagaagtgtgtactctaggcatgaagaaagtgactctcagacaggaggccagagatacaagaaagatcaaaaagcataagagtaataaatatcttagtaaatctaaacaaacatttttataaaacagtaatcattttcataggctttaaagcatattaatatatatgtcaatgatagcacgtaagtcagaaggatgaatggagtttctgtaaggtacttgtgaggacagtaaagacacataacttttcagagtctaaagttaatcagtatgtgtgtcataatagcagatagaagaaatagaggtaataacttgtgaaataacatagaggatgaaataagggaaaatatgaaatccaaaaggagaaaaacccagaaacacatagttcacagattaagtagaaaacaacgtgatggatataaatccaaatatatcattaactacattaaatgtaagatgaattaagccccaattagtttgagtggcctactgaatttttaaaatccaactatgtggcctggcatgatggctcacacctatagtcccagaacttcaggaggccgaggcaggtggatcacttgaggtcaagagttcaagaccagcctggccaacatggtgaaaccccgtcttcactaaaaatacaaaaattagctggttctaatggcatgtgcctgtaatcccagctgcttgggaagctgaggcaggagaatcgtttcaacctgggaggtggaggttgcagtgagctgaatttgcaccactacactccagcctgggtgacagagtgagactccgtctcaaaaaaaaaaaaaaaaaaaaaaaaaaaaaaaaaaaaaaatccaactacgtagtttaccaaaaaaaaaaaaaaaaaaagtttaaaatggttgaaagtaaaaggatggaaaaaagatatatcgtgcaaatactaatataggttttaaaggcaaaaatcggattgttttttgcactgataaaaggtaacacttcgatgggaaaatacgattgtaaattccacatatttaatgctgtgactacaaagtatataatgcaaacaaaataccaggaggaaaaagacattcataatcacagttggagggtttttaggcttgtctcattaactgatagaacaagcagagaatacactgacataaaccttgttttacaagtattctttaatctgtttcacatctgtaacatctgtagtcacatcctgtttttcaccactcataattggttttctgtgccttctttgtttttgtttagtcttgcaaacaccaaatagtaaatgccgctatctttatggtttgctaagaataatcagtgataagtgaacataccagagagttcatcatttttgtttgtgttttgagacagggtctcgctcttttacctatgctggagtgcggtggcatgatccaggctcatgcagccttgacctctcgggctcaggtgatcctcccacctcagcctctgaagtgggagctgggactatagatacatgccaccacacctggctaaattttgtattttttaatagagatggagtttcaccatgttgcccaggctggtctcgaacccctgggctcaagcaatgcatccacctcggccttccaaagtggtggggttataggttacactgcacctggccatcaatcttattttttaaaatcttttaattataaaatacacgtaacataaatttattatttgtttagtacatttagaatgttgtgcatccgtcaccactgtatagttccaggacattttcatcaccccaagaggaaaccctgtatccgttacgtagtcactcctcattcccctgtcccatttccttcctggtaagcactaatctgctttttgtctctgggtttgtcttttttggatatttcatgttaattgaatcatagaatatgtacctggtttacttcacttagcataatgtcctcaaggttcatccatattgtagcaggtatcagtactttgtttctatctaccacattttgtttatccagtcattagttgatgaacctttggatgttgctaccttttggctgttgtgaatagtgctgctatgaacatgtgtatccacgtttttgtttgagtatctgttttcagttcttttggatatatacccctgactggaattgctgggtcatatggtaatctatgttttactttttgaggtacccagcaaactgtttttcatagcagttgtaccattttatatttctacccatgtgatatacaaggattctaattatccacatcgtggtcagagcttgttactttctttttgattatattagtagtcatcatagtggatatgaagtggtgccttatggttttgatttgtatttgcctcatggggtaatgatgttgaacatcttgtaacatacttattggctgttttgggtttgtcttttttgttgttgaattgtaagagttctttcctgttttggatacaagacctttgtcagatacatgagttgcaaatattttctcctcttctgtgggttgtctttccactttcttaataatgtcctctgatgtacaaaagtttttaatattggcaaagtctaattcatctggttttcttttgttgcttgtgcctttgatgtcatatctacaaaaccgttgccaaatccagggtctaaaagatttaccctcctatcttttcttctaagtgttttatagttttagttttatattaggtctttgatccattttgagttaatttttgaacatggtataggtaacaggctaatgtattctttgtgcatgttggcaatctagttgtctggcaccatttgttgaagatactgttctttccctcttgtcttgacacccttgtcagaaatcgatgaccattgatatatgggtttacttcgggactttctgttctattccattgatctgcatgtctgtccttatgccagtaccatactgtttttattactgttactgtgtagtacgttttgaagtcagaaagtatgagtcctccggctttatcttataaaaaacccgacttttggttttgctgattcttcttctgttttgcttcattaatttgtgctctcatctcatcttcattattttcttccttttactatattctttgggttgatattactgctcttttcctaattcaaattattatttattagcttattaacttttatctcttaaaaatacgcattttaagtgtgtacattttcttcagtatactgcaccagcggatccacaggttttcattttttaaattaatttatctcagttttcatttttagtagttttctgtttataatttgctgttgtaattcggatacatttagttttgccattttttaaaagcttgttacacatagttttgtaagctgtgatcattttagtgtttaagttctttgcaggtctttttctcttgtctgtgtcaagagtttcttgacagtttggggggctagccctatcagatatcgatatattataaaatgaaaataattaaacattgtgatattggtacaaaggtagaaaatagacagtggaaagaatagagtacccagaaccacccattccctgcctatttgaatactttctatgtgacagaacaccattgcagatcactaaggaaagggcttcaatgacttgtgctaggttaatcggatagacacatgaaaaaaaataaattggataccttcctcacatcgtataaaaatcagttccaggttgaataaatacctctatgtaaaagccaacaactgtataaagcttttaataacataaagagcatattatccatgattttaaggctggaaagattcttaatcaagacacagaaagcatgaaaaggattgatcggttcagctacattgttttggaactcatctttgccagaaatctttataaggggagtgagacagcaagcctccaactagagaagatatttgcaacacataattgagaaaggactgttacaaattaaccgggtttggcagcatgcacctgtaatcccactttcttgggaggctgaggcaccagaatcacttgaacctgggagatgtaggttgcagtgagccgagatcgtgtcactgcactccagcctgggctacaaagtgagactctgtctaaaagaaaaaaaaagaagaaggtgtaaagaactcgaacagttgaactagaaagagacttcaaaaataggaaaactgaaaggaaagtatacagaaaagatgcccagtctccttagtatttaagagaagtgcagactaaaaccaagtgagatattagttacatttaaaagtctgtcaattccatgttggtgttacccctttggaaaattggtttttttatcacctaaaatagttgagcaggtgcttatcctatggcccagcagattaactcgtagataccctagaagttagggtaaataaccctagaaaagcataagcaaatgtgtgggggaggcatctacaagaatgttcatagcaacgttttttatcatagcctaaaattggaaacagcctaaatatccctcagtagtagattagataaactgtggtatattcatgtagtggaatatcattccataggcccaatttgtgaactacagccacacacactctcacacgcatgtatcacagttataaaatcaggtgaaagaagcaaacgcaaaaggatatgtatgccatgatttcttttatatgaagtttggtaagagccaaaaccgaaaaatatgactgggataaatacttagattgtgaagttacaaagaaaagcaaggcaatgatttccacaaactttaggataaatggtacctcttgggtgtgagaggaggagatgattatggggggaattttaagggattggtaatgggtgatggatacactggtgttcattctttttttaagtgtgtgtatatacagaatacactttgttatgtaatagtttttgtaagatgcattttttgtacatttctatgccagttatctgtaatcatgatgaagtggttgattttttttaaaggaaaataaaaataaccaaaatcgataaaaagaaaaagacctgattgattaatattatggaaacagcatcagaccagctacttttatacatgaattctatcgaggaacgtgacccactttttagagttccacttttgtatttccgtacgtctgttgcatattacccctgatcacattaatagggtctccaaattaacatgtccaaaatcagtgtttttatctttttgcttttccagtgtgtcacttgatagtctgtttgttcttggttgactgcccttagttgacttatgactgcctctgtaattaccttataatgatttcattttccttatgttctcagctgttttccacttcccttctcccccaatctcttactgctccacaggacctcatgtccttttctagggtgaaaacagccactgaacatgaattatttcagtttacctttcctaggcttgaatgcttccctgttgctttcagaataatacttatacttttaaaaaaggaaatgtattatagctatcatcactttcacactttaaagcaaataaagtttttaccacttcatactactaacattgctctctcttgtactattatacttctctaagttttcctttctaccctgatgaccgttgtgcatttcttcttccatccttgcctttcttctttctttcccctggggcgtaggggggagcttacatataggtcttccctaaggtgctgtccttagtctgcatctttcttcttactaatttgtatgtaaaatgagaatttatatgacacagtaagtatgttttctacttgggttaataatatcactacccttcctggcatgcagactgaaatttcttgagttctagcttcttcctcattgcctgtatagccagttgactagcaaatttcattgattctttccaaaacttcagaaaattttcctcattttcattgacatgaccagctttatttgccttgcttaatgtcctcagatgtggtttgccagtggtctgtgatgcaaaagtaaattcatcgtacctttttccagctttatttcctgcagtggatcctttatgaaacctgtatgcccagcaaaatggaatatttttctttgacagttgctgtttttgcctctgttctttcctctcactattcattcccttcaccatatcccccatcccttctacctcttttctccttacacaatgagtcttagaaagaaagatacggaagtgaaaattaccttttttcaggccagattcttagcctcaaagatatctgtagcatttcatttgtatcttttctgacccttgtttctgccttgctttaagatgaactttgagtgttttatttctactaactagtttctctatttcttgggatcagggagtcatctttgtgtcccagactcagaagaggaaatcatatactgttcatgtgaattaatggggaacaaatacaaagaaaaaaaccacattttctttttattagcctctattttgggggtggggggtgggaagtgggtaggggtttctaaaatcattaaattttagttaagagcgatcttaccactaatttattccaagaccatagttttatgaacaagaaaaatgtgcctccaaaatttaagtggattccactgtatcacactgctcacgtaatttgtgatttccaaaattttattagttttttttttttttttttttgagatggagtttcactcttgttgcccaggctggagtgcaatggcgtgatcttggctcactgcaacctccacctcccgggttcaaacaattctcctgcctcagcctcctgagtagctgggattacaggcgcctgccaccacgcccagctgatttttgtatttttagtatggacagggtttcaccatgttggccaggctggtctcgaactcctgacttcatgatccgcccacttcggcctcccaaagggttgggattacaggcgtgaaccgccacacctagcgtggtatttattttttagaaatggggcctcgctgtgttgcccagactggagtgcagtagctattcactggcctgaacataatgcactgcagccttgaactcttggcgtctagccatcctcacgcctcagcctcctgagtactgaaaattttaaggtcattttgccttcagtcccacatgggagcaggagtcctaggtgagctggggttgccataaccataattgaatgtgagtcccctggcagaaaggtaacctccttttctttatatgcgctcatagaaattcatttatctattcctatttctcttttctccccacctttggctttggtagctggagctggcaagaaatctttcttattttctgtaatgtgttttataaattatgtgtggtctaatgattatatggttgtaagaaaaataccataaaggaagagtgtttgtccttagttttcatctttagttatccataaaatctgaactctaccctgaaaaatttgtcgtcattgtatttttcatctttcctcgatatctacttgttagttcaatactatcttttatcaattttaatgtactgttccaaagaacatatttgttactgttttcatagggaattgagcagtaggacgtttttcttacagaattaaacttacatttttctccatccactagatggctcaagtgcaccactttggcagctcagattgatccttgcttgctttgcttgtagtttctactttgagtactgtttgctttttaaaaactggatgagcccttacctgaacctagctttacatatatgtgatggcagatttcctcgcattttctgattatttacagacttctgaaaagctggtgaagtgttcttcatatcagtagtaaaaagtgcattacagtgcttagaagattttgttttttgcttttaagttattttagactttaattcaattgccaataatctatttagatttcttcaaactaggcatgcagttaataattcatccatttcttcctgattcatagtcatttggagtcattttccagcacatggtggtacctcaggagtttttgaggcacacggggctatttgcttcagttctgtagtaatatttatttagtgtttttgtgcttggaattgtatggggcagtggagggaaataccaggatgactaaagaggatattttcatcagcagggagctcactgcgttaattcgtttccttaagtttccttttttattattttttatttttattttccctgaaagcacacattggtatcttgagtttttgaagccaaataatgagtataatgaaatggctcattagagcttatgtttgtaaccaaccctgaggagaattttgtttttgacattgaccctgttgatattgcctgaaaaaatttaaaaaaaaaaactgaattctttagaaatattttatgcttatggctttctgttttgagttaagtaaaaaggaaaaggaattaagatttgttgaatgcttatcatgtgccagtttcttacttaatttgatgctctcaataatttggaagacaagtacaaatatctctatttacagatgaagaaactaaggaatcagaagttgcctaggatcaaagaaacagtaagttagagaggcaaactctttgtgatatcaagggttgttttttatttttttgcccaagagaaaataattattttctgaaatggcagaaacatttgtaatatcaactagttggatactttcatatcctaaagacagaaaactccaaacaaaggattgattgcctctcacagttgatctttgagattataaacaaatattcttgccaagctagagcaatcagtcatactggtatctcttttacagatacctttagaatgacagcaaacactataaaattgatttttccagagaaagtgtttgcacctaataatcttatttttcaggaataataactgaattatttcatcagtttgaaaatatagtgtacgatttaaaggagaatggcaagttattgatgtaaatacacattatttacaatattataactagattacattacaaatattgtaacaacaatttgtctttataaaatccccttgatttctctttattgtttaagagtccttgcagctaagccgtgtaaaacaggaaatatggctgtttgccagtgttcttaaggaagcaggagtgaagtaaagcaaacaatacaaaaggggtttgtttaaaggatgtacttaatttctgtgtggctgtggtatcatttttctggctctgttgtctttgtcctttttcactgcaaagttgaaattgtactttcacaactattaaaacaaaaataaccagtaatgcgaactgaacccaaagatatctaagataaatatcctcccatgactgtaaatttgtatcctccatatcaccttagaaattttcgtatgcattgactagatttattgctatttttgttctttttttatgtattatcagatattgccgtcagtactattaccgcatttacacaatgttgccttgtgtggaaattctaaacctttgctaactcttggtaaccaaaataacgataaactaaagagattattatcccatcttttgagagaaatgtaaaattattcatttgtctataaagaatctttgacaaaagtattttttaaagcatattgaatcctagccattttattattattagctgtgtacctaaatgatattttagatatgagtataaggaagacaaactttaggttgtcaaagaatgagcatgtctcatgtgttacagtcatggcatgacagttggattacaattatctcttgatgaatcaacttcatctaaaccttaattgcatattaaattatttagtcatttcctgattcagtaatgagaagtcagaatatatagtaatttactgggtagcatgttacatgccatagtttgcggaatgtacttgatcagtaaagtccacagtaaatcaaagacaaatgagaaaattcttttagaattcagttttttttttcttaatttgaagtcactttaaatgctcttatgtaataagaaaagaaccctaggtatatttaaatacttaacctgctataactttttgttggaaaggaggtagattttttttatgagtatttttttcctatgggaaaaaaaataactttggtgatgcagtatgcctttatctgtgtattgttaaaaactaaactaaacaaaaaaaacccctaagaacctttaaacttaacaaagtttatttgagcaggaaaaaggttctagaagcagacagcactctaagatggttcagaatactaccacttacaactggtgagctgttctaataacagggaaaaataggaaatgtcatacagaaattacctgattggtgcaggttggtgtttgccttatttgggcataatctagcagcttttaacctgggattggctgagactcagatgtgtggttataagggtatactcctaagttaggttataacttgtttacacatcaagctagagtacagttaatagtgtatggaggcagctttgggccaaatctgattgaacagtataaaaataagttttgcaaatatttatccttaccacatgagttacatcctaatattctttattctcttctatttcactaaaaaaaattcaaatccaccaaattcatttcatggcccatcggtgtgttggagctcattagtttggaaaacactgccatatagggttgaaaaattttttttctttttttaccctgttaacaactgactagtctgaaggagctcaaatatttggaaagctttattagtgcagtttagtagctggcttttaaaaaaaaaaaattgctttctagaatcctccctgctacataatcaccaaatgttatttcaatattgttttcctaacttgaaaatttaactgaatgactagaaggtgttggaccaagaaatatctgaagtaccaagcccacaaaggaaaatttaatattgattgaggtatcatggttatttgtgcacccttaaaattaagccaattttagttaatagaagtttcagctgggtgtagtagcgcagcactttgggaggccaaggcaggaggatcacttgaggccaagagtttgagaccagcctgggcaacagaatgagaccccatctatacaattttaaaattaagcaagcttggtggtacacgcctgtagtcctagctattcaggaggctgagatgggaggattgcttaagcccaggagtttggggctgcaagtgagccatgcttgtgccgttgcattccagcctgggtggcagagtgagatcttgtttaaaaattaaaaataaataaataaataaataaataaatacatatatatgtttacatatatatataaatttcaagttaattgtttaaaggatgtcattaaccaaaactaagcatcagtctttggtaatgaaagcattctaaaagtctttcttttagatagattgaaaagtctatcttgcagacaaagataattttattaatcataagtaacattattatgaaaagtatttgtgaatattaataactcagtttcttcacttatgttgagttgctttacatgttttatctttgcataatctgtaaacttgatgtttcgtagttgacagaataagtttacagttagatatataggtaacttttagttcaatgttttaaaaattgtgtcatgagaagtataaataaaattcaacgaaagataccatttcttggccttatataatggcatatatttgaacacttggagatagtggaaaagggcatttcacataaggggacagaggcatcaaggcagaaaagcttaatatggtccaggaataaaacattcaactggatgggctttgttctaaaggcagtttttgagagaagagagaattaaattaacttatattacaatacctacttgctacaggagataatgggtggatttgaagggagtgaaattaggcagagagagtagttaagaaatcattgaaatattttagagaagaaatgagattgaagtaggacagtgtctaaggaaataaaaagtaatttatcaagacagtaaaatcaacacaatttggcagctgattagattaattcaaaaatatttgagtgtgtgctatgcaattctgggaatccaactgtgaacaaaatgcatgctctttacccttacatgtgttttagtccaatgggaagcacagacatttcaattcagggtaatacatgtgctgccatggagaaagactcagtgttgtcttgggagtgagtatactgactgaacttgaagcctcagggatgagtaggtcttgaccaggtaaagttggggttagagtgtgttacagattcctccctgtcctctccccgcatgttggcttggaggtgaaaagattgtggtacttttaaagcagttaattgtggctggatcctgggattggagagggaggaggatctggtaagagagggccagggccaaatcatccagagtcctgaagttcctggaatcccctagttcttggtccacaaccctaatgaagccttggattttatcttaggaacagaaattaactgtggtatgattttaagcaagggagattcagggtcaaaattgcatgttagaagaattattttagctaagaatgtcttagttataagtcagaaacttaagcaaaagacaaagaaagtgacccagaggattcagcatatgcagaggtaggaagtgcggctggacttcacaaagatttggaaccagacatggttcagtatcagatgcgtcctcttctgttgtatcgcatagtgtcttgtctctcatgtctgcttcattgctctgtgtatactgtcttctcttaactatacagctctaacttaacagcctctgaatttctctcccactttcaagtcctctggagagagtctgactggttccttgtcagttgtctacccttggtttaatcagctgtgctaagagggcagggtcatgtagcataaacatggtgcttcaaagccaacccctctcacagttaaggggtatggtgagttgtgggctaggcagaattcttagaaagaaccaacttcagaagatcattttggctgcagaatgaagaattcaggggaagggaactaaaggaaggggacctctttaagagaatacagtaatccaggcagtaggtaatactgccctgaatcaggggtaagtaagaagagaactgatctgtggtagattaaaggttgaatctccagaagtgtatgtagattggatattggagtataaagagtcaaggatagtgtttgtgtttctggcttgaatacctgaatggatgatgatagcaatccctgagctgaagtagcatcgcagcaaatttagtggggattgaagacgaagaatttatttttgtgcacgtgcagagtttgagatagcctcaagacatctaagtggtaatgattagtagacccttgaatatatgcatctatagcagagggaaaagctcaatagtagatacatatttgaaattctttagtgttaagtgataactagagccatgagggtagatgaaattgccatgggagagtgtaacaagacaagagggccaagacagccatgaagagaatctgagggctagcagaggggggaaaatgagcctacagggcagactgggaaggaacagaaaggtgtgagaaaaatccagagtatgcagtgtttttagaaacccaagaaaagtgcttcaggcaggagaatgtggtgaaagtgtcaggtgctgatgagcagcataggaaaaagtcaagttctgtttaggagcaagaagtttgttgatgaccttggtgaatgagcttaatgggattggtgaatatgggaaacaggattgaggactctggcaagtgaagaaatcaaaataaatataaacagtgcttgagctataaggagaaagagtgggtagagatgattatgacagcgaagtaaggtttttatgtattttttaaaatatcagggtcttgatcatatttcagtgctaggagaaagagtgataatcagttgagcaagatcaggagattcttcagggcactattacattgtaatggtgaagagtgaagcaaaagtatgtggaaactagtttagtgaatggaagaagaggtattccctgactttcattttctctaggaagaggttgggattatttacaaataaggtaaagtcgaagacttagggaacaggaggacagtttgtaatagatactgtagaaattagactagtgcaacttgggattttttttttcactagcttaattagaggtcttaaattgaaagcagcaccagtatacatcattgtattggttttgttcagcagtctgattacatgcttatgttgtgctacttcaggttggtacattgagagtaagatattgacatgatggtggtctgactaatggaacatggaatataagctgtggaaggaaagaagtaaaagtgaggactaatagaaaagtgagttgttaaaggcctagaggtcttatgtgcaaagaataagtgacagtaactcagcttgagaggcaggtcctaaaatgagggtaacactaaaggggaatggaccaatagcgtcttaggagattttcctgcatttgcctgcattgctggaagaatggtattgctgataaaagaagtaaacatggaaggaagagcaagttagttttagagggaagaaaagttagatttttactgtttcccctttgagtacctatggatcattcatactgagatgaccaagaggcagttgaaaatataagggagaagccagggctggaaacaaaattgggagattataattgaacccataaatttacaaagaatataaagtggtaaggtctacttagacgctatgtacatttaaggagtaagaaatagagaaaagatgcttacaagctttgagaatttgtgaagaaactcaaaagaggttgaaagggttgaccaagcagatcaccggatttgtgagtggctttccagagggtttagtggagcatgaaaggagattggaaaggtttgaagagtaactgactttctgagagtatgtatattgccaatgaatgatgtattattatatgtgatttttaaaatctccccaatatactgatatttttaaaataactttaatttgcttttttattaaaaaaattattagctatagtctggctttctgaaatagagtatactggtcatttaatttgttaatgcctcaggagtatcatagttatcgattattactcagagctataatatggttgggccctttcaagtgctgttaagaccatttgtttttgtactgaatgccttcagtgtgttgtgtttttcaaggccttctttcccttgtcatttgttgcattaagtcatttgacagtattattcaaggatttttttccccctcgaagcactttactgtgttatagtttataattattggaagcctctgtagatatatctgaggatatgggggttggtggggagtagtatctcctactataatcatacaagacagaatacttctgtggcctctggtcaccaaaatgtatgaagatttctctccaacagacaccaactgggtgtcttctgattcaattctattctgacattgtcttccggaaaacagcatcagatcccacaggatgaggtctcagtcccacaacactgcccccctacttcagatgccagtcacaggcataagttgtagccttgtgtctgactgaatagctataaattggggttcccatgatccgctccttgggttcgattaattttctagagtggctcacagaactcacagaaatacttacatttatccacttattataaaggatattacagagaatacagatgaacagctagatgaacagacaagatgcataacacaaggcgtggagaaggggcatggagttttcatgccttctccagctatgccacgctctgggaacctgcatgtgttaatgttatccagaagcccacaaaacagtcctttagaatttttatggaaacttgtttacttaggaatgattgattaaatcattggccattggtttatcgactcaaccttcagctcctctccccttcctagaggttggagtaggaccgaaagtttcaaccctctaattatgattacaaacagaaaggaatagtaccaacatcaaagaccaaaggtagataagtccatgaagatggggagaaaccagcgcaaaaagtctgaaaattccaaaaaccagaacacctcttctcctccaaaggatcacaactcctcaccagcaaggcaacaaaactggatggagaatgagtttgacggattgacagaagtaggcttcagaaggtgggtactaacaaactcctccaagctaaaggagcatattctaacccaatgtaaggaagctaagaacctggaaaaaaggttagacaaattgctaactagaataacccgcttagagaagaatttaaatgacctgatggaactgaaaaacacagcacgagaactttgtgaagcatacacaagtatcaatagctgaatcgatcaagtggaagaaaggatatcagagattgaagattaactcaatgaaataaagtaagaagaccagattagagagaaaaaaaaaaagagtgaaaagaaacaaataaagcctccaagaaatatggaactatgtgaaaagaccaaatctacgtttgattggtgtacctgaaagtgaccgggagaatggaaccaagttggaaaacactcttcaggatattatccaggagaagttccccaacctagcaaggcaggccagcaacattcaaattcaggaaaatacggagaacaccacaaagatattcctcgagaagagcagccccaagacacataattgccaattcatcaaggttgaaatgaaggaaaaaatcttaagggcagccagagagaaaggtcgggttacccacaaagggaagcccatcagactaacagtgaatctctttggcagaaaccctacaagccagaatagagtgggggctaatattcaacattcttaaagaaaagaattttcaatcgagaatttcatatccagccaaactaagcttaataaactaaggataaataaaatcctttacagacaagcaactgctgagagattttgtcaccaccaggcctgccttataggagctcctgaaggaagcactaaacatggaaaggaacaactggtactagccactgcaaaaacataccaaattgtaaagaccatcaatgctatgaagaaactgcatcaactaatgggcaaaataaccagctagcatcataatgacaggatcaatttcacacataacaatattaaccttaagggtaaacagactaaatgcctccattaaaagacacagactcacagactggcaaattcgttaaagagtcaagacctatcagtgtgctatattcaggagacccatttcacgtgcaaagacacacataagctcaaaataaaggggtggaggaagatttaccaagtaaattgaaagcaaaaaaaaaaaaaaaaaaaaaaaaaaagccagggttgcaatcctagtctctgataaaagagactttagatcaaaagagacaaagaagggcattacataatgggaaagagatgaatgaaacatgaagagctaactatcctaaatatatatgcacctaatacagtagcacccagattcataaagcaagttcttaaagacctagaggcagactcccacacaataatagtgagagactttaacaccccactgtcaatattagatagatcaacgagacagaaaattaacaacgatatccaggagttgaactcagctctggaccaagcagacctaatagacgcctacagaactctccaccccaaatcaacagaatatacgttctcctcagcaccacatcgcacttatactaaaattgaccacataagtggaggtaaaacactcctcagtaaatgcaagagaacagaaatcataacagtctctcagaccacagtgcagtcaaattagagctcaggattaagaaactcactcaaaaacgcacaactacatggaaactgagcaacctgctcctgaatgactactggaaaaataacgaaatgaaagcagaaataaagatgttctttgaaaccagtgagaacaaagacacaatgtaggagaatctctgggacacattttaagcatgcctagaggaaaatttatagcactaaatgcccataagagaaagcaggaaagatccaaaatcgacaccctaacatcacaattaaaagaactagagaagcaagagcaaacaaattcaaaagctagcagaagacaaaaaataactaagatcagagcagaactgaaggagatagagacatgaaaaaccctaaaaaatcaatgaattcaggagctggttttttgaaaagatcaacaaaatagaccgctagccagactaataaagaagaaaagagagaagactcaaatagatacaatagaaaatgataaaggggatatcaccactgatcccacagaaataccaactaccatcagagaatactataaacacctctatgcaaataaactagaaaatctagaagaaatggagaaattcctgaacatatacaccctcccaagactaaaccaggaaaaagttgaatccctgaatagaccaataacaagttctgaaattgaggcagtacttaatagcctgctaaccaaaaaaagcccaggaccagatggattcacagttgaattctaccagaggtacaaagaggagctggtaccattccttctgaaactactccaaacaatagaaaaagagggactcctctgtaactcattttatgaggccagaatcatcctgataccaaaacctggcagagacacaataaaaaaacaaaatttcaggccaatatccctgatgaacattgatgtgaaaatcctcaataaaataccggcaaaccaaatccagcagcacatcaaaaagcttatccaccatgatcaagtctgcttcatccctgggatgcgaggctggttcaacatatgcaaatcaataaacataatccatcattataaacagaaccaatgacaaaaaccacatgattatctgaatagatgcagaaaaggcctttgacaaaattcagcagcccctcatgctaaatactctcaataaactaggtattgatggaacatatctcaaaataataagagctatttatgacaaacccacagccaatattgtactgattgggcaaaaacgggaagcattctgtttgaaaaccggcacaagacaaggatgcactctctcaccactcctattcaacatagtattggaagttctggccagggcaatcaggcaagagaaagaaataaagggtattcagttaggaaaagtggaattcaaattgtctctgtttgcagatgacatgattgtatatttaaaaaaaccccattgtctcagcccaaatcttaagctgataagcaacatcaacaaagtctcaggatacaaaatcaatgtgcaaaaatcacaaacattcctatacatcaataacagacagacagccaaatcatgagtgaactcccattcacagttgctacaaagagagtaaaataaaatacctaggtatgcaccttacaagggatgtgaaggaactcttcaaggagaactacaaaacattgctcaaggaaataagaggggacacaaacaaatggaaaaacattccatgcccatggataggaagaatcagtatcatgaaaatggccatactgcccaaaataatttgtagattcattgatatccccatcaaagtaccattgactttcttcacagaattagaagaaactactttaaatttcatatggaaccaaaatagagcccacatagccaagacaatcctaagcaaaaagaacaaaattggaggcatcatgctacctgacttcaaactatactacaaggctacagtaactaaaacagtatggtactgataccaaaacagatatatagaccaatggaacagaacagcagcctcagaaataacaccacacgtctacaaccatatgatctttgacaaacctacaaaaacaagcagtggggaaaggattccctgtttaatagatggtgttgggaaaactggctagccatatgcagaaagctgaaactggattccttccttacaccttatacaaaaattaactcaagatggattaaagacttaaatgtaagacctaaaaccataaaaatcctagaggaaaacctaggcagtaccattcaggacataggcatgggcaaagatttcatgactaaatcaccaaaagcaattgcaacaaaagccaaaattgataaatggtatctgattaaagagtttctgcacagcaaaagaaactatcatcagagtgaacaagcagcctacagaatgggagaaaatttttgcaatctatccatctgacaaagcgctaatatccagaatctacaaagaacttaaacaaatttacaagaaaaaagcaaccccatcaaaaagcaggcgaagcatatgaagagacacttctcaaaagaagacatttatgcagccaacaaacatatgaaaaaatgctcatcatcactggtcattagagaaatgcaaatcagaaaccacaatgagataccatctcactccagttagaatggcaatcattaaaaaatcaggaaacagatgctggagaaataggaacacttttgcactgttggtgggagtgtaaattagttcaaccattgtggaagacagtgtggcaattcctcaaggatctagagctagaaatactatttgacccagcaatcccattactggttacatacccaaaggattataaatcattctactataaagacacatgcacatgtatgtttattgtgtcactgtccacaatagcaatgactgggaaccaacccaaatgcccaacagtgatagactggataaagagaatgtggcacatatacatcatggaatactccacagccataaaaaggatgagttcatgtcctttgcagggacatgggtgaagctggaaaccatgattctcagcaaactaacaaaagaacagaaaaccaaacaccgcatgttgccacttctaagtgggagttgaacaatgggaacacatggacacagggaggggaacatcacacaccagggcctgtcaggggtttgggggagggatagcattaggagaaatacctaatgtagatgacgtgttgatgggtgcagcaaaccaccatggcacatgtatacctatgtaacagacctgcacattctgcacatgtaccccagaacttaaagtataatttaaaaaaaaaatacatttcttggacccgtggtagaaagactgatcactatatccagatatccactccctcactgctcttggtcaattgaacccttcaacttttagttgggtacatggctactttgcggtaagatgtgactgtggtgtgtgagccaagctaatttgcgcagaaggaattgtgtagcttgcaagtcatatcctcagaagagaagatgctcacccttgtcttctttccacccctcccctggattggagaagagatacgttattgcccaccacatgggcagtaactccctaggaggtgacagagcaacaggataaaaggaacctgggtccttggataacttcatgaaatagagttgccttttctctgtggctctcccacttaactctggactattatatgagaaataaataaactaaattgtttgaaaaataaataaaagatgaatagggagggagtgactacaaaagttgcttatcaggaattctaattggtttacagaaataacattggttaatgattttctatacattgttaaattgtaaggtgtgtggcattttatgtcttcttgaggtcagttagtctagagcttgaatagcaagtggcttcaaggggtaattatttacctcaagggagaatgaggcatgactgctgttagattttaaatacctttttgggactgataacttaggcccatattccttagataaaaagcttttcttcccccctccctccgcaacctttactccttgtggtcaaaaatctttcttctcgaaagcattgttaatcaaaatctaagtgtcatgatgtcccttgtcaccaggaagtctcactcccaggtagtgctgtcccatgttgatgagggaggaggaaatgtctcagtgaggaattttaagagttcccaaaagctgacttaggatggcatcacagagtggcagaaatgagacctcagttaagtcattgatttatgtaagtcattgcttgttgaatcatccctagtctttggaatcccatgattttagtttcctccaaagtaaaacaatgagagatacataacagttaagaatttgtattgcagaaatataatgcacacattgactacaatcaaaaagtgaatttacatgtcagaatgaaaaaagaacctattcattagggagccaacaacaaaatcttgaaaaaaattaaaacctggttcttctttacagactggttgtagccaggaaataattcaggatttagtccaagtggtagacaaataagaaaactcaaaaacaatggtcaggctagaatctaataacaggtgtgttatagttttcttatgaaacgtgatttttctgtctctagtctcccttttatttttttaaaatacataattatatatatataaaatgtatacatttatacttagaaattttttctttagtaacaatctcactctgtcactcaggctgttgtgcagtggcatgattatagctcattgcagccttgaattcctgggctcaagtgatcctccacctcagccgtgagtagctgggcttacaggcacaagccactacacccatccagtgcctcttttctaccgaagagaaatagaccaatttatttgcaaaaaaagttttagagttattatacttggcctgatttatttgcataaagtgcagcaagagtagtgattggtcatatagactagttggctttgcctgaaactttttcgttagaaattttggattagacttttggaaacttctcaagtctaagaagtcaagccagggattaaccatcagcctgtgcctgtaatactttcacagtttggtgaattcttctcttcttgaagtcccaaaatattttgatattcctgaaactctcagaaagtgacattctttacataccgcaagtcaggattcttgtaagggaacagtatagacaacttattaggtcaagtctttccaaggggctttttattggctctataaagtcaaccttaattcctcaaagtagtttgatcatatgctgttccagttaaaccttggtacaataaccagtgtctccaatgcgtcctcttacaaaacaaagaaaatattgcacttatacaaacaactatattgtcataaatgtcataaaataagaatattcacaaatagttcccaaattctggagaaaatcaggtaaagaggaaggtaaatgtttcacttttccccacaaaagtatactttacctaattgctatgagctataaatggctcaaaaaaaatgtggactctggcaaaacaaatatgagaagaatcaacaatgtttcaaacaaaaagtgattaaaaaatcatttcagtcctctatcagttcagtcccatgtaattaattcctgttctgtttcatgttggcttagcaatcttcattaacacatcagttttttattcgaattttggaaatttttacctagtccaatggtatcatctccatagttatctgaaacctgtattcaagaatacttgaatatggtacaaactcgtattcaaagtcctttccacgaatttctttgaagacacacattttaggatttggagggaaacaaagctcttaaaaaaaaaaaaaaaaaaaaacagactagatgcagtggctcacgcctgtaatcccagcactttgggaggctgaggtgagcggatcatgaggtcagtagttcgagaccagcctgaccaacatgatgaaacaccgtctttaataaaaatacaaaaattagccgggcatggtggtgcgcacctgtaatcccagctacccgggaggctgaggcaggagaatcacttgaacctgggaggcggatgttgcagtgagctgagatcatgccattgtactccaccctgggcaacagagcgagactccgtctcaaaaaaaagacatgagaataaaacagtttactgcatataccaaggcatatcagatgtttaggaattgcatacaattttggaacacatatcaatacaactgtaactcaaagaaagctgaacactatttcttgtctgacagtgctttccatgtttgaaatttgatttgggggaactgtatcagatatcaaaggtttaaaacactagatatggccgggcgtggtggctgacacctgtaatcccagcactttgggaggctgaggcaggcagatcacctgaggtcaggggttcgagaccagcctagctaacatggtgaaaccccatatctactaaaagtacaaaaaaattagccgggcgtggtggcatgcacctgaatgtgagctacttgggaggctgaggcaagagaatcacttgaacccaggaggaggaggttgcagtgagccaagatcacgccagtgcgctccagcatgggcgacagagcagggctcccatctaaaaaaaataaataaataaatgtaaattaaacagatatcaagataagaaaggtttgaaatgctcagtgttaaaataggatcacaggtcattgtaaaacagtcatttaaacaaagtgataagtcagtgatttttaaaaagtcaaaacctgtgctctttgattagcaggagactccatcaaagagtaagtttgaggagactgtatcaaagagtaagactccatcaaagactcacttttccaaataagacctaataaaggcagcatgagctcaagaaaatctctctctccctccttttcttttgtagtttactcaaaagtaaacaaaaccttttactatctcctgttaacactacctgaaaatcttgttcaaaagagaaaacgaaatcctacctttgtatcagtatattattaatattaaacctaattttaataaaatcttacaataaacagatccatctgatcccagtcagctttgaccagataagattttcatgaatcttttataaactcttacaattttattttttctttctccaactttttagttttagctatatcatgtaaattttgaaacaatctttaacctctaaactaggcaaaattacttttcctttagcaaaactcacaccctcctctcttttttataactttcttcaccaaaaacacatcctactttcattgtatactttgcatacaagagtgtttcccatgtatctagtacttttaattacatatattaactacgattttaactcttagtagttctaatttcaagtgaaaaacctagaaagtaagtagtagttaactggtttatgtctgtatttgtagacaaatcatttcatggtttcgtagaaagatatttctataaaatataattgatgcctacttttttgtttattaacagatctaaagattattaacagatctaaatatatttagcttttttataccatgtaaaaacaaaataccaaattatgtaaactaaactaaaacatatctaataattaatgtttttgtatcttaatgtatgtagaaatgactcaaacattttatgattatctattactttattaaacctaacatgacttcaaaactttaaactactgaaaagaattttgaaactgcaacacagatacccttcctaatgtcttcctcagtcatactgagtcgcaactacccacgtggcacccaagtatgattatgaaggggcagggcctatctgagtcctgattttacacacccataatggagcccaggacagaggacagaactgtgaagataatgtctgactcttcccaccatagccaggagacaacagccaggccagagggagtaccacatatgtctgcagtcctcacttgttagagcccagaatctaatgagtctaatacataagctcacagacaagtcaaataagcatcaaacatatcacagaagcaatagttttatgagcttcagacatctagtagagaaagcctaaacctttctgaccagcagacccaggcaaaaatgtctgattgtgtttaaaactgacaagtctgaagacattctaattttattttaccaacaattaaaaagctaattttatttctcaaagattactaaaatcacattaacttgaaaaatatttgggattattaagctatgagcattaatttgtcagtttggtaccatgtaaacaatatacaaacagatctgtacacatatatacataaaaatacaaacataagtgaagatttcatagctttgatataaaaattctagccatgagacaagtaaaactcgctattttaaaaggacattggattcaaagttcataaatagaacaagttcaagtttattgtatatgcctgaagcccttaccaagttttaaataacaagtagcaaatttatatttcaagcacagagaatttaagctttccaaaaggccaattcaattttacgttatctttggcaaaaatcatgttaacagaatccaaaagagtaaaacataaaggcctttcttctacaaaaaaaaaatattttatatattttttatatattatatatctttatatatacttatatataatatatattatatatatgactcaggctagctatatatatacagctgtgtgtatatatacatatatacacattcaggctagctatgtgtatatatatagctatgtgtatatatatatatgtatatatatatagctatgtgtatatatatatgtatatatatatagatagcctgaatgtcagcttttaattaagctaatttctggctatagacctctttcaaagaaaaaaaaatattttcaagtttcttaacagattttagctggaataaacagccaatattcctggcttttgactttttttttctttttaaccaagggtacctttccaagtgactcaccaaaaccaataagccttaagaaaaatttttatgacttgaccaaggatgcacaagccatctccaaagaggtgcaaagcaagccctcacaagatccagaaccaccccaaagacagtttaaataatgaaagtcttggtagccacaaataaggtgcaaatccacatttttgcttgactgtactctctagggtttcagctgatggcagacagaagaagacaggaaatcaaaagctgttcatggaagggaaaaggatcagtaacaaatgggtaccctaaagggtcaagagtcatattaatattgtaataattgaaaatattcaaattcttgtaaatgtttctctcctaagctaaagatattaaccaaagaaaggaattttttgttgttctaaagaattttaactctgttttagatcttatctcagctggaatgctgcttggctaattccctgcatgttaacatttcaaacacatgataagatttatctctccaaggtactgtgaactccagctgggcattaaaggatatcatcagtgccattcattagtcctggttttgaaaaaaaaaagttgttagatctgtatttttataatctcagtagtttcattctcattttttagttgcactgtttgctccttttgttccaaatttaaatacatttctctcttttagactattaattttccagttacccattttattgccctaagtagttgttaggttcttctaaagggatgacacttaacatgaaatatgtagaaaaaatatataactcaaaagtccagagctgaaatccaaggaagaaggatgtaggtaaaagccagttaagacaagatggcctggcccagtgccgtggctcatgcctgcaatcccagcactttgggaggccaaggcaggtggatcacttgaggtcagtgagactagcctggccaacatgatgagatcccgtctctactaaaaatacaaaaattagccaggtgtggtagcgggcacctgtaatcccagctgcgtgggagggtgaggcagaagaatcgcttgagccggagagtcagaggttgcagtgagccgagatcacgctagtgcactccagcctgggcgacagagcgagacagtctcaaaaaataaaaagacaagatggcctgaaaagcaccttcaccaaagacttatgtaaatgtaagccaatggtaagtttctagtgactcagcactccctctccaggtacagtgaggtaaagacccttacaaatgaagatttcttttgtagatgtaaatttcttttataaatagccaactaaatgacagaaagctgtattttggacactgattttgttgaatgggtggtctttttatgttcacttttgttagcttaaaaattactgagttcagctgggaaagcccattaagaaaaagggcaaaaaaagcataatatatgtgtggactcagcatggatagctctgataaagaagcaagcctgaagggttacccctaggttaaagacctcttctaaaaaagaagggtttgaaagaacagcccaaataaaatgtacaccttcaaccaaagagtggtataggtccagattattagtaggacttttgtccaataatttatcttggaattggaagaacatgagagtttcatagttggccaggtgccaagtccaggaatggctaagggtggcttactgtgaatcctgctcacagtgccagaaatgtcaacctaaagggaagaaaatgaggcatagttaatacagataatgtatttgggccaaggttgaggactgcagcctaggacacacttccaagtggtcttggggagtgctccagagaacagaagagaggctcatatttttagagaaaaaaaggatgaatcaggaaagggattgattgcaaaaaggtattcatcaggaattcttgttggtttacagaaataacattggttatttattgtctatacattgttgaactatagtgtatatggcattttatgactacttggggtcagttagtctagagcttccatagcatgtggcttcaagaggtaattatttagctcaaggggtagtgagacatgactactgtacatttaaaatgcctctctgggcctgataatttaaaggggctcgaattccatagagcaaaagttttttttgttttgtttttcataaccctcatgtttagttaacattgctgacattcatgaatcaaaaaacccaaaccacaaaaaaacaagctatttttattatcacttctgctacctagcatgtcaggcagtcatgttatgtttaaattgccttcaaatggtttcaggaacttttcccatatgtatgttattgaaccactccagaaaatcgtaaatcccttttgtagaggaagagatgattagacgagaaatacttagtgtctggcacagatttatacagaaaaaaatttttgtttttagtttctggtctttgttgttactttgttggtagtaaaaaatgagttttttttttaattagccaggctttaggccttatccagtgaaggacaacttgaagatgagatagagcataaaattcaagctatttctagagattgatacaggttcattagctggacaattaaactttttacttgtcttgcaagtcttcaacttagatttgtcatatttggttatcataatcaaatggaaatagtagtttttgccccatcttgctgagcttttagattttgagatcatttgtaacatactctgaaattcagtgaattttatttttttctgctgggggcaggcacatttaattacagaaagccatttgccatggaatctttttttctaaaaactacctagcgttaaaaaaaaatctgatcataattacgttgctagcaagataaactagcaataagtatatgtggtatcaactaatatgaaaaaaattatctgtaaaatgcatctgggacacttctcatttgctattcttaatttgcagttttaggaattgtctcgtggtggttgaatgtgatcagcattttcttttatgagcctgggagtcttattagtgaaagatttggcaaaagttagaagaaaatgtcaggcattcgggtcttctcaaggaatgagatttttcagtatgtaaccaatttttttggataggcaaagatttaacccaagtagtacactgtacaaaggtgcctttaaaactcagcattctttcttgtgtaaaacctcataaaaattttatggaaatttatgggtatcaatttttcttagatttaaaattaaaatagcttttgagtaccttgggaaatagtatattcttacaaagtagatgacctatttattcagttgaatgtccttgtgaaaattgacgttgctttactgacactaataatctacatgcagttgagcaagcccagaagccaactttggaatattttgaaatgtttaccattttgagtacaaagtaattttagaatcttggataccagctcactgaagtgttatggtaatatcatacccatatcatttccgttacttatatttgttattgtttaaacagtagccaaaaatggccaggcacggtggctcacatctgtaatcccattactttcggaggccaaggcaggaggattgcttgagaccaaggagttcaaggccagtgggccatatagcaagacctcatctccattgaaatatatatattttaaagtagccagaaacatgtacttactttactgccaaggatatggctgtaaagtcttgagatctttaataaataacttgaatgtctgaatgacttggaaacaagttctgaattagcttactgatttcatgtgtctggcgctatttagctaaatccaccctcctcaaaatgtagaaattgttaagggacagtttcttgttgagacagtttctgtcttagcatcattttgtggttagaatgtagtaaacctactcaaataagcccaattaagaattaaatctattttatgaataggtctttaaaaacccaattgcagaactacaaaccaggcctctttctcccctttgtgggtgggggtcagattctcctagaagagagggcaaactaggtatgattagtatacctgctagaaagaacagttaagtggccagggcaaacaaagttgtctcttggctgtaataatttttttctggactcatgggcaactaaagaaacatgctaattatactgatgcttaaaggatttgccctctattacggagggtctgtgggagtagaactgtaacctcttctttataagcgagtagtacagaaaagggagaaggagaaagaagaatcctaaatatggaggggaatcatctggaaagagctcagattaatttttataaaattgtgtaagattttataagattatatatttttataagattataacctcttcctggaagcctcatttttaaactgcttatggtagtgacattttattatacatgaatttaacttttgaatatccagctgtacctgtcttgacagataaaatgacagtttcagtagtacagacaattctgcccatcctaggaagcttatgcccttgcagatgagaatctgctgttctctcttagtttgtacatgtctcccgtcagatgagcatgtcatatgtagtgtaaatactttaaataaaatcatggccctgaatgttattgtactaaatgttacattatgatttaaggagattttcggggtaattttgactatgtcagttttgtggattatttggaagagtggaattttgtgcactctgggctcgagtctaaagttagtgtgtaaagccaaagtcagaatcacccttgaaagttcctcaactcataaaagccaatatgaaatcttttgtgtacatatacactcttgagcattaattcttacacacatttaaattggagagtgactaagctagactgaaaggcaaaaggaaagtatacaggtgttgtatattcattcagctttaaacatggtataggtagggaattctaaaatgttccttcttgcctgccagctttacttcattttgttttaataataaactctagaatcttaattcttactaatcgtgtatttgttgtgggaatttcaggagctcgttagcctcacctttctgtgagatagcttctgaaatcagttggctaaattctaaggttagccattaagtaggtttatgataaaactttgttttattgtagttttcattatttcccttttcttttgctttagtattttagtaacatcacttttaagatgttactcatctcaaaggaggcaaaggaagagatttggtatcaagtccttcattcaactaaagtagaaagagagggaagtagtatgcccctctaggctggtggttgctgtgggaatcaatgtaaaaacccctttaagaggataaaaatgggacagttaactggaaacttaccaatgagacattctctttctagagctttttcttttctagcatgttccccccagttttaagaagataacccacactcttatctgtttcttcagtatataatctcaattgtgagattacaaaataatttctctttaataatatgcccaggtgagaatgggagtaaaattctggttttctttatttggtgctagtgtcagcagtgactgaaacataggctgtctcagtctgggccctgtagtacaatgctcagacctaggctggcttactcttcatatggctctactaccttagtatagaggaggaaccgtaaagtccaagattgggcacttcattcacaccacttagtaggcagtctcctaaggaaagaagaaaagtgtatgtccggagagacataaatggctagtcagccatagttttttggggggaaaggaggaaggggagagtaccctaggatgcaccctatatttcacatattgtttctactacttttggttaaattgtagacaagtctgttgttggaataggccttcttagtgcaggacatagtggtatttctgtattaattacttaaaatatagttgaaaaatgaactttgagaatacctagaactgaaatagatgcatttgtatggtggcagctgagatctgatctaaaggccagttgagggctaataaggagtgaggttaaatttaagcttattactcttttaggaaaatgatgtgagttagggttgaggccaagaaattcttactatattctgaaagtagtgagacttcattcgttagagctaacctcatagtgctcactatgagcactcaccttaaaggttattatctgcctcttgaagaagcacttactcagcggatcctgtaacatgtggttctgccactttgtccataactgattagaccagggcaagcctctggctcaaggctaatggcttatgaagtggcctggtatgaaaactgcataaacagcaataacaagattaatcatctttctctttctctttctctcctgtaaactactccttgagaggagaaagacaggcaattcataatgggaatttaaaataacagtttgttcacttgttcattggttcattcaacacttttttgaatgtctgctgttagccaggtactactcaaggcactggtgatttattcatgaacagaacaaaattcatgctttcatggaacttgggtttgagtgggacagataataaccatgtactagaatgttagcaatggtaagtgatatgaagaaaaatgaagtgggttgaggggagagagtgtgcttaaaggggaatttagataggctagtcaagtaaggcatctctgaggagctgtattaagagatttattatacggaattagttcatgtgggtatggaggttcataggtcccaagatctgcagcttgcaagctgaagaccctggatagctgatggtgtagcaccagtttgagtccaaaggcctgagaaccagaacaccgaatgtagtttcagtccaaaggccagtaggctcaagatctaggaagagctgatgtttcagtttgagtctaaaggcaggaaaacaccaatgtccaagctcaaggcaggcaggaagagttcccacttattcatactttttgttttattcagggcttctactgattgaatgaggcccacccacatcacagagtgcagtcagctttactcagtctgtttatttatataaatgttaaaattatccaaaacaccttcacagaaacacccagaataatgtttaaccaaatatatgggcaccctgtgtcctaggcaagttgatgcataaaattaactgtcatagataggtctattggtagccaaagaaccaggttaagtaaaaatagataggctctaagttacctcagtgacttattgccaggattgcctgatgattacagctgtcttaaattctgaaccttgttgtattacctgaattattttccagggtctctaaagtctggctatatggttgcattgaacttattcttttctccttaagtatgttttatgtaactagtttaacctgtgtgtttctacattcaggcttgacagcctagccattttatggacggggcggagcgggggcggtcagcctgatatataaagatatcacagaaataaaccttgagtcataaaaacctaatatagccgcccccctttactaatgaagagaaacactggtaaagacacatgaaacaatttattaagtaatttgttactttaaaaagatttacattttggttaacttttttagcagttgtttgttctaactctgtgaagagcctgttttggaaatctgaaaatgtaggagatgcagctattgtcctcagaaagaccatagtctgataataaaatctgcataagtaaatatacagcaaagtagtttagatgagaatttaggttagagctggtttgaatggaaaaggcttatgaagatcacatttaagctagtcttagacaaaatttggatagatacaaaagagtgttaaaaatatttcatgaaagggaaagggaaatgaacaaatgagatacatcagagtttgggggatggtagtttagctgtgttgacatggttgtagtcttcttgctgtaggagtagtaacaggtgagatttgaaagttaaagccgaacctcagtatttccatacttttggttgcacattaattcttttgagcctcagattattccatctgttaactgggataataatgccaatatttgttcatatgttttaatcagttacatctaaattctataacaagagttcctttgtttttaatctcagaagccttctaagtagggaaatgagtcatcagaaaccatggcatttccttctcacacatactcttgctgttcaagcttcatgatggagagatcagtatatcaaatgcatcctctataaatctcaccagtatccttaatgcccttatcttggtgaatgtggaaaaactcaaagtgctttttttctgttctctcaacacaacaatcacagaagacttatgtgatcaaatgttgcatagggggagttccccacacaccaagcaagcgatcagttttgcagcagatgcctgctaagtgtcttccaattccattctgacactagttacctggagatagcatgagatctcacaagtcgagggcccagtcccctcccaccgccaccagataccagtctcaggtctggaacttctgactggctccaagttgaggttcccatgcccctctctttgggttagattaatttgctagagcagctttacaaaactgagggaaacacctttaccagtttattataaaggatattacaaaggatgcagataatgagatgcatagggtaaggtatgggggaaggaacacagagcttccagaccttcccagggcacgccatcttccagaatcctccacgtgttcagctatccgaaagttccctgaaccctgtcctcttgagcctttcatggagatttattggataggcatgattgacaaccatgtggaaatgggattggacaaaaagggtataatctaatactaacaggccgagtggagaaacccacaagcctgtctgtccaaattcttcttagcctttctgtgcagcattcctttctcaagggtgtgggacaggaccacttctgaaatgagagtcttatgacctgcagtcagaaaggcaggggaagattagactcttgccttgagctggtgaaaggaggatgggaaaatcagagagagagattctgttttctgaggcctggagcaccccaacatcataaccaaagtctgtaacaaggtatatgggagttaagagccgggagctgtggatgaaaacctatatatatgttccctatatatacaatacatagaattatatatatgttattatctaatatgtaatagatatataatatcacacttggaaattgcactttttctcagtcttttgatgatacttttttatggtagtgacacactaatatctccatccgtatggccacacatgtgctctggatcccattcttttcttcctttttggaaataatatgctatctgagaaacctattttctttctcattcccccattctcactcttcctctctttattggatcctttttgttagcatataaacatgttcaggttgtctctatgttatatgtgttatactatgctatatcatatatactatataatctaattatcctcccttgaccatttactcctctttatctatttcatctttggtcttctttgttaaacttctctaaagaagtagctatatccagtttccttataaatttcccagttacatggcagctcattttaatctagcttctgctgcgttcgctctactcaaatggcttatttgacacctctgttaaaatcaatgctattagccattttgttctttaaaacactctcttcctttggcttcttcagtatgttcttgttttctgtctaggtctctggctgcatcttctgtggcttccttgtcagctcatctttctccagttgctcattaaatgtggttgttataaagctgaatcttaggtatctttttacttaacgactactcttgaataacttgtctctcattgctccagttacagtgacaactcctacatttatctttcaccgagactactcatctgggatccagttctatatctagataccaaattgatatttccatttgaatgtcttaaagttatctcagactcaacaggtttaagacttacaacttctcttcctccatattctctttatcttcaagattatatttttggactcattgtagtccaaaatttgaaggactcaaattctctaccccttacattgtaaccatagtcaattaatcattctaagattcagtttcataatctgtaagatggaaaaaatgtagtacctttcctaacataaggaaacatcagacaaaatgtgaatatgggatgtaataccacggactagatttaccctctagctgtaaacaaatagaaaaccctcctagggttgttttcagtattaaaatagtatttacaaagcccttgaaacaggaccccatgtaaagtaagatttttttaaagtgtctgctttattgttgaatatggatatgaagttgtcagatgaagcttgcaatgatgcttaaatgcttatattataaaaagcagttctcaaatcagtacttttaagattgcattttaagaaactaaaagaaagaatagctccaaaacaagcaatgagaagaaaataaagataaaataggaagcattgaaatataaaagtgtaaaacattagagaaaagtaagagaaattaaaatcttgtttttttgaaaagatcactaatagtgataaaattctagccagactgattagaaaaaagaagacacaaatgagattaataggaatgaaagaggagagatgagtatagattctatagacattaaattggacaacttagattattaaatgagcaatttccttgaaaaacacaaactaacaaagcctgtttaagaagaaatagttgccaaacagccctatgtttataagagaatgtagatttataattaaaacattccctcaaaaagaaaacaactcatcatagaagacttcactgagatagtctatgaaacatttaaagatgaatatcatttccatacactctttctgaaaataagagggaacactgttgcaactcattttatgtcagcattactctaatatgaaagaaaactacagtccagtattccttataaaatagatggaaaaatcttcaatgaaattttagctagctgaatcaatacataaaaaggataatattttatgaccaagcgggatttattccatgaatgcaagggtggtttaacatttgaaaatcaatcagtgtaattagccatatgaaccaactaagaaagaaaactatatgattatttcagtatattcagaaaagtcatttaacagaattagtaccattaatgataaaaactctcaaactaggatttaaagggaactttctcaacctgtctgtcaaaggacaactagtaaaatcctataatatatatatcatgcttagtgatgaaagactgaatgctttctctcttaagatcatgaacaggcaccacttctattcggcattgtatggaaattatagttagggcagtggagcaagaaaaagaattcaaaggcattcaaattggaaatgaaaaaataaattgcttttgtatacagaaaatcccaatacacaaaaaaagcctactaagatgaataagtgagtctattacaaaatcattatacagaaattcattgcatttctacatactagtaatgggtaattggaaatttaaatacaaacaaattaaaataaaaatattagcattcaaaatcttaatgcttatggagaagttaaacaaaattatgtaaagcctgtatgttagaaattattatacaggcctatggaaacaagtgtcatgtctgtgaatcaaaaaactcaaaattactataataccatttctccccaaattgatgtataccataaatgcaattctagtcaatatctttgcaggccttttttgtaaaaattgacaagcttagttctgatatttatataaaaatacaaaggacctagaatagctgacaattttaaaaaagaacaaagtttaatgacttaaattgcctgattttcacacttactagaaagctacattactcaagacagtgtggtattggccgaaggataaacatattattaatggtatagaaaatagttcagaaataggcccagacacatatatttatctgattttcagcaaaactgctaaggcaattcagtggaggaaactggtaatctttttaacaaatgatttttggacaattggacatctgaatgcaaaacaatgaatcttaacctttaagtgggcaatgatttcttagacatacagaaccaaactgtgaaagaaaaaataaaccagctgtacatcatccaaattaaaaacttttgatcttcaaaagtcactgttaacacaattcctatcaaaatcttagcattattttttgtagacatggacaaatttattctaaaatgtatatagaattatgaagtaactggaaacaattttgagtaagaagaatagagctgaaaaaaatcacaccactagattctaactaagacgtaacatacagcattatactcaggacactgtggtattgatcaaaagatagatcagtgaaacagaattaaaagtccagaagtagacccgtacaagtagagccaactgaagtttgacaaagatgcaaaagtaattcagtggggagaaatgatgctttttgcaacaaatggtattagtataattagataataaccaaagaaataaactttgacttaaaactcttatacaacagttatcatagatctaaatgtaaagtgtgaactataaaacttttataaggaaacaaaagagaagatctttttgatctagggccaggtgaacatttcttgtaccaaatccataaaggagaaaaaaataatgacttgggcttcatcaaaattaaaaacttttactctgtgaaagacactgttaagagcataaaaaggcaagccacagactggaagaaaatacttggaaatcgcatgtctgataaatgtgtatcccgaatatattttaaaagtctctaaactcaacagtaggaaataagacaatgcaattagaaaatgagtaaaacactgaacagacacttcaccaaagagtatatagatgacaaagaagcacatgaaaagatgctcaacatgattagctactaggaaaatgcaaatttaaagccatgatgagatatgacacacgtactagaatggctaaaattaaaagtactggcaaaacgaagagttggtaagaatgtagaggaactagatctttcacacattgctggtggaagtgcaaaatgatacagcactctggaaaacagtttgccagtttcttataaaattaaacatggagttaccatatcttactcctggatatttaccctaaagaattgaaaacttatattcacacaaaaacatgtacacaaagccttagaacagctttgtcatagccagcaaggggtgaatagatagcaaattgtcatacattcatacaatgaataatattcagtaagaaaaagagcaagctattgatataccaacaccttggagaatcttaagggcattatactgagtgaaatagctattcagttcttttccctattataaaaatacggctgtcttcttatgagttttaagcctatatacattccagatacacatcctttgtcagatgttttacaactatttttttcccagtctgtggcttgcctttccattttcttaacagtgtctttttattttgaaataattttaggctcacatagaagttacaaaatattacagtttctgggtacctttcacccagcaacagcatttgacaaaccatagtacaactatcaaaatgaggaaactaacactggtataaaactattaaccaaactagaaattttcctcagatttcaaaagatttaaaagattacttatggtaattttaatttgtataacctttttttttttttgagacagtctcactctgttgcccaggatagcatgcagtagtgctatcatagctcactgcagcctctgactcctgggctgaagtgatccttctgcctcagcctcccaaatagctaggactatagatgtgcactactactgtggcagattttttttttctttcattttttatagagatggggtctctctatgttgcctaggctggtctcgaactcctgggctcaaggagtccttctgtcttggccttccaaagtgccaggattatagatatgagccactactactaacctataactttttaaatgaaaaaaatgatagtgacaaagaacagattagtagttgccgcaggtagacttgggaggagtatgtgattataaagggatggcatgaagatgtttctttgaggtgatggaatagttcagtattctttttttctttttttgagacagagtctcattctgtcacccaggctggagtgcagtggtacgatcttggctcactgcaaccttcgtctccagggttcaagcgattctcctgcctcagcctcccaagtagctgggactacaggcatatgccaccacgcccagctaatttttgtgtttttagtacagacagggtttcaccgtgttagccaggctggtattgaactcctgacctcaagtgatctgccctcctcagcctcccaaagtgctaggattacaggagtgagccactgtaccaggccggaatagttcagtattctgattgtagtggaggttatactaatataaagtatgtgataaatttgtatagaactatacacacacagggcatgtaaaaactggtaaaatctgaggaaagtttctagtttgattaatagttttataccagtgttagtttcctcattttgatagttgtactatggtttgtcagatgttgttgctgggtgaaaggtacccagaaactgtaatatttttgtaacttctatgtgagtctgaaattatttcaaaataaaaagacattgttaagaaaatggaaaggcaagccacagactgggaaaaaatagttgcaaaacatctgacaaaggatgtgtatctagaatgtatagtcttaaaactcataagaagacagccgtatttttacaatagggaaaagaactgaatagctatttcaccaaaaataattacataaacggcatataagcccatgaaaaggtgctcaccttcattagttattaggaaatgtaaatgtaaaccaccatgaaataccactgtacacccactagtatagataaaattaaatggcaatccgaagaatgtggaacaactggacctctcacatgttgctggtgcaaatgaaaaatgatatggcctctttgcaagacagtttgacaatttcttaaaaatgtagggctcagcaattccactcctagataattaaacgaagatgaatgaagaaaaagtgaaattcataccagcatcatttataataaccctaaaactgtaaacagttgaaatgtccaagtggtacgtccacacaatgaaatttattccctagtaaaaggactccagcatggatgaatctcaaaatcattagaacaaatgaaagacgccaaacaaaaattacatgctgtgtgatttcatttatatgcagatctagaaaaggcacaataaccaattcagtggttgctaggagttggggggcaaggggtagagagtggagattgaccatatagggaatgtattgaagtaatgggaatgttttatatcatgattttcctgatgatggttacgtaattgtatacattaatcgaaactcatcaaattgtacagttggtacaatttttaggtcctttgcattcgatttgtttttttctgcctagaaagctctctcctctccctgtctggttgactcatattcagtgttcagatcttgcttaaacgtcatgttgtcaggagtatctgttcctgagcccagactggcataggcttctttgacatcctgccgctttccttcattgtccttaccacagctgtagtttcagtcaggcaggtagccatcagcttaaggtctctttttctgtcctagctgcaacactgtgaggagccagatgctgattaccatcttgttaacagtacgtagcatggtgcttaaatcaggtttgaatattgcatgactgagtataagtgagtagagagttgtgtgtcttctgttcttgtaagtggcagctgtggcttctgccaagggtactactagctggggctgcctgcttaaccttggagcctgtctgcctgcctctgccctgctcctggggagttgtgactatccatgctcatctgcctgccatagcctttgttcagacttcttgtcaccgtgaatcccactcctgtggccgggccaccctgttctgagaacagaaaggagcttttccttgctgttattcttttagcagaaaaggaaacctgccctactgcatgcatgttcctggatctactcaagctttttctttttttccagcaagtggagaaactctgaaacacagtgttttgttacctgctttggtaacaatatatcacctcctgtgaagcaccagagtacccctttgtctcctgattatcttaatctttttgagagagacatatgactcctccaagtaaggttaggaatcctaatctgcaggtagtctgaatgcttgggtggaaggtttaaccttcccaaaggtgaaaacaccatcaactttgtgctcagcctctgctcatatttgcagattatcagagatcattattactgtctccatgtcccccgctgacccagtttccaggataaatgtgtagaataattaataaagggcttgacagccaacactcctcttccactcttcccacttctcttcttccttatttcactactgtagtaggtaagagggaattcaggttatggtaggaaaatgattaggatgaacaatccctgtatgtgagcattgtgtgaacatagctcagtgtttaaatcattaccaaagctcctttctttattatgggctgtccacttaagaagaatttatgagtcttgtcatttcagacagtcttccctggagcactacatgactagtccagttagtgattttagaaatgtttctctggaccttttaaaatgtatccaagtctaattcctcatttgtttctagtttatttgtcctcggttttacagcttacatagtttggagtttcctgtttagttttgtttatttttaactcctttaggcctaagactcttcattgtttctctttcatctgagtcattataatagtctctcaaaagttcatattccactcttgctccccctttctcctgcagtacaatctacatgtcgcagccaaggatcaggtcaaggcattctcatgctctctccagtggctcaccttcttacctagtttgtgatctggccccaggacatgcagactgcctagtaggcaattaatatctgctgaattaattctttgtattgtaagtcatatcaggatttcttgggggttagcattatcttaaaaccacaaaaaacaataactttagacctaattggtttcatgacttattgaggaggcgaggaataggttaaagctgctttgcatacattttggaatagtctcttttgtctagtaaggatggataagtttgttaataaccagtattcacatgggtagaaaaaaagtgtcttgatttttaatcctacaagtagtaaaggaatggtagtcagaagttgaatcgtacttttaatgcctcaggcaggatagaatagtattgttttgttttgtatcccaatatgcctaactacttctctctctctcctttctgttttgcttctcatcctttcacccattacagtctcagtatgtgtgttacaccaggaggttgccttggcaggtcagaggatctgtcacagtgaaggcactgtggtaccctttgttttttaggcaaggatgacacatgctagtcaacttatttccatttgttgttccctccacttggcactaaatgagacttaaccatttttgaatcaaagtttataaatttcttacaaaaattaaggtttttattctctataataagcacatgagaaagactggttttaaattttaaactgtggagtgacgtaaaaacatgtttaattttaattatttgctttcttttgttcgtcttgtaagttattaatgtattaatactggtaacttctagattggaggaatgatttatcctaatgtttcttttttaaaaaaaactatcagtcattcatatggcatatgctaatcaaggctctgcggtattttttttcttatgttttttaatgaagcagctcttttcatgatctagcagtctgtgttactatcagtacgtaaacagtaaggactcaaattttaagattaaaacaagttcattttgttaacatcatgttttgttgcatcttgcagcttcttggtgaatttttggatgaagccattaaattaattgcttgccatcatgagcagaagcaagcgtgacaacaatttttatagtgtagagattggagattctacattcacagtcctgaaacgatatcagaatttaaaacctataggctcaggagctcaaggaatagtatggtaagtgtttacttccaaaaattaggcaaagaatcattaactgctaccttttctcctctcgtaatttagataccttggcaaatatttaacttgctttgaaaaattaaattaaaactaaaaattaaacgaaaactattccacagtaaattgtttgcttcaggatcaatggtcttttctttattattattattaaaggttgagtatcccttatctgaaatgcttaggaccagaagtgtcagattttggaatatttgcattggttgagcattccaaattcaaatcagaaatacttcagtgaacatttcctttgagcatcatgtcagtgcccccaaaatttagattctcgagcattttagatttcatattttcagatttgggataataacctgtattattcataagatacaactctataaactagcactgccatctttaagtataaactatgattaaatacttgggcatagccattgaagacaaatatctctatcagcaaagaataagtggcatgcttgttaatttcatgtatacatgtattcccatagataattgtttaataagaagcttcacttagtcatcactttcacactataatgaagcgtggaatttcagaaatcttattctatactggggaatgaagtcagctaatatctcactgtgtgtgtttcaaaattcatccatatgtttaaaattgatttattagctaatttctacaaaagcctcaggctatatcagcataattctttataaactgaaatgcagatcactctttgggatagttctgatactgattgcagatcactaaattagcataataataaactagtgttttggggaattataagcctcactcaagaataattatatttttattacctcttcttgaaacaaatttcagaatctattctaaacaaaatgtaaactgttaagtatttataatccagtatttctcctaggttctaaaaaaactgttttacatgtgcacagggagtcatgcataggattggtgtttgcagcaccatttataacagcaaaaattggaaatagcatcaaatctatcaacagaagaataaaaaattgtgatacagtcatgctgtgaaatactatataacattttaaacgaactggagccatatgtgtcaacaaggataacctcagaaatgtagtgctgggcttcaaagcaagatgtagaatatatatatacatcattataccatttacatgtagcttaaaatatgcaaagcagtaccatatatttatggattatatatatgtacaaaagattaaaacatgcataaataccaaacttaggatgttgtttatctctgagaaaatagagaaaagaaaggaggtttgacctataatattatatttctttctaaaaaattcagagcaagccgggcgcggtggctcacgcctataatccccgcactttgggaggccgaggtgggtggatcatgaggtcaggagttcaagaccagcctggccaacatggtgaaaccctgtctgtactcaaaatacaaaaattagctgggcatggtggcacatgcctgtaatcccagctacttgggaggcggaggcaggagaatagcttgaacccgggaggtggaggttgtggtgagctgagatggtgtcactgcactccagcctgggtgatagagtgagactccgtctaaaaaaaaaaaaaaaatcagagcaattatggtaacgtattaagatttaataaatttgcataatagaatggcatttattatctttcctgcattcttgaagtaatttacaatatcaaaaattatagaagttggagtcattttgtaagccgttttgactggcctgttctcattgtaaccaaccacatttaaccaaccataaattaaatttaaagaaaatcatattatatagtcagtattaggattctgaaagccagctctctgttcagattttgttttttgttttttgtttttttgtttttttgtttttttttgagacagagtctcactctgtcgcccaggctagagtgcagtggcgtgatcttggctcactgcaagctccgcctcccgggttcacgccattctcccgcctcagcctccggagtagctggggctacaggtgcctgccaccacgcccggctaatttgtgtgtgtgtgtgtgtgtgtgtgtgtgtgtgtgtgtgtgtatttttagtagagacagggtttcaccatgttagccgggatggtctcgatctcctgatctcgtgatctacccgcctcggcctcccaaagtgctgggattacaggcgtgagccactgcgcctggcccttctgtatttattttattgtgtccaaaaggatagaagtaatgtgtttacatagaattattcagcaaatcttttgagtagaatttatatgctttttttttttttgagggagtctaccaggctggagtgcggtggtgcgatcttggctcactgcaacttccgcctcccaggttcaagtgattcccttgccttagcctctcaagtagctgggactacaggtgtgcaccatcacacccagctaatttttttgtattttagtagaggcggagtttcactgtgttggccaggatggtctcgatctcctgacctcatgatccacccaccttgacctcccaaagtgctgggattacaggcgtgagccactgcacccagcctcgtatgcattctttatcctaccttttcttgatggaagtacaaggttaaggatttatttaggctttaggctatctagtggagctaaataattatggatttgtacattgagtgcccacgatgtactaggtggatctttgaggcaacacaacgaacatgcagggtctctgttggcatagtccactgtctatttggatccattagcattttaggaaatagttgcaaaaaaatatatgttgtaatagatatagaagacacatgttgagcgtcatagacttggaagggatccagttacttgtctttggagaaagtgagaaatgtatatgactgtttcatgaattcagtttacagatttttgcttgaagtttttttgtgtgtttttgaatttcttattacagcgcagcttatgatgccattcttgaaagaaatgttgcaatcaagaagctaagccgaccatttcagaatcagactcatgccaagcgggcctacagagagctagttcttatgaaatgtgttaatcacaaaaatgtaagtgaacatttttggtttcctaagtatagatgaaatcaagatttattcatgaatatgtgaatatcaaagactaaatattaggggctttaaattgttctgtattaaaacattgtttaaaagggatatatatatatatatatatatctacagggtgattttcctcaactttattaaattgtatcagaagaatggcttctaaaatttagattatatgatttcctgtcatttaatttacaaaaggagttttaaaaagataagcgtttgagaagaattttattcagcttgatctcatcttctgctttttgttctccgtcaggctgacatttagaaaactgtagcattagcacagagatgaaattgttcccattatgctttgacactctgactttaatcatattgaatataaaatttatatcacttctccctaccccactcccacctctttaagtgatggcagtattcactgatcactttatgatgaggatagtgggtttagcagaaagtgtttgaaactatctagagggtattaacatgtttctaattctattttctaatgattgcaaagataagtctttataaagatatataagttgcactcattttgagaataaacagttatacttttttaaacttacattaagcttattcatacttttgtgattgttctaatggaatgatttcttcagttgaggaaataaactaggagtgaattgtgtaagggacacttttaggcagtcctaaaccgaaggcatctgactaaagacatttcgtagtgtttgtccaaaagagtttatataatataatgagcacagtaccttctgactacagataatacaatttaccacattttgagatctaaatatgtgcaggcctctgtgtattggagttactgggttcattatcaagggaaaaaaaaatcatggaagttcaggattaggccctttatttggggagcttacaatggtgttttgaatacaaaacagacatacagagagttaaatatcaaacatcacaaagcagtggccgtttgtcaaatgatgatggtggcccatatattgaaatctaaaaagagggacgatttctgtgagctttaattaactgggaaggctttggggaggagtagacctaggctgactcttaaagatggggtaaaaattggattgttgaaggaaaggagccttcagagaggaagaatgacgtaaaaaaggtccagagacaaagattaaacttagataataatagggaggaagttgtggtagccattcttgttccaagcgggaacttgatgtgttgctcatcacagttttgctggtggcatcctgtccatggatagagctgctcgtgccccttgtggcctgtgaacgcagttccatggcagtggtggtgttgccttagtttttccttggggaggagttcagttaatcctacctctcaagcctgggtgactgcaaagaaaggtggttccttcaactgcatggagtatgactaagcatgtctcacatgattaggcctctagcaggggtggcagaggtttatccaggcagaactctcagcacctagaagagtgtggacaagagtaggtactcagaatatatttgttcagtgagtgagtataaagctaaatatgggaaaactggaaatggtaactgaattattccactcacccatggatggatgtttttgtagtgttttgccttttaaacaatttcatcctctgtacagattgtctcttcactggtctaagcatctctggtttttctcattcttttcatagatggtcttgagtttcttttttaatcttggccgtttatctctgaacacactttgaaagtgacctagcacacactactgcataagccacctagcacacagtactgcacgtctgatcaaatcctctgagaggagctgaggcatgtcatctcttaactgtagacattaaaaccctgtttagaaatttcgtccccatctgactcccgttgtctttctttgttacaggcctgccttacagttcccatctcacccagtctttatattttttcttttgattatggagaattaagtatagtacttcatgtttctccctattaaatttcaaaggtgaaatgtggttgctcttcctggtctactagtgattgctgtgattgcttttttcttccttgttctgacttttcacttgtgggcttcacttcccagttttgctcaggatatctttgtaatagctggattaattcattagcaacttttgagcatattgcagaaattacgtgtctaactatcacagttatccagctgtttccaattcatcatcttattcacatggatgttattattagaaacattttgtaaaatgccattttgaaatcttcatatactgtgtctggttgcatttttctgatttattgctattgttctttgttgtttttattcatggaaggaaatagtatttctcaatgaacttttacctgctcttggtaattgttacttcttttgaagtagttatataccactactaatcattgacttttgcttggctgtccagtctataactgatataatttcctttatttccctttttgaaaaatgggacaactatctgtttgaatctcttttataacagctttattgaaatataatttctgtgtcatgcaattcacccatttgaagtataccattcagtggtttttagtatattcagtgatatgtgggaccatcactacagtcagttctagaataattttatcacctcaggataaaagaaagaaatcttttatcctttagctgtcattcccctacctcccatccttctcagttctaaacaaccactaatcaatcttctttctgtctctatatgcctttaatatttaatacctctcttctactctagggcttcccagatattaatgagaatagatttagtatttgtccaagtctcctattgtgcattgcatgcggttggtagacttgaacttatttagagcagccagatgctttcttattatcatttccctctcttaaatttgtttggccctttctggtgtattatttttccgaatttattcactgaacaaatatttaaataccttatgtaaagctgaatgcttaaaagaaaaacatcaattctgcccttataaagtttatgcctaaaaaacaaattcccatccccaagtatcatcgtcagcaaacatttttatatgtgtgtcatgtaacttgccatatactaggcagtaaaagtgattaagacacagttgtttctaataaggattctctgtggtagggatgaggctgatgtgaaaatgagactagattacagtgtgctgaataccataacaacattagaagataactggggacaaagtagagagaatagtcaactctgtcaagaactaggagttgtcagaatctacaaaagaggttcacctggaagataattaagttgagtagataaatgacaagcatagggaatagtatgtttaaaagcatcaaaacattttaaaaatgacattcttaaaactagcatagctaaagtatgaagtgtaatataggacttagcaggagatgaagtgagttgatggcatatcatggaggcttttgaatatactgcaagggagtttcagaatatatttgttggctttaaatttttgaggaggtaagtaatatgatcaggtctttcttttaccatattataggcagtaaatggtagctggatttgtagaaaaccatcgttagtgacccttaatcagctcaggccaccataacaaaatactgtacactgggtgtcttaaacaacagagatttatttctcacaattctgtaggctgggaagttcaagatcaagttgctggtcaatttgattcttgatgagggcctgcttcctgacttggaggtggccaacttttcaccttgtcctcatttgcctttcttcagtgtgtgctcaaggagagggagagaaaaattgctcttttcgtcttcccttgttttaggccactaattccattatgagcgccccactctcatgacctaatctaacccttattaccttccaaaggccccatttccaaatactatcacattgggtgctaggagttaaacatatgaattgtgtggggtgtgtgtgtgagggacaatcaatctgtaacactagtgttagaaggaattacagcatgaacagtctagatgttagtcttcaagctgtttatagcacagggaatggaaaaaagagattgaaggtcagattgacagtagaatggacagcattctatgagtatttattatggtgcatatactgaaaaaggagttaaaaatcaccctgagccttcttttgtaaaagagagggcacactggaaaagtaaggggtttgggtaggaatgaaaatgaattcagtgttaccttattttgtgagatgtccatgcaaaaagtgaaaagaaatgggttaaacacaatagtgtgagaagggatatgcttatggatgaaccagtgaaatagactgggaatgaagaaaactgggcaagtgcagtattatgaaaaaccaagggaggaaagggctgagattatatagagatactgaattggaaaagaactggtagaagggatttaagatttgctgataaattatgtagaggtttgtataatgtaagtgcttgataattgactgttcataaatggaattacagataaatgggttacagatactctgtgcctccacctatccatcccctcctccaactcctgcccataaagttgcaatatataaaatgaaagcaattaacttgagcttagaatgtaaagaaagattttaaactgatggtagttttttttaactcatgtatttgtagttcccaaattaaaatattatgaagtaatttctaatttttctgtctctcgacttttattatagataattggccttttgaatgttttcacaccacagaaatccctagaagaatttcaagatgtgtaagtgtaataattaaaattttgttaagttagtacatttttcttagattgctgctggacactttagctgttctcttttttcactcataaagttacatagtcatggagctcatggatgcaaatctttgccaagtgattcagatggagctagatcatgaaagaatgtcctaccttctctatcagatgctgtgtggaatcaagcaccttcattctgctggaattattcatcgggttagtagaagaaactatcgtcatactctttgttttctcattgaggtgaaattcatgtaacaaaattaaccattctaaagtggcatttttagtacattcacagtgctgtacaactaccacccatattaaattctaaaatattttcattacccccaaaaaagtctccatgtttcttaagcagttgtgcatctttgccctggcatgataccagtctgctttctgtgtctatagatttgcctttatgtttccatttatatgaaatacggcgtgatgttttcaagatttctccatgtttaccgtgtatcaatagttcattcctttttatgactgaataatattctatataccatatttcgttcatccattcatccatcgatggacatttgggttatttctacctttcagctattatggatcgtgctatgaaaattcaagcacaaatatttgtttgaatatatattttcagtcctttaggatatacctgtgactggaagtgctgagtcatatggtgattctatagttaactttctgaggaaccatcaaactgcacagtgactgcactattttacattcccactagcagtgtatgcgggttccagtttcttcacatccttgtcagtacttgttatctgactttttaaattctagccatcctaatgggtacgaagtggtgtttcttgtgattttactttgcatctccctaacgactaataatgttgggcatttttcatgtgcttgtggccatttgtgtatcttctttggagaaatgtgtattcaagccctttgctcatttttaaattgggttgtttgtctttttgttgttgttttagcatttctttatgtatttcatacatgaaacctttatcaggtatataatttgtaaatattttctcccattctgtaggttgtctgttcactttgctgatgatttcctttaatgcacaaaaactataattttaatgaaatacaattgtttatttcatcacttgtgcttttggtatcatgtataagaatccattgtcaaacccatggtcatgaagatttagtcttatgggctcttctaagagttttatagtttaagtctcacatgtaggtctttgatctattttgagttaattttttgtctggtatgaggtaaggttccaacttcattcttttgtatgtggcaatttagttgtgccagcaccatttgttagagactactcttaacccattgaatggtcttggcacccctgtcaaaaaacagttggtcatagatacatggtttcatttttggactctcagttctgtttcacatagctcctatgtgcctgaccatgtattatactagtaccacattattttgatcacttttagcttcgtagtaacttgaaatggagaagtatcaattctccagctttattcttttacaatattgttttagcttttcagagccctttgtgatgccatatgaatttgagtatcattctatttctgcagaaagggcaattagaattctaattagtatttcattgcatctgtagattgcttaggtagttttgccatcgtaacaatatttagtcttccaattcacaaacataggatgtcttaccatttccttccttctcttcttttttcttttctttcttttctctccttccctcccttcccccctcccttccccttccttcctttctccaccctctcctctcttcccctcccctcccctcccctcccatttgtcttgtcttgtcttctccattctcagctcactgcaacctctacctcctgggttcaaacaattctcctgccgcagcctcccaagtagctgggattacaggggcctgcccccacgcctggttaatattttgtatttttagtagagacagagtttcaccatgttggtcaggctggtctcgaacccctgacctcaagtgatctgcccgccttggcctcccagagtgctgggattacaggcgtgaaccaccccacctggcctctttcagcactttagatgtatcatccattgctatttgttttgccatggcttccagtgataaatcagctgttaagctcattgaggatcttttataagtgacaaatgcacctctcttgctgctctcaagatgcctttttgtctttcgctttcaacagtttgattatgtgtcttagtgcagatctctttatgtttatccatcttagtattcattcagcagcttggatatgtagattcatgtcttttttgatcaggatggaaggaagctaaaaagaaaaaatagattcatatcttttatcaaatttagcaaattttcagtcattattttcttaaatattttttctgctcatttttctctttcttctccttttggaactcccattatgcaaagttgatatgcttaatggtatgccatgtcttgttttctcctccactttaatgttttgtcccaggcagcattgggctatttacttgccttaaccatgttttcaaggaatgcctctgtctaaccttggaccagggtcccacactgaaaatgtggctgctttcttcaaaatcctttgctagttagggaggcaggtagagccaaagactagttaaaatgctggaaatatttcccaatgttttttccccacctttttattgtagtaaatacatataaaatgtgccattttaaccattaaatctacagttctgtggcattaaatacattcataatgtgcaaccatcaccaccatccatctccagaattcttttcatcttgtgaagatgcaactctccacccaccagacagtaattccctattctcctctccccgcaacccccgacagacatcattctattttatgtctatatgattttggctactataaatacctcatataagcggaatcatgcagtatttgcctccttgcaactggcttatttcacttagcataatgtgctcaaggtttatccatgttgtagcatatgtcagaattttcttccttttcaaggctgaataatattccatttatgtatataccatacttgcttatccattcatcagtcagtggcaattgggttggttccacatttagctcttttgaaaaatgctgctatgaacatggttgtccaaatatctctttgagaccctacttttcagttcatttgggctacagccagaagtggaattgccggatcacatggtcattctttttaacattttgagaaactgccacactgttttccatagcagctgtaccattttacattcccaccagtagtgcagaagggtttcagttattcctcattcttaccaacacttttatttttttcatagtaaccatcctaaagggtgtgaggtggtttcctgtttttaagttgccattttcttggttctgagttcacttgattgccgtaaacctttgaataatttccagaattctgaaaaagtttattctgacactttgatgttttatggtgcttctgtggagctattttggctgacatcactgcctctcatcaaattcttagtatcactgtatttcactgatttatatggagcaatgtaaagtttgtttttgctctgaagtgaagcagtatacaaaataaactgctgttattaccagtcattccaaattgggaattgaatattaccaagttaccaaaattgagtatttgccagaattgttatatatatatatatatatatatatatatatatatatatatatattcagaaatattttatatttttgttctctgggatttttacctgcttttttgctatataatttacatgccatacaatttattcatttaacgtgtaccactcagtgtttattatatttgaagattgtatgctcgttaccacaatcttaactttagaaaattctattgccctaaaagaaactccacatccactcatctttatttcccattcttctgtgttcctttcacctctagccctaagcaaacactaatctactttctgtctttgtatatttgtctattctggacatttcatgtacatagaattatataatatgtgatattttgtgcttggcttattttacctagcataatcttttcaaggttcattcatgtatttattgtgtgtcagttcttcttgtcattttattgacaaatatttcactgtatagatatattgtttatccatttatcacttgattataatttgggttgttaccactgactattacaggtaatgctgacatgaacatttatgtaaaatttttttgtgtgttggtatgttttgtattttagttaaatctagcttattctttgaaaagtattgagaggatttttttttttttttttcctgagagacagaatcttcctctgtcactcaggccaggatgcagtggcgtaatcatagttcacttgcagccttgaactcctgggttcaataggttgaaaagaattttttttttttttttttttttttttgagacagggtctctgtctgtcacccaggcatgagtgcagtagcatgaacatggcttactgcagcctttacctcctgggctcagtgatcatcccacttcagcctcccaagtagctaagactatggacatgtaccaccatgcctggcaaatttttattttttatttttttgtagagacggggtcttgccatattgcccaggctggtcttgtattcctggcttcaagcaatccagctgccttgacctcccaaagtgctgggatcacaggcatgagccatcatgcccagcctggaatttttaaaaattatttaattcagtggaattacatcttccttctgagtcatctgcgtcaaataaccttactcatgtaataaaataaatacagagagagttttcacagtataagacaattatgtcttagggctattggggctttttttttaagtgaacaatcctgctacaggcttatccttaattatcattgtaagtgaattccttgtatattacatatacagctgctctaatcatttgtctaatgcaatctttaaataacataataaaaatctctttaaatgggagagtattttatcttcctgagcccctactcatacagtatgtgaagtagagcagacgagtgaaacttctaggtttgggttgtttgtttcctgagtccttagaccggggcagtaatccaacattgtggaagttcatttgattttagtaaagcacacccctccaaatagaaaggttccagattaatgaggatagcaggtggctggaccagaaaaacagaccaaatggtagaagatagaaaacaatggaaacaacaagaaccacaaaaaacaaacacaaaattacaaaagagcaatatttatggtaatatgttaatcggattagttccttaatttaaaaaggtcagattttggcagcacacaaggctcaacaacaactgcgtatttccataacacaaacattcgtagctaacttcaaaaggctgaaggcagagaggttggcagacatataccaggaaaatgcaaacattaaaacaagggtaactctatttaatgagataaagttgaatatggtggggtcagagaggaagtgttcctctctgagaataaagagtctcgcgttttcaaggtgaaagatactatccaattaggatacacaattatacatgaagtagggttgctatacaaaaagcttaaactgtagaaaatagaagaatggcacaagcacagttgtattgggatattctaacttactcccttagtatcagtacataaagtggtaaaaatgaagtacatctgtagaaaatttcttaatgtgataaagtggagctaatgagatctactggggtctgttatctattatgaagaatctccctttatcttggcttgggctctttgggaaactctagagtggggatacgcatttaagttttttgcaggtggtcttgaggccacgattggtactcatctctctgctctactacttattctagattcacctccacccttggctagtacttctgctagtctgaggttacttacttggtaaaataacctgacctttcatcccttgggggttcagggcaagtcaggattgctactgtgagaccaaagctgacgaggtcccaccatctagatagttgcgggtcactttgtcggaaagagaaagccaagtgatgtgcatggatggctcttctttgcttggaagtgacacacatgacttctgcttagagtgcattgacaaagctagccatagacttgcttaatttgtaaggaaactcggaaatgtggggagagcagacttcagcatagtggtgagccccagcctctgccacagtctgttcttctggctggcaaacattcctttgctccctttattccacaccttcttaagggaaataacccaaagttctattccatcaagacatttatcaaatccaggcattgttcctcttggtccagaaacataggaactggaatgaccaaattatatggccaaccctataaccactgctcccctgccaaataccatagatggagtggtcagacagggccagtgttatcacagtgaacaatcccatttagaaaactgaaaaatgcagtcattggttagttgtaattaaattcttctgtacagacattgtgagtgtcccttgccgtgggtggggaatattcctaatcagtcctcctgactgatctctgtggttctctatagtacctggctctaccctgtgggagagtcatctttttgctatcctcatgaatatatctaaagtggatattgaagaatgtattttccttgagggctgctcacctttctcagcctgcttcttacctataaaagattggggcccaagggtcattttaaggccatccttctcagccttgccactattgacattttggagcaaacagttctttcttttgatgatggaatgtttagtagcattcctggcctctacccactagatgccagtagcactccccagttgtgacaatcaaaaatgttttctgacattgccaaatattattttggggcaaaattactgtgaattgagaactcctgtttgaagtgtagaaggatcatagacctttggcgttaggtctgacagttaactaactctttcagaaatttaagagatttcttatctttctgattgtagttcctttcatagtatcttttttagctcatgggtcctgtattcttggacttaattgaggctgtcttcagtcttcctgtaagctttcaagcttctgttggcagactgaggcaaatttatcaattgaaaattttacaggactttttccctgaaagggtttcataattattatgtgaaaatgatgcatagaaaccaacccaagatatcagtggcttaaggcaatatttattgtttacttgggtctgcagggttggctgtgtgacactgctccaaactgtgggtcaagttcaggcttgtcccatattcaggtttcagcatctaaactgaagcatacaccagagacatccttttctcatggtgaaaggtagaagagcaagagctatgctgagtcaaacacattcccccatattccattggacaaaataagacaagtgactgaacctatcgatagggtgaggacacagtctggggtgagcaggaatatttgcagaacaatctaccatactttcttccaggggtctagtagcatttagcttttccaaaatggcaagaccctgaaattctaggctctgttcccttttatttctgctttaaaaggtggctacttcttttaaatgcaaccagtagctaccaacacaaactactgaagttttgctttccagtcttttctagagcagggttcaacaaactttttctgtcaaagccatgtagtaaatattttaggctttgtggataatagtctgcgtcacagctacaagactctgccattgtaacacaaaagcagccataggtgatctgtacttgaatgagcatgactgtgtttcagtatcagcactttctttacaaagcaggcaggccttaatttgccagcccctgtgctagagcttcaggttcattgtacaagtggctgtgcaggtgacagcttcatgaaatgttttgttactacgtaacctagatcacctttccagccttcgatgtgagtttccctgctgctcaactgctaagccaggatcttatgtttttataataattaacaccccacctctgacaccagtttcagtgttagaatagactcagctgtactgaataacagataaacccttaattctcagtggcttagcacgactcaggcttatttcctttgctgaatgtgtggtgcagatcatggtgggtttgtggactgtgcgtttacatagatgatcagcaacccaggctgccagagaatcctctggaaagttcctaatcaccaaagcagggcaggagatgacaggaagttgtgcactggcccttctcttctttacttccactcacatcccatgaactagaactacccacgtgcccttgcctaactgaggaagctagaaaaattgggggaagaagacagaatgttgggttagttccactgcctgcataaattctaagttgctattcttatatatagttagcagtgtaattaacagctgtaaggtacatattgatatatatggatgaatttcaattaatagtctttgaggctttttttgacaatttttttgcttaacaaaaatatctgtctttaaaaattgttactttgctcttaattttttcacaatgaagtgcttgaaattggaatgttatttctaaattggaatctgctagtataaagagccagtaaccttcaaccatcacactaaacattgaagtagtatcaaagcttgtaatatttattcttaaacatgcagtgtttctttgctgaggtactgtattttagaagtattagcaacattatatttacagaataccaataatgaaaatttttttcttctgtttcattaagacctttgaattgttggtatatttaatttcataaaaccactagattacatatcttctaaacccatccatgattgcctgtcgaaatatgttaaagacaacatacatgcttttctgtatgttaacattacaaaagtaatacaaaagtaatagttgtctttcaagcaggctattttccttttttgtattaatcggtgatatttaatatgtatactgcatgtcagtacaggtaatacagtgcatttgtgttgtggatttatgctttcttcgttttttggtcctttggcttataatagtattcatcaaagctaacaggcaaagtatgttaaacatgaagccatgagtgtttatgctgctgcctgacttttgatgggcacagcacagaatatgttaaagtaggggccaggtgaaaaattctgaattattcagtagtatctatagcaagtaattttatagattagtggcaccaaggcaatggtgtcctacttctacaaacagacagaaattttatagcaaatttgtgtgacttcaggtgggaaatcagggatggaaaaatggataatgactcttctagtcctttggaactgggtatctgccagtctaaaagatcaaataacatttgttaggattgacaagatggctcgttgttgacttaaaacatctgtataaagcttattgtgactttaaaatgagattttaaaaatattggtaatatgttatgcaaatgaatataaatgctaacttatgactttcttttactatagtagtttttttatgtgagctttgcgatgtcttttcaaatcccttttactctaaccaaaaatgtctagctaatcataatttctagcaattaaaacattactaacttctctaataactgtatgtattcataaattttaaatcccataaaactgacttctcaggtttgccttttaacgatgaatcagtgcagtaatattacagtgagaaaaacgaacaattaacatgaatgttttgcaagggatagtataactttattgtgaactgtaggattttcctatatatcatggcagtcattttttaatttttattttctgaaggacttaaagcccagtaatatagtagtaaaatctgattgcactttgaagattcttgacttcggtctggccaggactgcaggaacgagttttatgatgacgccttatgtagtgactcgctactacagagcacccgaggtcatccttggcatgggctacaaggaaaacggtcagcacacacatttatttgaaatatttttctgatttagcttttttctttattcagtagatttttaatgtaaatacttaagcagaagtacgttgagttaaatgtgtatcattgtttgaaatgtgtatcaaaagtttgcaggtaactataaattttttcatcaatgtttggaaaaacttggggcccttatttgtttaaatacggatacataacatcagtactaccattggatgaagaatttgttgccgtggccctgagacagaatttatgctctttgcttgcctataacttgaaaatgaacatttctaacatggtctcagggatgtatagtgtactgacagtttattattagtgtacatcagtgatatttgcctatatttccaaccccatgaaactaaagctcatagcagtagcactcattgtaaattttaagagatacattaaggcctctgcaaagctgatggataattaaggtgacctcttgaaggaagcagtaaagtttcattaaaacgttgtatccagccttaaggaaatgacttttagtattttgtatgggtatatccagttgtatcaatcaacctaagaatcagtgttgaacaaaattatctggcatgtagatcatgaatttaaacattttgtatgcatatacctacttatatttaatttaggaagaaattttgttgagtcttagaaatttaggagatgaataaatctgctaagaagcatgggattttatggaaataaaccatcgttttaaaaaatgtggtgacttcatccaaaatactaccaagaataaaacctagacattttttctggcaaggaatctggaatagcagttcattttgaatcaggaaattgtaataagtcaacttttaagattctttttttataaaagatacaattaagctgagcttgattttctgagctgattaaaaacaaatactttaaacatttgctattaattttttattcttaagtaaatatgctgttctttttacttacactctacctgaaatttgaagttttttattttttgggaattgataacttcacgtgacccaccagcatgaagattgcttttgcatttgctgtaattgattgtcatagatatggtgttatgtgtcagtgtcctataaatatgatcttaggatagctccctgccagaaattagcactaagaaaaactgtcatatatagaattgaggctgggtatggtcgcttacacctgtaatcccagcactttgggaggccgaggctcgtggatcactcgaggctaggagttctagaccagcctgagcaacatggcaaaaccctgtctctactgaaagtacagaaattagtcaggtgtggtggtgcacacctgtaatcccagctattctggaggtgaggcatgagaatcgcttgaacccgggaggtggaggttacagtgagccgagattgcaccactgcattccagcctgggcgacaaagcaagactctgtctcaaaaaataaaatagaataaaaaatgaactgacatatggttcctctttagttaagaattatgtagatcaccttcttgccttcccactcccaccctaggaaacggagtcaaatgtaatgcttaatgattataactacattagccagcaaggttaaacataagtacttcctccttttaatgacacctcacactcattttatttatcttatttatttatttatttatttatttatttatttatttatttttgagatggagtctcactctgttgcccaggctggagtacagtcatgccatcttggctcactgcagcctccacctcctggcttcaagccattctcctgcttcagcctacgagtagctgggactataggcatgtgccaccatgcctggctaatttttgtatttttagtagagacagggtctcattatgttggccaggctggtcttgaactcctgaccttaggtgatccacctgcctcagcctcccaaagtgctgggattacaggagtttgagccacaacgcctggcctcccacccattttaacaactttgctttatgtaccttttattgcaggctactcagagcattttggaaagcagtgtaatcaatatatttttaactgcttaatagactaagcagttagtttacagctagagttgtgcatgaatcagacttatgttcctagtcttcactggcccagataatatcttctctcatgcttgcagctttcaaaatacttttgtttaaaaatgagcttttctgaaagttaccaaataagttgtaagctggatatttaaagtttaacattctctataaaatctgtagagaagatttattctaatagatttttgtcaaaaacggaaaccttagaaaaaatttttctctgaggcactaatttataaatattaaattttttttctaaaatcttatccttgaaagctgaaccatgacataaatatgaaaatattcattcattttaatatgacattttagggaaactttagttccacagtatttccaaaagtaatttccagtttagctcttaagactcttcagtgaactggcagccttttaataagaatgtactgtattagaaagtacaggctttaattttctaagtcctttaacatgagtaaagggcacgtgtctttctgacatctatttgtgccgttttccacttgtcattttaaagaattgggaccttcagatgtcacaactaaatgcaagtttctaaggcttttccttctaaattgctcattcttccctcttttcctgttacactgcaagcacttactctctcctttttgtgtgatgttcaaacccaaaggcataaaatgccacgatgtgttgtcagtttcccttagtaagtggagattccaaattgtctgtttctgtgtctagcagattcttgtcaacattgattgggattcccatttacagttggcaagggtcatcagtaagtcttccaggagactcttcatactcaattcgtgggaactgacttactgtatctagccaaaactaacttcttaagccaaaagcagtttggttttatgggtttaaaaaactttaggtaggaaacatgaaatacatttctcttactaagttttccttgattagttgttcattctctgtgcacttgttccttttgggatagtagggtaaatgtagcatgatgttgccaagaaaacaaatggacttttaattcagaacaagcatagcacttctcagttaaatgtatttgggaaatccagtttaaaaattccaaagagctttagattaacttttttatcataattattcatagagattatttctgttagatattttaatatgctgaattattttctcatgcttttttcttagagagtataatgcacagttgaacttctaaatagtatagtataacaattttatttttataattttactacctcatgtacatttttatttacaaagtttgtgtttggttctatttcatattttataaacaagttctcagggacaaacatgcagggtttttctatttatgcaatttctgtgcatagctctcactttgaaattagatatgtagttaaaatgccacactttacattttcttttgtgaaccagactttcaaaaaataatttgtgttttaaattattccgttagctaaagttacaatcactttttttcttttcgtgacgttttgcagtttttatataatgcagtcatattatgcttctttgattttaatgaccttttgctttgcttttccttcttttgtgctgcaaacatatagtggatttatggtctgtggggtgcattatgggagaaatggtttgccacaaaatcctctttccaggaagggactgtatccttgtgctgctgcagcagttaattagttaggcgatgaacttctttatgttctctaatgaaaatgaatatgctacatttacacagatgggtttttaaacaggcataaagtttgtggctattatagttcaaaaattgttgagataagaagctgaaatatttgtaggctgcatctggcagtaggacatacagtctctgctggtagtcagagcacattcactgtcactcatttttattttatactgctttttataattttaaagtatacatggtgtgtgtgattttatttctttctttttttttttattttaaccaaaatctttatgttaatgtcattgcattttgttttcagttgacatttggtcagttgggtgcatcatgggagaaatgatcaaaggtggtgttttgttcccaggtacagatcgtatccttatctttggcctaaaatgtagtttctaaaggtcaaaatgtatgatagcacttcagtttggtcaggtataatgtattttgtctctccctaatatattgttaaattactcttaaaataccacctactatttgacatagacttttccttccgttatttattgtttcatatgttaattctgaaccctgctcaattgtaattatgcacaattacttgctggctttgagttgatttaacctaaatcaaaaatcatggcttgcattaaaaatttataataattatacacttaagtctagaaatacgtacaacttaatatgaattttggagctgtctgttgcttctggccatccttttgttttgtcccctacctcctttttgttaatgttctgtgtggtttgtgtcttttgattgttgtctcattactcacataacatactgaccctttcatctgagaatttcagcagtagtagttttgtatggtaacgatagctttggattcatactttttgttcatcccactacttttaatatttatattaacagtgatttgttatgtgtttaccagctagtaacacttagaattgtttcaggaggaagaatgggaaaaggcatattcacaaggttacaataagtgagttttaggccttggccttcagggtcctggagtgtaaagactagaggaaaggagaccaagaaatcctaaccttacaacttagcaaaaaactgaatcttttttataagggtcagagctttagaaaatttttttaaacctaagctaaacaaagaatggcaaaagaaaatgccacttttatcgaagcctttatttttattacaactgattattttctgttagtgtagaaaactcagtaaaacaggatgtgttctagaaatattgtctaggagatataatcatgttttctgataaattgacagaaaaggaaaaattttgtatattattatagcattgtgtgcagtttgcagttagagccactatggatagtaattgtcattattcttagttgcttatcattttatttagaatttgtgagtttaagcttccattttaaggtaaaatcagttagtttgaacacacaataaataaggttaataaagcttatttattgatcatttctgtccacctacaatcattgccttttgcagggtgcctgtgagatataaaatttataactgccacatcctttcttaggaatttttaaatttctattttcttgtaatatgaatatgactaatgtattgaacattagttatggagtatttttcttagctacttgatattagatattgatcagtggaataaagttattgaacagcttggaacaccatgtcctgaattcatgaagaaactgcaaccaacagtaaggacttacgttgaaaacagacctaaatatgctggatatagctttgagaaactcttccctgatgtccttttcccagctgactcagaacacaacaaacttaaaggtactttttacaaatatgtacatttaatcccatttggggtgtgtagtgtgtgtgtatgggtttgtgtgtttatatgtattcatattcttatgggacatgaacccaaggttttctctggatggtggggaaaaaaatgaggtttttgttttttttttctttaatcttatatattttaatcatatgtataagataattttacagtaatatttttaaaacatatgctttttaaaaaatctcaaattgctgaaagttattaataatttgagaatctttacaaatatatgtacattaacaccattatgtttgcagccagtcaggcaagggatttgttatccaaaatgctggtaatagatgcatctaaaaggatctctgtagatgaagctctccaacacccgtacatcaatgtctggtatgatccttctgaagcagaagctgtaagttattttcttaatgtttacagaacatattgcattcttagagttagaatgacagttaggtttggaggagaccttttaattttaaataaaaatgtagatacatgatgatgatgtttttctgtttcttcatgaagactacgtcaaataaactaatgaacatattcgagcccctcctacacaaaataaagttacctcccactgttttttgcaatcttgcctggatacctaaccagagaactaggatgttgaatgctctgggggaacatcctaactcaggtataaaacaaattactgtatccaaaggaaaacagaattctgtgatctgtgatataaataaaatgtggcaatttcaagagctagaagaaaagaaaaaagacagttaaacattttatttcctgcaatgaaggagtcttcctaaactattatgtctgtataagtaagttgatgattgatcagtcttgatctaatgatatatttttataagtcatctgtgtggctaatatttcaaataactacagagttaaaatactcccagcatactgacttggttattattgccttgtgtttttcagccaccaccaaagatccctgacaagcagttagatgaaagggaacacacaatagaagagtggaaaggtacattcgtcagattcttagagggaaaactgtgaaggagcttctggtttttatatggtgatttattatcatgttagagaaatttgtgactttaatatgcataaccgaaatgtggtaatattaatatttttacataagtagaaagtaagtctgcttccttccttaacttaatcttaagttcccaagtttcccaccccagacacagacacattagtgctctgtctcatatttttttccatggtttgtgaatacacaaatgtgtttagtgtctcccacctctcctcttccacccttttaaaatcacgtatggttgtgtacggtgtatgctatatgtacttgctttgtttatttattatatatttttttgagttggagtctcgctctgtcacccaggctggagtgcagtggtgtgatctcggctcactgcaagctctgcctcccgggttcacgccattctcctgcctcagcctcctgagtagctgggactacaggcgcctgccatcacacccggctaatttttttgtatttttagtagagacagggtttcaccatgttagccaggatggtctcgatctcctgacctcgtgatccacccgcctcggcctcccaaagtgctgggattataggcgtgagtgctttgttgatataatcagatatctggaaggttattctcttttagttcacgtatctgcctctcttgctttaataactggttagtgttctgctgtatgaatatgtcacactttatatatccatctccctcttggtgaccatttaaattgtgtccagtctgttgctgttagaaacaactctgcaatattcatgttcacatatgagaacatgcctggaagaaaaatcctggaaggagatgttctgagccaaagatatttttcagttatttccaaattactctccaaagaaatggtagtagtgtacacttccgtccatgttatataggagtctctctttgccctcacccttgcctacagaatgggttaatttttaatatttgtaaatctaatgtagttttattctattttatgaatgtggctgaaattaatcatgctttgatagtcatggaagttttcaaatatttcttcaaaaggtgccctgggacatgtgggtcaggtaatttttaggtcccgtttacttccatttgtgttattgtccttcagtgttttgaccacttttgtaactgcgtgactttgagtaaatcactcccccttcatctcaccctcctacactgccccctgcattttacctcatcttaaaatagaggcagaagacctgttattaagagttgtctctaaatcctgggaaaggaaaggggactggggaggtataaacatgaataagtgacccatctataaatgtattttgctaagcatgaatttgattctttcttagaaattgaagagatttagagattggttttctctgaactttgggaaacccatggttagcagagcccgtgataaagttagaagaatgacaaaatgataaaattggatagagtctgctgcatttgaatatgtaatgtgcatttgaatatgtataaagatatagctctgtactgagtatgtatgaaaacattaacctaatatttttacatcctactaatttacagtagacgatgaagtattttgtagaatcttgtggtttttttggttgttttttttgtttgtttgtttttttgagacagggtctcactgtgtcccccaggctagagtgcagtggtatgatcatggctcactgcagcatcaaaactcctgagctcaagtgatcctgctgcctcagcctcccccgtagctgggatcacaggtgtgatccactgcacttggctaattttgttttttttttttgagacagggtctcactgtgttgcccaggctggtttcaaacttctgggcttaagtgatcctcctgcctcagcctcccaaagtgctgggattataagtcttaagccactgcgcccagcctaatttttaaaaaaaaattttgtagagatggggtctcactgtgttgtccaggtcatagactcttaataggccagcagttgtaaggcacaccattatgtgccacaaagaaaaaaacaccttcggttgtacagcaccattggttataagatatagtcaatttcagagattaaactgtgaaaaaagtacatcttaaaatcagtgagatacagtgttttcatttgtataaggatatatttgggggttttgattgctttaaaaacatttacctttattctgtatcctttactcctagccccaggtgcatgtcagtaattacccacagactgcctttttcaagatctacttaagagttttagcgcatagcagaaagaaagattaattgccaaagccattaattacagatggctttgcctagttagtgctcctaattagttttggttcttctgccttaatccctttgtgctttttcccagaggagtgctattttctctcttaaaaaatcctcttactgcaaatgtttatcattcctttttgtttctttgaagaaaaccatctcttattctctcctttatcagtgctttctatttttctccttccaagccttaagttactatagcaaacaaacttatctccagttgttgttcattccaacatattcatttgttttaccttattaccaatataaatgtcatactctgtaatcagggattctttatcagaattttattcttcaggaattaacacagactccttgaaattcgatgcaatattttttgtttgtacatttttctcagaagagggttcactacttttatacaattctcaaaagattccatgacccaaagaagatgataaatagtgttgatgtggcatccaccattaaggttaagtgtggtgtgccctgtgagtctgaatgtctacttaagaaccttaagtagacattaagaaccttaagaaggttttttgtttgtttttgtttttttgttgttgagatggagccttgctccgttgcccaggctggagagcagtggcgcaatctcagctcactgcaacctctgcctcccaggttcaagcaattctcctgtctcagcctcccgagtagctgggactgcaggcgcctgcccccaagcccggctaatttttgtgtttttagtagaaatggggtttcaccttgttggtcaggcttgtctcaaattcctgacctcaggtgatccacccacctcggcctcccaaagtgctgggattacaggcatgagccaccacacatggccgaaggttcttcttaagtagacattcagactcacaaggcacatcgcagttaacatcagaatcacttctgatgataatataagtgaagaatataagacaggaggcgcatatattaataccagcagagcagctcccagtgtgtctcttcagttggaacagttgttgcagtggtctacttgctgtccagaagcctgataagagaaaaagattcccatggagaaatgttcttcgaagtgataaccatgcttactcataaggagttgaaatgtagcttacctgctagttttcctccaataaaaatgtgtttatctttcattctgatttgttgtgaagcttttgcacactctaatttaaatcttggtagcatatatctagttgagtacccacagtgcaccaggctctattccagggcccaggaaatggaagtcagtaagacacgtggttcaagccctccctgagacagatggtagtacagaatggtatgtggtatgatgtgctgtagcacaagttgctggtagagtgaaaaagaaagcttctaccccagcactatcaaaccaacttcagaaacagtgaattacaggaaagattagtacttccttttaatatgatccattgttgagtgtcaaggaattgttattaattaacatccttgaatcttaggccgacatttaactgactgtcattgtaaggacactgtttgaagtacttcacatgtataaaaatttccacttaaaccatacatgcgttgtgagattggctcttagactttgaaaagttcatttttgtttacttcttttacagaattgatatataaggaagttatggacttggaggagagaaccaagaatggagttatacgggggcagccctctcctttaggttggttacaatataagcttggttaagattacagtttacttcttgtgttgtaatcttcagtggcctgaaacctgcagttcttcccatatttacaaaatcattattattccaggcttaataagtataaggaaatacagttttgttttttctactaatacattatactaatatatcagtaactgttcataagatgcacatctttttctatgatactgacattctgaagaacagaaatttaaaaactttttgttggcattgttgctgggtctttaaagaggaaacttctcaaaattcaatatacatacctttctatgatcttgacagtctttactttggataaataaaagcttcactgcaaaatttagtacatgtaataccaaattgctgtctttctctttttgatattattgatttgttgaatgaaggcaataacattaaaaccatcactagaaagtattctttctctaagaagaaaactgggtttgtaggagttaaaacttttttttatcataagctgatcttatatttaatgttagtacaagtaaaagtataaagaatagaggggaaaagttaaatggcaggtaacatgtacactaagtacataccacataacagacactagtggtttatatactttatttcattcagcccctaagatcctaaggtataggattattgcacacatgttatggatgaggaaactaaagttcagaaatttgaagtaacataagattccaaatctattatgtagatgaactaatacagtaacttcagagtgtgtggttttttcagcctcccattttgttatctggctggcaacagagacttctctggctacagaggttaggacagttgtatgaaggaggtgaaatttgagctgagccttaaagagtgagtagtatttcaaaagatcttgattttgaagtaaaactatgccattttaattcctcagaaacttctacttttgaggaaaaaaatagatgttgtatctagcatcttgtatatgggtaaggttttttaaactatagcgacattgtatactataaacataattgtttaagccattttttgtggcttgctttgacatttttggttatatattttagagttgtatattttaaatctttgatcaagaatgcaatcttccagattatagtgtagatcctgttgaatatatgaattggttttgaccgcttttacctattttggaaatggccttttctctacaatttacttataacaaatttaaagctctattataaatgctttgtgtaattaattagctttgtattgctatatagtagtagtagtaacaattgttcatgatggaggctcaggtgggatttgaaaagttcattatgtgggacagttttatactttagcatactatccaagtgagtggcacagctggagtgccagatgtttgagtaaatgtaataatttcatgagttagagcatttgtatttgttcttaatttgtaagtgaataatttgaatcttagtccagcacttgcttatgatcacaaaataagtcagtgaaaaagatagaaattgaggtttctagactttttctggatcctcagttatagcttgcaaagacgagtattagcaaattaagctgttataaaaatattctgctcttgattttgtactaaaacagaaggagtagtgtttggtaaatcaaaataccagataaccacagtaccatttccacttgatttttaaaaggaattttattctttttccctgtcgagtgccttcctatctttgttttggtttggctaatagtaaagtaagtttacctgccttgagtgtatagaggctcacttaagagaggaatgacccatgtgagactaaagattttccatattattaccattcagatatttgagaatttactgtattgctttaaagagaaaacaagtgtgtgttttttccccttaggtacttgatttttagattaaaaagttaacaatgcatttaaaagtcaatttttatcagattaagacatttgggtaaaataatagaccctgaactagaggcatatataaaaattgtatatgttggagcccttttatggtttgaatgtttcagtacaagtcttagaaactagtcattgtgtactatgtatggtacacagatataccatactgttcagtcagaaaaggctcattccaagtattgattgaactaaatagaatatactatctgaatttcactctgactgggaagctaatggacctttcttgggtctaggagattatcacctcttttacctctcatctctcaggcctgaaatgctcatcctgcttttctcttccgtttcagctcccatcacatgctttgtctcttgtggttccattcctttctgtatcccagtcccctccctaaagattttcctattcccactacactgcctattttctttttgcatttgaagaaaagctcacagaagacttttcatattgaagtgtttcattgctcatctggacagaatggagggatgatctcaaatacagatgctgggttcaggagcagtggttttcagcccatttggtttcagcatctttgggtgcctgaacctcaccctcagaaattctgctcagtgttccatttgaagaccattgattttatttcataaatgtattcttgagaacttttaagtaacttgcattattccaatttggaatgacccttatttagtgttcatgtggttcagaagtacttagcctagtgcatgagttacctttaactatccttcatcccccagcataagtcattcctgtccccttcctaaaccaatccccttgagaggatttctgtctcgagctcaggtattcctgttaactttttaaaatccaggaaatgcttgttaggtaatactttcggcaaaggaaactgtttgctcttactatatttaataaatccatatttctgcttatcaagtattagagtagaaataagaagacccaagtttacttaactaggccacttgagtgacagtggcatgtcccataacctcgtgtaaagtggggcagttgaattgaggtttcttcctgttaaacttaattttattccttgtcttggcatttgctttaaaacaagatgtgccagaagtacatcttgtttcaaatttgaatcatttgaatttttcctttttagtgagaagctgtaaagacttttttgtagggaagtagcttttaacttttgtagttacacagtcctttaagatcctctgtccaaaaaaaggcattacagacagttttgcatgtattatcagcagtattcacacataccctgaagcccattcatggatcttgctgcaggaccatttctaaatgtggttcagatgtaaaattcttgtcttaaactgaaaaacacattcattgaaaggataggactccacgattctagacattttcagaattctcacctcatagctgtcaatgaagagtgtttttaagttagtgtgttggatatcatttgcgattatttttagtgagccttcgaaacccaagagaaaaaaattaccactggaggcagtcagtgcagtgcaagtagcttgatctgcagctgtctgcaactgatttgctgttttgtttctcatagcacaggtgcagcagtgatcaatggctctcagcatccatcatcatcgtcgtctgtcaatgatgtgtcttcaatgtcaacagatccgactttggcctctgatacagacagcagtctagaagcagcagctgggcctctgggctgctgtagatgactacttgggccatcggggggtgggagggatggggagtcggttagtcattgatagaactactttgaaaacaattcagtggtcttatttttgggtgatttttcaaaaaatgtagaattcattttgtagtaaagtagtttattttttttaatttcaagtgatgtaatttaaaacctaagttgtgtttcaaaacagcaacaaaactgtattgtattttttttgctgtaattaactgtataatgtaaacctaattattttatcatggtttaaattttttgcatatttgctttatcttatgctgctgatttttttaactgaatttgtaagattttgtttatcaaagcaactattatgtggtgacttgcctatatcatgaattatttaagatttttatagttttttttaattagaatttatttcagatgttttgttcatgatactatccttcagggttatgtgcttatcaatgaaataaccccagaggagtgagggaaaataacttgtagccagttatattcaggaataactactgtaaatgatgaacgtgttaggagacctccaatatttgctacttgccaatcctaatttagttacaagaattggtaggcaatcctacttaattttggcaaaagccccgtcatctaaatggcagaataactcagagcatgtctttgaagatgctgggcgtctaccaccaccttatgtccccaccctacccaacaaaaataagtaaaaagaatatggtgtattctacaaatttgtggcatgctcaaagtttatgatcacataaaggcaagaggatacttcatgaataatacatttcaatgcaaataaacagatggttcacttctactagctatgagcctgtttttgtatacactgagttaatctactcaggctgtaggtcccagcaatgttctagagtctggtctttccctttcctgcagcttcgggtccttggacctttcctgtttcctattacttggagtgtctgtcagttgagcaccagttgttctggtgtttcatttgattctacttgtagcataatcatttatacgagctattgggaggttccaaaccctacctagatttgtgtaggtgatgtatcaaatgagcaatataccgttcatctgaaaatagtagcacacagccatatataggatatcattttctaaggactgtttcttcacattgagcagagcaggcataaatggtggttatttagtctaagtcttttatttttttatacctgattttcaacataacacgcaatgtggatgtcgagtagtgttaagaatggtgctgctcctgacaagtgtatgttaactgtttacattttctatctgtagaattatttctctattactgaacttttcctaagtaaaatgtctttgaagtctcgttatttctgaaatacgttgtctgtaatagacccaggcaccttttaaattatctctggaacaagagggatttcatgtaatgaactaggaaatgcatactcacataagcaacaaggttctaggcagaaagccccttggaatttgtgaccaacaggagcaagaacaggtgcggctcaacatgcaatgtctgaaaatttgcttggcattttattcatatatttagtgcaaaattatttttgagtgagatattttacatcactgttaatgtgcaatatttaagattaaaatacattagcttttttatatactttgaagtagcaagtttgttttcgatggcttagagtcatgatttccagcttcccagcctttttatcagtcccttttctaatacaacaaggtgcattaatttgattaggcaaattagagttctaagacacttcttgaattgtagacagaaaatattggattcacaatttcagcagaaatttgagaatgagtgtgtttatattaatttcacaattagctgtattttctgtagcatagattatgtcactgttgcactttcacagcagacatgctttcagaaggttctcatattttatgtttgattgctgataagccatctctattgatacagattttggttaagtaaggaaaaccaggtgtgtgtctgtatcatttattgtaaatgccagctgccacttgccaaccatcatgttcagttcaattcaaagaaaacaaactctcattacttagtgtaaactaaaatacttaacaaattatatcctaaaaacaaggtctctttgttaaatgttgcatgccctaggttttaaattactacatccaaatacagttttcgtcttaaatttgttaagctaaatatatgttggttctttttattttggaatcctttaagcatcttaaacattttttttttgaagagaagttacaaataacatttctatcaggtagtacttgtatgaaaccacctttcttattctataattttgatttttcaattttatatacttaatatactcactgtcttactatcagaaagttattttgaccaagatttttattatcttcatagattcagaaagagatgctaattctgtaccaatgtcttcctggttactattctcttccctctaatatatactggccatttgtaaaaccattgtgttgttgggatcacttagttatactatacgcagatagagcatctcaactctgtcatagtgtttgctgaacagttttcagtgtcatgcacctttggctgctaattgttcctgacgtgcactcttccgagttggtaaaggcacagtgtgttcatgccagacttctaagagaaacaccagcctcttaaatcagaagcctacacacaacccccttaacaatccaaagaagcttgatggtgtgcaaagaagcatcctgccagccttgtcattgttctgttctatgctaatcctgctgtgttgtctaaaagatggagggaagaggacatcagtgtctgatagtgaaatcatcagcaggaaagtgaagctctttccttggttacagataagacttggtttacactattggccagtatctgctaaacatatgaagacttaactattcagtgttgcctaggcattcgcctgcacaacattttgaggttagaacatagaatattttcagaaatactgttgtagtttgtgagtgttgttcattagttacacattagctatagagtggatgcatgaagccccatgacaccagtaaacttctcttaccagtaggtaaaccaaacaccattctgtcattagcagccctcttaaatgttgcctctccgtatcctgttgcatttttgtgtgcattgtgtttctactgatctctcttaggtttttacggaatcaaaggaaactaatttttccttaatagcaagaaagatgaagaggtaaagggcattgaagcagaaatgtatagtttggggtacgattagaaaactcgtaaggaaaacagaagtcctaatttcaaactgactgctcttcgttaagtgctcttaaggagagtctagtaacagtaacactttctggccatttctagtttagattctcttcgttactgaaacttttgagaaatattacctgtggattaattttgcacaatgttctattctcataatgacttacaaattaaactaggtttttattgaactacctcacactaattttctatgctttcccaagtaagctgttgccctgttagatctttactgagtgaattataaatgtgtgttaaatactttctagccaatgttgacacaataccagtaagtatgtaaagtatataccttacatcagtaagagacacgtgtaaaatctttgactgtatgtcttgcaaaattgtgctcgttgacattattactgtttttgtaagtagaaacctgctcgtgatatcggtccatttacattttacaaaaggagtaaatcttagtaaaaattttacgaagaaataaattacttttgtaggcccaatatttggtatatttttgagaagctgttaatcttttagctgaataatgaagttagactgaattacgtgtctccctggactgtgacatctattttctcattacagtttatcctggtcagcagggtgtcacacctggaaacctgagtatgatagctgacatttgcttttctccctctgcgatgtcattcctcctccattcctctccttccctgtgttccgttccctctcctttcctctagacaaaacaaaatggggcactttttagggaatgctgagatcattattgtggtttttcatcattcatgccctagtcattaaacatgcaccactggaatgtaaacaatgttatctagtatgtcaattggttataatattttaaataaaaaagaaaaaagtggtatgaaaattatgaaa

SEQ ID NO: 42 - DNA, 127222 bp, Pan troglodytes
gacgtgcgcgggcgtgcgcggtgacggcccgcgtccctgttactcagccgagcggccgaggccggacgacgcggcttggattgcggagccgcgagcagcgctgggtaacggccgcggcgacccccccggacggctcctgtccccgctggcgggcttccctgtcgccgttcgctgcgctgccgggtgagtgcggcggacgccgcagggccgggacggcaggcggccccgtcgtgtttatgttattgtgccgctgccgccgccgccgccttctcctcagccgtaaccccctcctgggagtgggggcgggagcgcgcggcgggcgggggcggcgcgggaacaatagcggcgcggaggcgggggccagccgagggggcgtggggctgcgggacctgggtgcgctccgctgcccgccagcccgcctgccgccgcgagccccgcccgcctgtcctctcgcgtcctcttcgcgtgggtcctgcctccgcggcgggagaagaaaatggagcgggggggtgggtggcaagttctgaaacacttcggcaagggtcggacggaggtgtctttgcggcccgccgcgccctggcttcctccggggcggcggggagccggggagagcgcttctgccggcaggtccccaagcctgccccgcgcccatagggaccgtattttgcttctcgatgctttctttgtgctaacgttctgggcgaacgcaggcagcagcgctgaaaagggccagagtggcctgcagctctgggctgcaaggcagtgcccaggcccgtggctcgggtgggaggtgtccatccagcttggcccgagcttcggtggtcagcgcgcatttctcttgagggtcatcggtggtgaccttttgactttttcaccccaccctcccatctctttgtctcgcatttgtgttcccgattcagagatggtagaaccaagtccattttaaagtaccctgatgaacactttccgtttttatttctgaaagttccctgcctggtctttactgcgaatttaataacatgttgactacatggcattgtccagtgattactatttttacctctgaaattcagcgatctttccagtagaattctggtccgtcagtccattgtgttttgagataagcatccagcaagtacctccttggcaattagaacatctgttttttcattcattcattcattcagcaactgtttagtaccgtactcagatgaagaggtttggtttgaaggtaaagaacagtatcctttcatggaagaagatgctttgactgaagtataatagatggacctttaaatgagacagttacataagtgatgtctgttaaggaaggtatggttatattctgggtcattttttaagcagtatatctggaagttcaagtgtaataggaagtagaattagatttggtctaaatatacaacagcttttatttatttctaaattttattttttccagtcttgcagccttacagtcatttgtaatggttacctcagattcccctgctgtggttaacgttaaacctaggaggtcagatgctctaagtgaacatgtttagtgctgtgcctgacaaaagcaagcaatcaaaatgggacttccttgagggcaggcctgtcttgcatctgtttctccaccacctagcctggaatatagtaagtgttcaataaaagtcggattgatgaaaagctctttgtaattgataatatttaaaatcaagccttaaaaaaaaaccgtaatgttctccataaagttttggaagcttcatgcaactgtcacatcagatggctaaatggtcagttcatgtacattatcttttatgatgacatgggcttttgaatcacgtgtaggtcattcactgtcctaaaataaaatcttgtctaaatatttttttaatatgataaataaagtaggttgtggagtgtgtgtttctgtgtatgtgctagtttatgtgtgtctgtgtgtgtgcatgtacgtaatccacacacaggcactcataaacaggtatttcagtaggggtctaaaatgattgcatttataattttgtgaatattatttgaaaggtttttggtgactcttattttgtggaaaattgaggacaaaaccacataaatgtcttattagaaatatttctaatattttagaaatgtttacttgaaatgtttggttttaagttctaacttgtattaacacaattggtacaaaatatgagcctaaaactcaaaataattgatttatcgaagttaaagctcttttccacttactaaatacagtttagcgtttgttttggatttgaaagaatatgaaatgagttaactaatgagtttcttattatttgctgtaaagtggaaatgaagaaataagaaaataatacttttttaagatgagggttgaaaatctttgagataccaaagttttattgctttacctagttaaggtatgtcagattctagtaggggttactgacaatcctttggcagtagctcacaggctgtgtaaagaaccagagtcgtgttactttgttttccaaattgttggtttttaaaaatagctttattgcaatttaattgatgtaaaatgcaccagttagagtgtatatatttcagtggtttttagtatactcacaatgttgtgcattaatcaccatcactaattccagaacattgtcatcaccccaagaagaaacaccgtatccattagcagtcactctgaatttcacttcaaattatcctttaaagtaagagatacagcatagattctgttagtaaatatattcctttagtaagtatgaaaagggctccttttaaatgtcctgtcctggcagaataggaaactatatccttcatactcctttagatcctgggggaaatgccatttggaaaggaaatcagtgcaagaataaattgtatacaaattaatgtggttataatcttaactatttgctccatgcctgatattatcaaagtgaccttgtgaggatgagatgttcagtgaaacaacttgaaggaatttgttgttaaatgactagtccccaactatcctagagctaagaggttgttgaataggagcctgcttcttgttggtctgctttgccagcgggttgaattttgacatatttcagtcatctacatggttgagatgctttgttgcacgagtggaaatacaaaataatgtctgacattaggattccagtgctctagaggtctctggtcaagtcaatggtatgggtagtagcttttctgattcatgtggtccaaggaagtcattataaccacatagctttatatatgaatcatttgcctatgtcagtgaactgtgatgctgattgtcttaatcatgagctctttacctgaacatttagaagccttgcattcttactcttaatgcaggttaagttgaactttgatttcagaagtgagttgactgaaaggtaacaggagtattgaaatgagttatcctgtcattcaggtcaataggtggagctagagcaatccaggaatcagacctaggttcatttctcagttctgccatctggactttgtcatcaagttctggagctttaggcaagtgccttaatgtttttggctttaaaactataaactgaggctgtcagaacttttttttatagaaggcttgttcctcagataggtggttcttgagaaaacatactaggacaaaaagagcccttcttgggtgataatcagaagcctaagttaagaacagtagtcaaagttaggattttgtaattttgtaattttcagaagccaaaaaaagtgttgagttgaattttttctttaatatccagacttagaaaacaaaaggaaggcttcaccataagctagagattcttggaaaggtaggttttcatttattccacagcatcatgccttctcatgagaccgtatgctcccagagactttgtggaagacataaaatgagttcattatcctcaggaagcttataatcaaggatgagactgaaggcatctctaaacagttaatttatgctcttttaaaaggtatatgaaagggttcccaccaaacaaaagcccacttcacatctctgtgcaggccaaatttcactgaaatccagtttttaaaattgtgtgtgtgtgtgtgtgtgtatgtgtgtatacgtatgtgtatggagagagacagagaggagacccctttttggaaaacttagtagcttccattctttttcttggaggtgggttatatcacaaatacaagagatacctgtgtttcctgttaccctttattatatttcagatttagttaaaatctgccattctttagaaagtcaaggaactcaaaccttacaatgattgctagcgtgggttttaaggtcagccctgagttctaatcgtgctccaatctaactaactgtggtataggctagttcaggttatataacatatttgggcctgttttattatctgtcaaatgagaataataatagcacataacctcatagggctgtgaggtttaaataaggtactgcatgtaaagtgcctggcactgttgtggcggctggaatgctagatacaagtattcaggtagtttttgctattgttatcacttatatttaactttgaacaaacataaaatgccaagtaaacgtcaaaccagtttaatgcacagtgtccattctatttttccagaatatgccatttgtttcactctgcatctctggggggtttatttaaaattcgatcatctcatgtaatctgaattgactgagatgatttatattaacatttggaccagtaatcctctctatcttaaaatttggaaatgttccaaaagcaaatattgaagggaacatatttgccactttcacgattttttgccttttcccacaggagaaaattgcctaagctttcctaggtttgttatagacatctaaaggaatgagaatttaggagctacgaatagctttatcatgtgacacatttgaagaaaatggaatgctgtcacatcttttaaatttagtgttattgggatcttcgattctgtgaagattgcagatttgtcagagacctggtaaccacaacaattcattgaggcctggaggtctcttaaaaaatgagggagattatttattagtaccacttagaaatattatcttttctgtattttctgtggttttctaagtcttctgtttagcgtttctatgattataatggtggattaaatttcttgttccttctcaagagcatctactatgagatgacactggtttttacttcggcagtatttactgagcattgcactatactaatccaggtatttggtgatgtaggaaccaaaggaaatagaagtcagtttctaccctcagtgagctgagtataatttgatagaagataaggattaacgtaagcacatttatgtcctaacacaaggaagcaaatattgttagtcatttcattaggaatttcttttgtcattggggcatttggggccttccaaaccttacatctcttgccatgcctttgtactcactcgataaacctgagaaagcaagatatcttcttttctgattcctggtttaagttgagagtgtggtgcacattagtcaaaatccaaatcataagaaaaggcaaaccttacgaattcattttggaatacaacagggtataaaaataagtatatgagaaatatgaaaagctgacagtagaaaagatgctactcaggtactaaccagagttctcaatctcctctgtattgaagctcttatgatgtaaggctggatctgtactagaaacactttttaaagtctctctccagtattgagaagtatagtcctccagtactgcctcttggtgctgagagactcaagcctgccacccaccatatttctggggaaactagaaacgaaaaatagccacacacaagcacttgctttgcttcgcaggaaacatcaaaaccataagatgttatttcctaaaagtcattaattgggtagaaaaatcaccattttctgacttgttccaggaaggatggctttctgattttcagatgccattgggtcaaccaaaggtaagataaagaaaagctactgctgtgtggatttttctgtgacttgagaaagggtcacttttcagttaaacaaaaaccaaagcatctagctttggctgttactattgagaatttaaaagtcttaatgttttaatttgtttacattttatattttgactaagtagtaatgaattcactttgactcaaaattccaaagatttaaaaagataaagaatctccttttctactctgtgtagccacctagttcttctgcctggaaactgttaaaattcctgtgaatacttccaaagatagtttatatatgtttaagtatataatcctttgttcaaaatccttggtccagatgtattttagaatgaaggctttttttgcaattgtggaaagataatgtagcacatctaccgtgttatccaaaatccctagtaagaggttgtagcctcatgattaaacacattaacatttctgtaaaaaatacagacataggccaggcgcggtggctcacgcctgtaatctgagcactttgggaggccgaggcgggcggatcacctgaggtcaggagtttgagaccagcttggccaacatagtgataccccgtctatactaaaaatacaaaaattagctgggcgtggtagcgtacgcctgtaatcccagctacttgggaggttgaggcaggagaatctcttgaatctaggaggcggaggttgcagtgagctgagatcgtgccactacactccagcctgggcggcagaggtgagactctgtctcaaacaacaacaacaacaccaccacccagaaataatcaaagacattaatatttttataaaagcataacaaatacaagtagggtgaataaagattataaaatcttatgctacgtctcgtcaggttttaccaccaaatacgtttgtactaaacttattttaaaaacgtatttttcacagctttatggattttggctttgccaatgaaggataggtgtcatacatatatacagtcctgtatagcctctgctctgctccctccctttttatttaatgtaaattgttgcatgcaatatgtatcaccttttgcttttttgttttttgcttgttggtttgttttttgagacggagtatcactcttgttgcccaggctggagtgcagtggcacaatctcagctcactgccacctctgcctccgaggttcaggtgattctcctgcctcagcctcctgagtagccgggattgcaggtgatccacctgccttggcctccaaagtgctgggattacgggtgtgagccaccgcacgtggcctgctgtttgttttaatatagctgagagattattttatatcagtcatatcagtatgtaaatggcatgcttttttaacatctttgtggtattccgtttgtcttactctgtttgggctgctatatcaaaataccataacttgagtggtttaaacaacagaaatttatttctcacagttctggaggtcgggaagttcaagattaggctacttagtcaatttggttccctggtgagggtccttttcctggctttataggtggccggcttctggatgtatcctcacatggcccctaagagctctagtctgttcctcatcctatcatgggggctgcaccctcatgacctaatatagtcatgagaggcttagttacctcctaaaggtctctcctccagatactatcaagttagagggtaggccttcaacatatgaatttggagggacacagacagtccataacatcattatactggtataccatttaactcctttctgatgcatatttaggtagttttcagacttttgctatcaaaagccatggtgcagtggattaccttgtgcatacgccatgttgcacttaaatgcataggataaatttccagaggtagagttcctaggccagcgtatgtgcatttgtaattttatgtattgctgaagtgtagcctgtagaggttgtccaacttccattccaccagcactgtgtaaggatgcctgcttcttattacccttagacgtctttcatcttttaagggctgtttgtgttttctttcttttgaactgtccttgtctttgcatatttttctattgctttgttgctcattttcctagatttgtaggattaattttacaaattggctccatactattttttggaaatgtttttccccaatttgctgttttccattctatggtaggcaattacgtatggttccaactttattttcttcaccagatatccatccatttgtccctacaccatttattaaataatccatctttgtcttaactgatttaaaatgccacctttaccatttacaaaatttccacgtgtatttggtaccattgtttccattgacccatctgcctgtttgggacctgagccatcctgtttttattattgtagtttatgctgtgttttctgctaggtctaattcccttttatttctcttccttttcagaagtttttttctggcttctatcttgtttattttatatgaacttctaaaaacaacccatctagtctagtctgtacccctcctctgccagtttttctgttggaatcactttttttattttattgtggtaaaattatgtacagctggatgcacaagcattgcagtccaataagtttgcctatgtatacacttgtgcaatcccagatcaaaatacagaacacttccatcacccagaacctttccttacatccttttcaagttactttgctccccaatgattggcttctattacatggattcagtgtactgttaggatttctttgtatttatagaataagtgacagctttatgatgtacctttatatccaagaataggaaaaacaaccttttcatttgttgaagtctcattttgagttcctgatagcatttttaaacattaaaatatttttttgctgttttatatatttaagtttttttttttttttgctggaaatggcatctttttttccacttttatcttctatctggttatatataagaaagctttttattttgtatattagttaatattttatgtatttaataagccccctgtagaatatttattatttctaatagttctgtagttgaattttttatttttcttatgtcatgccagcttttttgtttcctttgatttttacctcctccctcccccaactttttatactcttatattttttcttattgcatttatagtggtgattttagaagattatagttttcctccattatatgtaaaacgagccaaaatatctgtttatctgttgagtatttaaatgttatgaataataatgaaattagggagggattatgggaatacttaaagtagtgtgaagttttctctctaaagttaatgtaactttaaatgaattgtggttttcaaaatgttaaatggacaagttggggatcacttgatagtgaatgtaggattagcagttaactgccttgtgtcttatttgatgatacagtcatgcaccacatggtgaggttttggtccattacagaccacatatgtgacagtggtcccataaaattataccatatttttactctattttttctatgtttagatacacaaatacttcccgttgtgttacagttgcctgcagtattcagtacagtaacatgctgtacaggttcgtagcctagggtcagtaggctacaccatattatagcttaggtatgttgtactatctaggttggtgtaagtagattccatgatgtttgcacagtgacgaaattgcctaatgatgcatttctcagaaggtatccccgtccttaagcaaggtgtgactatatatatgtataggctgctttctatgtgcttagcacccagaggcagctcccggaaatataatttagtctggtgtcagagagcatgcagtcaaagtagaagtcaagatatgagaagtatgaagtgaatgaatatagacaggagggtcttaagcttggaaaaatgcaaaaatcaagtcaggaaagcacaggagtgagagggtgcaaagagtgagtttgatttggcgactggattggggcaggtcgctcatccttaggaaaatatatggtagttaggtacttagctgaacttcagtagagatcgcattgcttaatggggattaaatagtttattttctgtctcttcttcccttgccctgctcccaccaaaaagctaaggcagttttctgctgaaggacgcatacatcgttaagtaagctagaaacaaaaagttagaacctcgggaaaacaagtatccagactatcctaatggtataggagctagtgcatatttggtgcctatcatataccaggcactgttcttgtgctttatgtatgttaaattgtttaaacatcccacagcaaccctacaaggtgggcactgttactcccattttatacatgaggaaacaggcatagagagattatatgggaagttggtgatcttgttgggtggttttattaaagtgggaagaaagaagccaagttgaagatggttaaaaaacaatgaatgatttttctttttaaagacagggtctccctctgttgcccaggctggagtgcagtggtgtgatcatagctcactgcagccttaaactcctgggttcaagtgaatcttcctgtctcagcctccagcctcccgagtagtagctgggactcggctggcgaatttttaagttttttgtaaagatggggtctcactgtgttgcctaggctggtctgaaactcctggcctcatgtgatcttaccacctccacctcccaaagtgctgggattataggtgtgagccaccacacccagcccctgaatgaaacactttgaaaaagagtgagaaatgagcaagtgctgacacagtgggtgcagaccactcttttaagattagctctgaagtgaacaaagaaatgggttggtggataaaggaaattgtgaggctcagaaaatgagtgaaaatggcattgctgtatgtaggaaaggggatgcagagtacaggtagagagtttggccctcagtagaggagagatcttttccatctaacaggaggaaatgcagaaaagttgtgtgcccttgcgaggaagtttggaagttggaaggtgaaggcctattctcctggctttcatcttctcttgtggtttctgtttgctcaatgaagcatgagattcatacgggcagaaagggatgggagtttggggagtttgaagcagtttgccaagaagtattgattgttcatttaaggtttaaaatcttgactttaaagtgatattagtcagcctggttttgtgacccccctccccccagcattatttagctgattagttacaggcacagattaaggcaggtagttgaatttacccagggtgagattttgccaggtgtattagagttctccagagaaacagcaaatcggagttataggtagatagactgagattttaaggcatttgtttttgtgagggctggcaagtctgaaatctgtagggcaggcaggaaattcttggtcaggagttaatactgcagccttgaggcagaattttgtttttctcagggaaacttgtttttgctattaaagccttatcaagtgattggatgaggcctacccacggtatcaaggataagctcctgtacttaaacttgactgtttgtagatattaatcacatctacagaataccttcacagcaactacattagtgtttgaataactgggtactacagactagccaaattgacacttaaaactaaccatcacaccagatcagttcaaaagaaggaaagggggacaagggaaataaggaccttttaactagaatgcttattgtggggtggtggttgagtgtgtaactggccacagggtttgagtaagttaacttgaaagattgaatgccatggtcagagtggaatacctgaaagagagatttcacaagtatgataattattgacattaataatgctcaggttaactttgggtgtgggcttccgaggtggaattcagagacaagtcctgaacgtgaggaggccaatgagttaaagagtctgaggtattaaaaaagggtcagtctgcatgcatggtgaaatcagcaactagtgagaggagtaagggtacgtactgtaaaccagttgtaatatcctcaatgaataaggaagaattggagggaggatagacgataacaagaaaggttaaaggtagtgtaacaggctaagtttgcttgtcacaaattgggaatttcagaaggccaagtaaaggaattaggatgatgaagaattgagtcaaatggaggacgtacacagcagtgtggcagtgagaattcagggaataatagataaccagggagagctggattttttctggtgaccataagcagggatgtgaggtatgagaggattagtcctgatacaggagatggtggttatcacttttagtgttgtaggactctgtggcagtgctttcagattgttactcatgacccattagtaggttatagaattttgggagatcacaatttctgttatgttgttaaaagaaatgaaatagaaaataccatagtgtgtcatgtgtaataagggactaagcattttttaacggttttattgagatataattcacataccattatggttatctatttgaaatatacagctcaaagcttttttagtatattcctggaataatggagccatcatcacaacctaactttagaacatgtttgtcaccccagaaagtaacctcatactcactagcagtcactccccatttcttcacacacaccccctcctctccctggccctaaacagccacttacccactttcttctctatagttttgttcattctggctatctcttttttatttttttgagatgacgtcttgctctgttgcccaggctggagtgcagtggcgtgatcccggctctctacagcctccacctcctgggttcaagcaattctcctgcctcagcctgccacctgtagctgcgattacaggtgcctgccactaggcctggctaatttttttgtagttttagtagaaacagggtttcaccatgttgaccaggctggtcttgaactccttacctcaagtgatctgcccacttcagcctccaaaagtgctgggattacaggtgtgagccactgcacccagcgcattctggatatctcatataagtggaatcatacactgtgcgatcttttgtgactggcatatttcacttagcatgatgtttttaaggttcatgtatcatgtatcagtacttcgtttttgtttttttttcttttctttttttttttgagacagagtttcacccttgttgcccaggctggagtgcaatggcgtgatcttggctcactgcaacctctgccttcctggttcaagtgattctcctacctcagcctccctagtagttgggattacaggcgcatgccaccacagccagcttattttgtatttttggtagagatagggtttctccatgttggtcaggctggtgttgaactcctgacctcaggtgatcccccacctcggcctcccaagtgctgggatttcaggtgtgagccactgctcggccttttttttttttttttttttttttaattagatcaggtcttgctctgtcaccctgttacccaggctggagtgcagtaccatgatcgtggctcactacagcctcaaactcctgggctgaagcaatcctcctgcctcagcctcttgagtagctgggaccacaggcacatgccaccacacctggctaattttaaattttttgtagaggcaggctctccctatgtttcccaggctggtcttgaactcctgggctcaagttatcctcccaccttgagctcccaaagtgctgctgagattagaggcatgaaccacagtgcctgaccttcatttctttttatggtcaaatattatttggttgtacgatatgccacattttatttacctacacttcatttgatgggcatttggattgtttccactttttggctatagtaagtaatatagtacacaagttatgaatatgaacatttgtacacaagtttttttgtgttttttttttttcatttctcttgggtatgtatccaagagtggaattgctgggtcatatgggtaactctatgcttattattttgaagaactgccaaactgtttttcaaagtggctgcaccattctacatttccaccagcaaggtgtgaagattccaaattctccacatcctattcaagcttgttattgtctgtcttgaaaatagccatcctgatgagtgtgaagtgatatcccattgtgattttaaattgcacttccctgatagctaatgatattgaacatcgtttcatgtgcttcttggccacttttatatcttctggagaaatatttcagattctttgcctattttaaaaattgagttatttatctttttattacgttgtaagagttttttttttttttttaagagatggggttcttgctctgtcacccatcctggagtgcagtgatgcaacctgggctcactgcaacctcaaactcttgtacacaaatgatcctccctccccagcctcacaagtagctaggaccacaggtgtgccctgctaatttttaaaattttttgtagagatggggtctcactatgccgcctaggtgctgtaactcctgggctcaagtgatcctcccaccttggcctccaaaagtgctgggattacaaacatgagcttcctcgcctggccaaagagttctttatatattatagatacaagttgcttaacagatgtgtggtttataaatattttctcctgtttcggaggtagtctttttactttcttgatggcatcatttgtagcacaaaaagttttaatttcagtgaagaaatccaatgtatttgtttttcccttgtgcttttggaatcttttataagaagccaatgcttaactcaaggtcgtgaagacaacttctgcattttcttctgagttttatagttttagctcttacatttaggtctgtgatccattttgagttaattttatggtgtatggtataaggaaggcatgtgaggtaattcttttgcatatagacatgcagttgtcctagctccatttgttgaaaatactgttctttctaccaaattgtcttgggcattcttgaaaaaaaggcagatttatttctggactctgaattctattccattgatctatgtgtctattcttaggttcccacagtgtgttgattactgtagttcagaattttttgaaagttgtgtttcacatagatgtgtgagtatatttatatatagatacacacagaggtgtgtgtgtaatgggttatgttggaaaatgttggaaaacctatggtgtctccccattagagttcacttgcttgtggcaacttagtggagtatgttccctctcaggtaatatacagagaagacaggttagagggtctgtctgtgagtgtatgaattccttttagattggatgactgatttttcttactttagtaaagttttcaagtgcatgtggactgaagggcagtaaggagggcatagaacagctatgggaattcctaaagaattcatcagagatgaatgtaacgattatggagtgaagtatttgaaattttgaagttagcagggttttgtactgtgccagtctttcatgattaaaaaaaaaaaacttttttgaatatattaagcatgtctgtgtcggataacttaagacattatataaggaaaattatatagataatttaaggtttgggaatgatgctatctccttctagagaggatttttgttgactttggcaggaggcaagctagtggcactagcaatcccgaatcatcttaatccagtcagagactatgatgtttcaaaactgggttccggagtctacgaaggctggtctattttatgttttatttacttctaggtatgaccccttggagttttagcataaagccaggggtgttatcagccccacatgcccccacccccacactttcttgggcccttaactccaatatttaatcctctctagtcatgtaaatctattgcaagttcaagctcagcttctcagccacctctttggaattggcagatcccttcagggggagaaatggccccggatgccagactcccttatgagcttttccttactctcccagatcttggtcttcatgctttttcactaccttggcactctgatgccctcaaacaggttttttggttttgatttttaaaacattttttctggggacttgggcaggtgtccagtttttctagttgctcccagtacgataattggtttgaattatctagttcaccattttaaggaaagtgatttgttaggttgatcaaggtttatgtcataagattctctgtttgaaattgtagtatatgtggtttcagtttttcctgagggtaagattttgggtaccagtttctacagattatagaaattattagaaaagggggaaatagccttaggaatagaaatgggaggggaaatggcagagaaaactagatatttttgcaaagtttgggaaaggtaaaggtatagggtaacattttcatgtctattaggagtgtaaaagggcagtcatgtatcaaaggcgctgacatatttgttgtaatgatattgtcataattaaaaggctgtagaatctaggtattgtgggagtggctttgagaagtatctacttagtcgtgttgaataaaatttttaaatttcgcagagaaaccctaggatactgagtcattaattgaaggagtcaactttggggctggacttatggttgtgtcttatagcagtataaatctgcgcagccagtagtatgtaagggattgcagaaagaatttaatttcatagaacccattattaatatgagagatacaaaatgatactgattttgatttagcatgccatcttcatttatgtatgaaaataaatgtaaggtcttaaagggtttttgtttttgattctctaagctattcccatacttcttaaatttcaaaattacaaagttttccatgcatcttaatcattataattgaggaaaaatggtatatctttaatagccccttcttctcttgagaaaatgatagatactgggtgtatttcagaaggttttatcagcagagttttggttgatattttaaactttttgaggataggaattgtgtagtaaaatgatgccctctcttttttggctccatcttccagtatatgtgtcataggaacctggtttaagttcagtgtgtttctttgttacacctgtcagtagaatcggctattactgttttttggttccttacaactgaacattttggtcaccgtccttacccactttttaaagtgacttcattctcccacatcactcccaactgaagaatgttcagacatacacattgaaagaatattatggtaaacacctgtatacttcatttggatattgtggttgttagcttttttgtcatattcgtttatgtctctcctaaaagtaaacacattctcttacatatgtcatacttaagcccttaatatctagttcatattcaagttttgctaattattcccccaaaaggtcagtttgtgcggcaaccaggtactgtgatttctcacctagtttccatagctcttgtgaaggtgttttcgtgcatggatagtgttcaaattgatgtttctgttaggggacaatcactggagagtcctattcttccatcttattctgcccctctcctccaaaaaggtcaacttgtaactggttttttcaaaccagtattcaatcagtttatgaactacatttgatcgttgttgctttagtcacttttaacatacaacagttgtcctgttttctattttttttttttacactcatgatattggcttcttgaagagaccaggccatttgtcatatagaatgtttcccatattttggatttgtctgattttcttgtagcaattaacttttatctgaattcccactgtatttcctaaagtagaagattgagcctaaagactggattatatttagttttttttggcttagttactcctgtgtacgttatattgactcataacacaggcatcaggtggtttgcctaaagtgtgatcatttggtgttaagatggtattcaccagatctatccattataacaatgggtttccccttgacaatcagcagatcagtgagatgacattttggttccctttgaatatcctgttttccagcagccttttacctgtgtgttgagtgtctcttggtgagctttgaatcagttatttcatttgggcttgcaaatggtgtttttttgtttttgttttttgtttttctaaccctatcatccttttttttttttttttgatatggagtcttgctctgtcacccaggctggagtgcagtggcacaatctctggtcactgcaacctccacctcctgggttcaagcgattctctcacctctgcctctcgagtagctgggactacaggcacgtgccaccatgcctggctaattttcatatttttagtagagatggggtttcaccatattggccaggctggtctcgaactcctgacctaaagtgatctgcccaccttggcctcccgcctatcatccttcttgatcaattaatattaaccagctttcctctgttaagaagacctttccctcttgtcaactgggattgaactacagttcttcctaacaagatgagataaatgtttatttctcttcaatataccaactctttttaacataccaattttgaaaatttaaccaatttggagtagtcatcttcaaaaagtggcacataactttcagtctctcggtatcacagggatttttgttttttttcagaagttttatgatcatttcagtcattctttttaaaatagtcttcatttgtagaagttttagttttacagaaaaattgagtatatactacagtttccatataccccagacccaatttctcctataattaacatcgtatgtttgcatggcacatttattacaattagtgaaaagtattggtacattattaactaaaatccatagcttattcagcttttcttagtttttagctagtgtttttgtttttgcaagatcccatctggaataccacattacattttgttgtcatatctccttaggatttcttagctgtgagtttctcagatattcctttttgtgattaccttgactgctcaaatattttgtaggataccgttttattggaatttgatgtttttctcatttttagactggccttatgggtttctagaaggaaaatcacagaggtaaagcatcatttcatcacatcctgtcaagggtatgtactgttaacataatttatgacttgattttgactttgatcacctggctgaggtaacgtttgtctgatttttccattgtaaagttactcttttttcctccttttcatactgtagtattggggaaaggtgaccatgcacagcccacactttagggagttatgtcctgcttcttgacggcagagtatctacataaattattaatatttggaatccttctgtgcaggagatttttattttctcccatttagtaatttattcagtcatttatatcagtatggactcatggttgcttattttatactttgggttatagtccaatactattaatacttaattttgctacacacattgtttcagatttggccattgggaacccctttagttagctcctgtgcctgtgacatacttccatcggtgtgggtgttttttgagcacttactttctggcactgcaggatactcccagctcatcttgtatgttttctaccctagtcctgggatcagccatttctctaaggagcactgtttcctttaattagaaaatggtattagaaacaaagatctaggtgcacttgttgctactgggatgttgtgttttaggtactctcagcagatagagcaagtaaatatattcgtatattagaaatatctgtatatcttataagtatttaatattatatatcagtatttatatgtgcataaatatttgtaaccatctgtatctatataagctaaacatgaattcttaatgtcttcaactctaatctattaccatacggatcattcctggtcctccccttactgaccagtaaatttcctccaatagcgggaaacctgcctcccagcacacaccatttatttacttagttgttcaattccaacataggtcttatagcagtatgagaattgttaactcacacccaatggaaacagctgtatcaactaggagggttttttgtttgtttgttttttgttgttcaattcttcagaaatttctaagtggacaatcatgtcatctgcaaacaaaaacagttttatttcttctcccccctccatctgtatgccttttcttcccttttattgtcttattgcagtatttaggactttaggtatgatgttgaataggagtaatgggcggagacatttttgccttattcttgttcttggggggaaagtatctagtttttcaccattaagtactatgttcactgtagagggttttttgaggggagtagagtagatttttttaaaaaatcgaattgaggaaattcttctccattcttggttttctgaccattttcatcatgagtggtgttagattttgtcagatgctttgtctgcatccattgatatgaccatttgatttatcttcattagcctgttgatgtggtggattagggttatattagtagattttagaaccagccttgcatacctgggataaatctctcctggttatggtgaataattccttttctacattattggattcaatttactaatattttgttgaggatttttgttacctgtgttcatgaaagatactggtctgtagctttcttttcttacaatctctttgttttattattattagagtaatgctgctcttttagaataagtcaggaaatgttccttctgtttttattttctgcaagatattgtagagaattggtatcacttttttccttaaatgtttggaataattcaccagtagaactgttcaggcctggtgttttctgttttaaaaggttaataactgttgattcaattttgtaatagatacagatctattcagattattgatatagtttctttaatagttaacaggtttgttcaggttatctgtttctctttgtgagaactttggtagattgtgtctttcacagaatattggcttatttcatcttactaaatttttggtgtacagagttgttcatagtattcctttgttgtacttttaatgtacttgggataagtaatgatgacccctcttccatttgttacattagtaatttgtgccttctctctttttcttcttttgttttttttgagacagagtctcactgtcacccaggctggaatgcagtggtgcgatcttggctcactgcaacctcagcctcctgggttcgagcgattttcctgcctcagccttccaagtagctgggattacaggtacatgccgccatgcccagctaatttttgtattttttagtagaaatggggatttcaccatgttggccagggtggtcttgaacttcttgattagtctggctagaggtttaacagttttatttatattttcaatgagccagctttttttcttttctttctattttcctgtttttaatttcactgattttgactgtaattcttttttttcttctgctcactttaggtgttactctttttgatgatcagttgtctcacatttggccagtgagagtctcttgaggtggctgctgtgtccattttgatctgacctggttgatcgttgaatgcttccttgctttctggcaggataaaatgtttttcaacctgtacttatcttgccttaacctgggacactccatttctttaggaagttggcttcagtcttaattttatgtgattgctcacttctttcatctaaactttaaacagatttgacacattgagatcagcacttttgcctttttttggtagtcaacaagagcaactgaggtgtcctgttgatgctagtatttaatgtgtcttaaaacttgtcttaaaaacagaacattttcctgttcaatttatataagcaaaaagacactttaactgtatccagccaaactcttctatggcatctctgaaagtaatttatactttgccagtttgtacttttgctaagagatagttgaaaaccacacctttttaagaagttcagaaattgaggatgcggtattctgaattatctaatttgatttttctgcatctctacaattgtttcattacttagtaaagcgtttccaactttagcttcagggtttttcttttacttttaacaaatattatgtgccaacacttacaaatagtaactcatttaattattttaaccttgctggtagatatggttattctcctctctccctcatagatggggaaactcaggcaagatgaagttaagtaacttgcgcaggctcatacacgagtggcagggccagagtctgactccagacagtcggctccagacgccaaactcctagccactgctttgtgctgcccctctttcctctgctagttaagtcgaaaaagttgtttgtgattctgcatcttgctttcctcttctcttattaattatagtataatgggtgtcactcttattaccataagccttagtatggcattgcgagcaccagttaattaagcaataatgttttgagatccctaattggaagaattcagagcggtatattgctttgagctagttggccctttgctgcaactctggccatgagacgttatcttgaatagtgataatgtgtaaaaagatgaggcctccttttttaaaaaaaaaaaattaaattcatttagagtatgaattttaaagtagtgtagtcagtgatgatacaagatcaaagaataagtgaaaacacttcataaggcacagagagctaaatgtgtgtaactgttttattggtgtacatagttactgctggaactacagaggaagaatcattattttatgggaagaacatatgttactggaaatcctagattcttagatcacaattctaaattccagttctttgatgtgttaacatagggtccattgcatcctatttactggtttatttttatccttgctctgcttcttcataattgtaattaagtaaaactttggttccccaaggtcagggcatactctttttgaaaataatattaactactgctgatgagaggaagagagcaacaggaagcatttaaaaaaattttttttaaactaacggcaaatatagaatatttaggaaaaaggtaaagattaaaagtacctatagctagtaatattttggtgtacttctttttatgtattttgtgcacatgtgagagagatttatatacatgggtacacacatgtataatttgtaaggatacaaaaatcatattagcttacgttaattgaggactagagtactgataactgcttttatttaagtctaggaaatagattttttttaaaagaaatgtattcttaatagagaaataatttttataaaataagagatttgcagcattgctttttttgtataagtatgctaagactaccatctctttatttaacaggaaggagttttaaactttaacttaataggaagatgtttcaggggttctctgaagtcaagaatgttttcatataatactagaagtgttatttgcctttttcatgtctgttctcaagagtttttctgaggccatgtgacttgccctgtgatgtggcaacagactgtatagaagcaaatgagagaacccagctgtctgaaattaagccagaccataaagggatttgcagaaatgtaaaacaatgtgtgagaaacgcattcacccgtccaaacccaatgaatggactcagagacataaagaacagcggaagtgagactttcaatggcagtcttgcaagatcaggtgtctggtaggcaggcacacccggggcaggtacagcaggtaatttatctcctagcacgcaggtcccttccccagttcctcactggtcgagtactatggggttacagtcttcccggacgttgcctaagtttcattatcccccttaaaaggttatactccagtccccttccccacttaactttcaatttcccaatagcaaaactttcttcccttttatgggctgacccctcctctacattctgatcacttatcatgactttataggtgcatgagccatgcgatttgtcacatccgcaggctgactgccagtacttagatttctttctcggtctagaatggatggattgtcaatggtaatgagtataggattgcattctaaattgtggcagttatttggcagggagcccttggacagatgtagtttattcttcaagggtctccagcttagagttacccaccccgtttactgtccaaccctgaaaatgggtagtccaccatacatcatcccagctgggtggggcagggtgatgctctactgtaacctgtatctggttcagggcaaagatacttatctgcctgcaagagctatccctgattttccaaattcccacaaggtaagacctggcaggcatcaaatcttacagtctgggatgctactgtcttggttacactaattaccaacctcattggatagggaggagtcccctgccagtttccattttgactttctgctttttgtatagtagcccatcccagccatattaacttcgagaaatggggccaacccatgttttctttttagatttttctcagagttaactttaagggttcctcagtgcactttccgctagtcttttcccctcccttccagggtctcttttaccaatcccttgactcaaggatagtgagtccacccctgttcagctgtttgcacagctgtcttagtggggaccttcccagcttgggtggagcttgtcttctttccaaatcttaatcagcaccaagttgccaggctggaagtggtgaaccgtgaactcaagaggtggcatttgagtcagaagtcctcttaacctaagggatgacagggtggaggatatggccagtatataatttcttaagcattgatccatggtttccatagtagggaggatctgtagctctgcccaaatatgggagcccctataataactcatagggggataatcccaagtattttcttggggctgtcataatcctaaggagtactattgggagacatttggtccagggtattttagtttctagattagtttggtgattatgctttttgagagtttgattcattctttctacctttccagaggaagggggatgccaaggggtatgataatctcatctaatttgtaaaccttccataattccccttaacacccttgagataaagtggctcccattgtttgaatcaatattttctaccaggtcaaatctaggtacagtctgttctaatgttattttgaccacattactggcagtggctgttggaaggggaaaggcttccacccagctggaaaggtgacctacaatcaccagtaaatacatcagtcttcctcctttgggcatttctgtgaaatctacttgaatgctttgaaatggtcttagtctgggaggtcttcctcctgtggcctgttttctgatcacctttttgtttatcctttgacaagttacacaacttccacatacttgtttagcaggggtataaatccctgtacacccataccctgttgcatcatgcagagtcggggatccccaatgactccttttgtgtaatatagacgttagctctctcatcaggggtttacttatttttcttccatcgggaagtatccatctcatcttcagtttgagtgacccctatcctgtctaattcttccttctcctctctgataaactggggccttaatactaccttagggatgtctgggatcaggctaaatagtctaatttcttcctccagggaggcttgcttagcagcttcagctgcaaacctgtttcctacagcttctatagtgttccctttctgaaaaccatttacatgaactatggctgcctctgctggaagcaagaggctttctaaaacctatttggccagttccaaatgtaccaattattttctcctgctatttattaggccccactctgtccagatttttccaaaagtgtgtaccaccccataggcatacttaaaatcagtgtatatagtgcctttttggccttcagggagccttagggcctggttaagagcatataattcacaggtttgggctaaccagcaattaggtaatcttcctttctcatataaggagtgtttatttccatcaatgacaccatcaccgttatgtcccttgccatctatcactggaaacagcccatccacaaacagccttatctcatcatgtagtagagcttccctaaggtctggtctaactttggtttggtattctgtgatatctaagcagttatgatctgatgtctctttgttctcctctcctttccctagaaaactgtctggattcaggcaagtatttgttgttacgaccaagtcatctttttctagtaatacagcctcatattttagaatccgagaatcagttaaccatcttccagctttttgatttaatatattcctgactaggtgtggggtgcttactattagggccccaccaaaggttagctttctagtctcctctaccagcaggtctgtggcagctattgtttgcacacatttgggctacccttgagagacaggattgagaagcttggagacaaaagcagcaggttgccttttcccaccccatatttgagtgagcaccccaagggccatgccctggtctactgttagaaacaggtggaatgggttctctaaagatgggagggccagggctgtaatgagggcctggtttagctctttcactgcctgaatttcttctgaggaccactgcaagtgatcaggttcctcttctaataacttgaccggccggatgcaacagggaaagaagaaggagtggggacacggggcagagccagtcctcctgtttggggcctgggcctaggaaagctaactaggggcaggaaaggggagccccaggctgtggatgcctcttcgggggaacgttgggtcagcaacggccagaggaaatcctaaggccaaacagtatctgtggcctccctacctttgggcatcttctggtcgccaatttgctgcaagtcacagctcccaaatctggttgtgcaggctccaaagcagtggagcctggcgcttctgccatctccacctcctggatctcagagctgctggatggctccacccaccacccgctgagctggccccacttggggctggcattggtggacagcatgttccgggcgcctctgctcctctttgctggggcctgcacctttcccggctgctgactcatagatgtcagagctgcaggacggctccacagaagccctgtgtttaggacacctcattagtgaaggagagcggagagtaaacccaaggggctatccagaggaatgtcagatggagtctctttggctccctctttcctttgtcccctaagcctagaatttctgtttctcattttcagtcagtctctgtgtctgagcttttccctgtgtactcaactccccaactggagatttcttgcacaccccgagaatcgctttgtctgtctctggccgtttccctcgcagaacggaactgcagattgggactctgcacttgccttgtatctgggatatgtctcagtcacacacactcgacctccaaaaatgcccaaccaccaaggcagtacttagagtccaattttcctaccttggcttgtgcatgaggtttcctggttgctgcagtgcctgcttttctccgtatgtcacctccactgcctcctgaataacagtctcaggtttgtctatggcctttgcaaggagctgggacactcagacagagcgggccacctaaatcgggtgagatgcatctcccttttcggccggagtctgactctacgcaggcataaagatcccagacgggcccccaagtttgtaagggaaacattcacccgtccaaacccaaataatggactcggagacgtgaagaacagcggaagtaagacttttagtggcagtcttgcaagatctaggtgtctggtaggcacacacacccacagcagttacagcaggtaatttatctcctagcacgcaagtctctcccccatttcctcactggtcgagtactatggggttacaatcttcccagacgttgcctaagtttcattatcccccttataaggttataccccagtccccttcctcacttaagtttcgattttccgatagcaaaactttcttccctttcatgggctgacccctcctctacattctgatcacttgtagtgactttctaggtgcatgagctgtgtggtttgtcacatctgcaggttgactgccagtacttagatttagcatgccttgaaaatggatcatttaaaatgttttctcacacaatggcactcttttcaccaggttttccttttttttaaattgtcgttttccatcaaaattctagttaatcatgcagtggaggtttattatgtttaaataaattttaaaaagtttaagtgctcacttctgtctaatatattaaatattgatatatcaacataaataaaagcttctgttaacaaagttctttgtttaaaaagtataaaggaatagtgataaccaaaaagtttgacagctgccatattatataatatcaaaaaattatttattacttactactcatctcaccagcaaaatcattggatcctgcacagggatagatacaaattttgcaaaattttaattttcacttgatagtttgaattttttcattggcaataaatactgtcatttatttttcttgaagtgataggcacactttgttcattttcaagaaaatgtcttccacataccctagcccaaataacatagtttgtgtgtcattctttcaagtaaaaattgtattatttaaaaacatgtctcacaagtgcttttcctgcaatggcccctgtacttcagtatatagcaacagtgcttatgtatacttcccatttcatcataacagataatgtggatattcctcttttatatgtgctacaccagaatttaacaaggtaactgcagggagaatctgaaactatattaataaatttttcatattctattatattaaaatccatttgtctatcttgcgttttaaatgagtgttttgcccatgtataagtttgaaacatcatgtattagtcattcggaaaatactgatttagtgaggcctgcagatctttcagatgtgtttctttataccaccattgtcatagtgtggtttgaggactgacaaggctggcagaaaactccatctgtatcaggtatttgacggtcaagatttatgtaattaagaatttttggaaatagtaaaattgttaaatttctaccctgactgatgagtattaaaaaaaagaaccacagattatccgtatgtggagtgaaagatggacatcacaacatatatggcagatattaaaagaataaaggaatattataaacactcaaaagctaagaaacaatgtagatgaaatggaacactcttttaaaaaatattcattgcccagatttacacaagaaaacagctacgtatttattaaggaaattaaatttgcagtaaaaaagttcctcacaggccctgtgatatcatgagggaataatttgatgtggctcctacttctaaaagcagcaattctcaaactttttaagagttttggaatgtctgtgttgttaaaaattattgaatatctcaaggtgctttatataggctatagctattgaaatttactttattagaaattaaaactaagaactctaaaaaatatttattcatcagttcatttacaaagtaataacccagttaaagttaacataaataacattttatgaaaaataactttttcaaagaaaaaataatataacctattgtgataaccctgtgggttgcttagcccctggaaaactgctgtacacatgtaagagaatgccagtgaaaaaggcaaaagataggcatttctggaatggaacttttatttctcagcactttataggttttttaaagagaaggtgttgctattgttgtatcagataacacagatattaaaccaacaacagtaacaaaagacaaagaagggcattatataatgacaaaggatttaattcaacaagatttgtatctcctaggtatatatgccatacccagtgttgtagcacccacatttataaaacaaatactactagacttaggaaaacgagacaaccacacaatagtagtggaggactgcaacagcccactgacagcgctggacagatcaccgcagaaaactaacaaattctcgacttaaattgaagttttgaccaaatggacgtaatacacatgtacagaataccctacccaacaaccacagaatacacattttactcatctgtgcatgctctaaaaatgaccacatgctcagtcataaagcaagtctcaataaattcaaaaaagcagaaatcataccaagcatctgtttggaccacagttgaataaaattagaaatcaataccaagaataactctgaaagccacgtaagtacatggaaatgaaacagtttgctcctgaatgacgtttggctaaacaaaattaaggcagaaatacaattttttttttggaacaaatgaaaatagaaaaaatatatgaaaacctctaggatatagcaaaagtagagttaagaggaaaattttagtgctaaattcctacatcaaaagaaagatctcaaattaacaacctaacattgcccctaaaggaactagcaaaataagaacaaaccaacctgaaagctagcagaacaaaagaaataacaaagattcgtgcagaactaaacagaattgagaccaaaaaattacacacagaatcaacaaaacggaaagttctgtttgtccttctaaagggtaaacaaaattgatagactgccagctagatgaaccaagaaaagagagaagattcaaataagcacagaaatggcaaagatgtcattacagtggataccatagaaatacaaagatccttagagactactgtggacatttttatgtgcacaaactagaaaatttagaggaaatagataaacatctggaagcacacagccttccaagagtgaaccaggaagaaatcaaaatcctaaacagaccaataacgagttataacgttgaatacataataaaatctaccaaccacaaaaagccctgaaccaaaaggattcatagccagattttactagatgttggtagaagagctgataccaatcttactgaaactattccaaaaaaatcaaggtggagagatatcctccctaactcattctgtgaaaccagtatcatcccaatatcaaaatctagcaaggacacaacaacaaaaaagaaaaacagaaatgcaggccggcatccctgatgaagatagaggcaaaaatcctcaacaaaatactagcagactgaatccagcagcacataaaaaagataattcaccatgatcaggtaggttttttcctagattcaaggatggttcagaatatacaaatcaataaatgtaattcaccacataaacagaattaaaaaacaaaaaccatattcttatgcagtaaaatccagcatctctccatgataaaacctcaacaacctaggcatcagaggaacatacctcaaaatagtaagagtcatttatgacatacccacagccaacatcatcctgaatgagcagaagttgaaagcatttcccctaagaaccagaacaagacaaggatgtccactctcaccattccttttcaacatagtactagaagttctagccaaagcaatcagacaaaagaaataaaagatgtccaaataggcaaagaggaagtcaaattatatgcttgttgatgacatgatcctgtacctaaaaaaaccctgaaagattcccccaaagactcctggacctgagaaacaactccagtaaagtttgaggatagaaaataaatgtacaaaaatcactggcatttctatacaccaataacattcaagctgagagccaaattaagaactaatttacaatagacacacacaaacacacacaccacacacacacaatatctagaattacatttaaccaaggaagggaaagatctctacaaagaactgtaaaacactgatgaaagaattcatagatgacacaaacaaatggaagaaacatcccatgcttgtagattgaaagaatcaacattgttaaatgaccatactgcccaaagcaatctacaacttcaatataattcctatcaaattaccaatgtgattttttttcacagaattagagaagacaattctaatattcatgtggaactacaaaagagcctaaataggccgggcgcggtggctcacgcctgtaatcccagcactttgggaggccgaggcgggcggatcacgaggtcaggagatcgagaccatcctggctaacacggtgaaaccccgtctctactaaaaatacaaaaaattagccgggcgtggtagcgggcacctgtagtcccagctactcgggaggctgaggcaggagaatggcgtgaacccgggaggcagagcttgcagtgagccgagatcgcgccactgcactccagcctgggcgacagagcgagactccgtctcaaaaaaaaaaaaaaaaaaaaaaagagcctaaataggtagagcgatctaagcaaaaggaacaaagccagaggcatcatattacccaacttcagactatactgcaaggctattgtaaccaaaatagcacggaattggtacaaagatagacacatacatcaatggaacaaaatagagaacccagaaataaagctacacacctgctatgaactgatcttcaactgagtcaacaaaaataagcaatagagaaaggataccctattcaataaatggtgctgggaaaactggctagccatatgtagaagaatgaaaatagactcctacctctcactatatacaaaaattaactcaagatggattaaagacttatttaagacctccagctataaaaattctagaagaaaacctaggaaaatatcttttgaacatttaaagaatttatgactaagatcccaaaagcaaatgcaacaaaaacaaaactagacaagtgggatttcattacagagcttctgcacagcaaaagaaacaaacggtaaacaacgtacagaatggaagaaagtatttgcaaactatatatccagtaaaggactgatatccattataaataaggaatttgaatcaatgagaaaaaataactcgattaaaaagtggcaaaggacatgaacagaccttctcaaaagaagacatacgagtggcgaaaaaaggtgaaataacgtgcaacatcactaatcatcagagaaatgaaattgaaaccacagcaagataccatctcatagcagttagatggctgttattaaaaagtaataaaataagacatgttggtgaggatgcagagaaaagggaacgcttatacgctgttggtgggaatgtaaattagtacaatccctatggaaaacattctggagatttctcaaagaactaaaaatagaactaccattcaaaccagcagtctcattactgggtatctgcccaaaggaagagaaatggttttatcataaagacagctgtgcttgcatgtttgttgcatgcagcactattcacaatagcagaggcacagaatcaagtgttcatcaacagtggattagataaaagaaaatgtggtacatatgcaccatggatactacagagccataatcaggaatgaaataatgtcctttacagcaacgtggatgcagctggaggccattatcaagtgaattaatgcagaaacagaaaaataccatatgttctttcttataagtgggagctaaacagtgggtacacatggacgtaaagatggaaacagtagacactagtgactccaaaaggaggctgagggggtagggttgaaaacctacctcctgggtactatgtgcactatttgtgtgatgagttcaacagaagctcagaccccagaattatgcaatgtacccatgtaacaaacctgcgtatgtgccccctgaatctatacttaaaataaatatactcataattctctattaaatataattttcactataaaacaaagttttagttttcttatctctgacttgtgtagtttcagatgagaagtctgttgtaattcttagtgtttctgaataagttctaggaattgttcatcttatagtttcctggcatttgccctttgcctaagacttgtgaggttttgctttacgcatgtgcaaattagtattcaaacaaaaacataagaggatccctatgccaatttctggtgctctctattctctgaatctctcttttctctctatactgccctacaaattctagtcaccttcacctccttgatctgtcgcctcaacttggcaaagtttccatactgtgtttggtgtgaccctttctgcacagtgttctggaaagagcctcctgccagaatggcaggacagttataggacttacctaatttgttttccttctgtctgttgccagtgtctgacaacagtttcttatattttgtccaatttctagttgttactgtaagaggataaatctgatcccaattactctaccatgttagaagcagaagttatattaatttttatttttagagttgcctcaagaactgctgttctaaaataaactgaaccctatttaatatataatggataatactggacagtgaaatgttttttccttaggaaaatctaaacagctgtgggtctgggttaaaacatattaacagccttgctaatgaaatataaaaagtaaaagaagaaacgttaggtgcttccaggacactcatacttgaagtacaggttgaacatcccaaatccaaacatctgaaatctgaaatgctccaaaatatgaaactttttgaatgccagcatgacgctcaaaggaaatgcttattcaagcatttgggatttgggatgctcaactggcacatacataatgcagatattccaaaatctgaaaaaattagaaatgaaacactttttggttacaagcattttggataaaatatactcaagctatagtagatttcatttttcaattggtgaatactgtttggtgcttattatgcgccaggcagtatgcttagacttcaagatgagtaaatacaacaagcattacctaccttcttggagtttatagtctagtgaagaagaggattaattgtaaaaataaacaattagaactctgatgagtacaatgaaagagaagaacttggtgccatgaaagtatataaagatacctgatttaggatggacagacagggaaagcttccctgagaagctggtagctgagctgaaatttgatacttgaaggatgagcaggagctcaatagtaaggagaaggaagtaagttgagtagaacatttgcacagcaatctaggctgagggaaagcacatgcagaagcgatcaggagagagcctggcatatgccaaggaactgagggaaggctaatgcagttggactgcagagagcagtgttttggagggagtggtggaagatgtggcaggagaagtatgcagggcctatatcacacaagactgagtacaagttattcagaatttatttattcattcattcatttattgagacggggtctctgttgcttaggctgcagtgcagtggcgctatcacggctgatcacagcctcaacttcccaggctcaagtgattctcccacctcagcctcccaagtatctgggactacaggcacacaccacctcgcccatccatttttaaaatattttgtagagacaagttctcaccatgttgcccaggctggtcttgaacttcctggtctcaagcagtcctcccacctcagcctccaaaaatgttggaattacagccatgagccaccacacctggccataattttattttttataaaaaaaaaattttacaataaaattcagatttgttcttattgggagaacagtagaagtcattgagtgaggaatcaatgagcagattttaaataagaaaacataattttgttattgtgaagaatggatagaatatggcaaacctgttagggaactattgcagttatccaggaagacatgatggtagcttgaaatgtagtcgtgtgaatggattcaagagagatttagagggaaacagtataatcaacctgttgttgataggaagagtaactcctcagagtagttgtgggtaatggaatacatgtttctaccgtttgctgagacaacaccggaagaggaccagattggtttttggatatgttgaatttgaggtgccttttgaatgtccagatggaaatgtcatgtaggcatttgagtttgaaatcagaagagagatcagaattggaactcacacttgggttttattatattgaggtagtaattgctgtgggtgtgaatgagattagccagagcaaaggaatatagaaagagaagagcagtcctgtgttttgaggaattccccctattgaatatccaggtagaatagtgaatcattaaagaagcctgcaaagaactgatttcagcaaacctaggacagtgaattattaaagaagttactgtgtattgctttcctatggctgctttaacaaattaccagttctactggcttgaaacaacagaagtttattctcacagttctagaggccagaagtctgaactcagtattagtaggctggattcaaggtgtctgtcacgagggccatgctctctccagagtctccaggggagaatctgttcctttcctcttccagcttctgttggctgctggcattccttggcttatctccacatcactccagttactgcctacacggtcagattgcctcctccttttctgtgtgtctaatctccctctgcttcttagacagctgtagtgacatttagggcccacaagataatccaggacaatctcatctcagaatctttaatgacatctgccaaaatttcccataaaagataacattcgcagcttccaaaggttaggacccagtatcttcagggtagcatttttgaacctgccactcaagggaagagaatgcttcaaggattcaattgatcagcaatgtcaggtgtttctgaaagattaaatgtgaatttaaaaagtccaatcagtagcctcagagagtggaagccagattgagaggtgttaagagttaataaggtgttttgtagctagacgttgcaagatttcttgattgctttttctctgtgagatggaattattgaagattgaaattttgaaaagaatggagaaaattttgtgttggagagaatggaaagtaattttaacaaagagggcattattgtatactcattgtatactgttgataccatgcatgaaatgatagctgaatcgtctgtcctcttgtgttactttgtccatttgcacttggatatagctacggagaaagcagcttgctgggttcatctggggttggtattttgcaagacaggaatctaaggagtttgatatgttggtttgcagtagtttgaatcctctactgcttaccccgtgaacatttttggtgtacctccactctgtcccatttagccaggatttacttaaggaatgcaaatgaaatagttggtaaaatagaacaatatcagagtaaacaaagatcacatattttcactcttaattatgggtcccctctgtgaccacaagaagcaactatagttggtcacttctgaaaattgttataatacagtccagatgtgacttagaaagtctagggtaacagatttgctttttctatatgcatttgtaaacctgcacagattttgtcagctacttttgtttttagtgctatttataactccctgttgcctttattcctaaagagctactgctgtataagatggttgccagattggccatctgctgtttcccactagtcatcgatttttcatcaggtacataaccaaagcatttcttcttttcagtccttttggggagtttcacatcagtccactgtatagaagctgatagaatattttggtggtggcattctcagcatacatttctgaactggcagactgttttcttaccaggatctcattgttgatatactgcctagcttcctaatgctgcaagattaatcttcttgagtaatttaaattcaaaatgtattttttaaatatcttctataagcaaggctacaggctgaatacttttagaaatttaaaaaaattaattaaaaattttctaccttccaaatgcatatagttcttggggagacagtgtgtttgtcaatatgcccaaaccatataattagaattacaaagagacaaggaaaggtaaaatgctgtataagaattcaggaattctagataagattgtgatgtgattgtgcatatctcgcattctgtcttcctctttgtccaccgaaatccaggtagagtcagtaaacaaaatctaagtagatgctttctaaaagaaaatcatctaaaacaaagtgatacagaagggttaaaagtttttttaaaaaatccatgaatgcttgaaaaagattgtgcaatttcaaaagaaaccaagaattgtaataatataagatgcggccaaattcaaggcagaaaacattaaacagaaaggatcattttttaatagatcatagtgggagattttaaccattgtctctgagagtaaagtattcggagaataagcaagaccataggagatactaagagatctagataaacttggcaggaacttccagtttcattgcttgacccaatacttctgtgaattacccactttatttctttattgttaaccctctctctcaactattgggtaccttctcaatttggttaatgagtcacttggtgtacagttcttgggttgtttgacattttctggtagaaagtgaatcctaagtattttgtgaaataaatttcaaggttcttgtagagtcataaagaggcaaatgaatgaaatgaattaggcacatttcttttgagtccaagatctaattctgttcacacacacgcacctttgcctatcaagcctaaccatgaagaaaatgatacgtaaacttctaagtgatatggtacacatttctgcttccaaaatgggatagatatacttttcgatagttttacctattattcttgctaagtagagctaaaatccctggacattacatttaaaaacaaacataagaaaacagaaaagtggagagaactgggtggatccgctcaggacccagataatatcacagtaaaagtcctgagttttcttattaccttatgtatttcagaatggtgcagaaaagctggcaatccagaaatgttgggcacagacaaaagccccaggaaaaaaatgatgctctttagctagggaccaggaaaagggtagcctagcaagacagaaaataaccacttcagccaaagaacatagaagagtcaccctgattagcaaagaccaagtgaggacctagactttcacagtgtttaggctgtaacaagacaactcctcactccatagtggcagcagagccaatatgggaagcagtaaccataggcagggagcctgaactcccacgtatgcttaatatgagtcccttcttcccttcagccccaagttctttggtatacaaaagcctgtgggcggcaagccacccaggcaccgaggcaagagacagaggacacgagctgttccagtacaataaaatataaaacaagaatagttataccagatatagatcttagatatgattatatatgaatgtcattaatcattagtttgtagcaattactttttattccaatattatgataatcctcactctgtaatcatagcctaggaaaaaccaggccatacagagataggagctgaggggacatagtgaggtgtgaccagaagacaagagtgcgagccttctgttatgcccggacagggccaccagagggctccttggtctagcagtgacgccagcgtctgggaagatgcccgttaccaggcggatcgtggtccagcagtagcaaaaggtgtcaaggaacaacacccgctacttagcagaccgggaatcgggggggagggtctccctttccccgggggagtttagagaagactttgctcctccacctcttgtggagggcctgacatcagtcaggctcgcctgcagttatccggaggcctaaccgtctccctgtgatgctgtgcttcagtggtcccactcctagtctgccttcatgttccatcctgtacacctggctctgccttccagatagcagtagtaaattagtgaaaatactaatagtccctgatatgcagaaataatggcgtaagctgtctttctctgtctcctctccctctctgcctcggctgccaggcagggaagggccccctgtccagtggacatgtgacccacgtgaccttacctatcattggaggtgactcacattctttaccctgccccttctgcctagtatccaacaaataacagtgcagccagacattcggggccactaccggtctccgcgcattggtggtagtggtcccccgggcccagctgctttttctcttgtctctttgtcttgtgtctttatttctatactctctcgttgccgcacacagggagggacccaccaaccctgtggggctggtccctacaaaagcctagtgagaaacctgcacttccaccccccactaggcattttttccaccagagcaatgtcaaaggaagcttactataatggaatattaaaagtagatccagtcacctaatgtaataacccaaatatccaggtttcaatgaaaaaaacctctcatgccaagaagcaggaaagtgtcagctcaaattagaaaagacagttaatacatgctgacactgaaataacacagatattagaattatttgacaagaatttttttattgtactttaagttttgggatacatgtgcagaatgtgcaggtttgttacataggtatacatgtggcatggtggtttgctgcacccatcatcccgtcatctacattaggtatttctcctaatgctatctctgccctagctccccaccccgcaacaggccccagtgtgtgatgttcccctctctgtgtccatgtgttctcattgttcacctcccacataagaatgagaacatgtggtgtttggttttctattcctatgttagtttgctgagaatgatggtttccagattcatccatgtccctgcaaaggacatgaactcatcctttttgatggctgcgtagtattctatggtatatatgtgccactttttatttatccagtctatcattgatggacatttgggttggttcccagtctttgctgttgtgaacagtgctgcagtaaacatacatgtgcatgtggctttatagtagaatgatttataagcctttgggtatatacccagtaatgggattgctgggtcaaatggtgtttctggttctacatccttgaggaatcaccaactgtcttccacaatagttgaactaatttacactcccactaacagtgtaaaagtgttcctatttctccacatcctctcccgcatctgttgtttcctgactttttaatgtttgccattctaactggcgtgaaatggtatcttgtggttttgatttgcatttctctaatgaccagtgatgatgagcttttcttcatgtgtttgttggctgcataaatgtcttcttttgagaagtgtctgttcatatgtttcacccactttttgatggggttgttttttcttgtaaatttgtttaagttctttgtagattctggatattagccctttgtcagatggatagattgcaaaaattttctcccattctgtaggttgtctattcactctgatgatagtttcttttgctttgcagaagctctttagtttaattagatcccatttgtcaattttggtttttgttgccattgcttttggtgttttagtcatgaaatctttgcccttgcctatgtcctcaatggtattgcctaggttttcttctaggatttttatgtgttatgtcttacatttaagtctttaatccatcctgagttaatttttgtataaggtataaggaaggggtccagtttcagttttctgcatatgactagccagttttcccaacaccatttgttaagtagggaatcctttccccattgcttgcttttgtcaggtttgtcaaagatcagatggttgtagatgtgtggtgttatttctgaggcctctgttctgttccattggtctatatatctgttttggtaccagtaccatgctgttttggttactgtagctttgtagtatagtttgaagtcaggtagtgtgatgcctcgagctttgttctttctgcttaggattgtcttggctatatgggctcttttttgggcatatgcaaagacacacataggctcaaaataaagggatggaggaatatttaccaagcaaatggaaagcaaaaaaaaaaaaaaaaaaaaaaaagcaggggttgcgattctagtctctgataaaacagactttaaaccaacaaagataaaaagacaaagaaggacattatataatggtaaagggatcaatgcaacaagaagagctaactcccctaaatatatatgcacccaatacagaagcacccagattcataaagcaagttcttagagacctacaaagagacttagactcccgtacaataatagtgggcgacttaatacccaactgtcaatatcagacagatcgagacagaaaattaacaaggatatccagtagttaaactcagctctggaccaagtggacctaatagacatcgatagaactctccaccccaaatcaacagaatatacactcttctcagcaccacatcacacttattctaaaattgaccacataattggaagtaaaacactcctcagcaaatgcaaaagagcagaaatcataacagtgtctcagaccacagtgcaaacaaattagaactcaggattaagaaactcgctcaaaaccacacaaatacatggaaaccgaacaacttgctcctgaatgactactgggtaaataatgaaattaaggcagaagtaaataagttctttgaaaccaatgagaacaaagacacaatgtatcagaatctctgggacacagctaaagcagtgtttagaaggaaatttatagcactaaatgcccacaggagaaagcaggaaagatctaaaatcgacaccctaacatcacaattaaaagaactagagaagcaagacgaaacaagttcaaaagctagcagaagacaagaaataactaagatcagagcagaactgaaggagatacagacacggaaaacccctcaaaaaattagtgaatccaggagctggttgtttgaaaagattaacaaaatagactgctagtcagactaataaagaagaaaagataaaagaatcaaatagacaaaataaaaaatgataaaggtgatatcaccactgatcccacagaaatacaaactaccgtcagagaatactataaacacctctatgcaaataaactagaaaatctagaagaaatggggaaattcctggacacatatagcctcccaagactaaaccaggaaaaagttgaatccctgaatagaccaataacaagttctgaaattgaggcagtacttaatagcctgctaaccaaaaaaaagcccaggaccagacggattcacagccgaattctaccagaggtacaaagaggagctggtaccattccttctgaaactactccaaacaatagaaaaagagagacttctccgtaactcattttatgaggccagcattatcctgataccaaaacctggcagagacacaacaaaaaaagaaaatttcaggccagtatccctgatgaacattgatgcgaaaatcctcagtaaaatcctggcaaaccaaatccagcagcacatcaaaaagcttatccaccatgatcaagtctgcttcatccctgggatgcaaggctgtttcaacatatgcaaatcaataaacataatccatcatataaatagaaccaatgacaaaaaccacatgattatctcaatagatgcagaaaaggcctttgacaaaattcaatagcccctcgtgctaaaaactcaacaaactaagtattgatggaacttatctcaaaatagtaaaagctgtttatgacaaacccacagccaatatcatactgaatgggcaaaagctagaagcattccctttgaaaaccagcacaaggcaaggatgtcctctctcactactcctattcagtatagtattggaagttctggccagggcaatcaggcaagagaaataaataagggttattcaaataggaaaataggaagtcaaattgtctctgtttgcagatgacatggttgtatatttagaaaaccccatcgtctcagcccaaaacctccttaagctgattagcaacatcagcaaagtcttagcatacaaaatcaatgtgcaaaaatcacaagcattcccatacaccagtaatagacaaacagagagccaaatcatgagtgaactcccattcacaattggtacaaagagaataaaatacctaggaatacatcttacaagggatgtgaaggacctcttcaaggagaactgccagccactgctcaaggaagtaagaggggacacagacaaatggaaaaacattccatgcttatggatagaagaatcaatatcatgaaaatgaccatactgctctaagtaatttatagattcaatgctatccccatcaagccaccattgactttcttcacagaattagaaaaaacagctttgaattttttttttttttttgagacagagtctcactctgtcacccaggctggagtgcagtggcatgtgatcatagctcacagcaatctcaaactcctgggcttgaatgattgtcccgcctcagcctcctgaggtctcactatggtgcccagtctggtctcaaactgctgggctaagtgatcctcctgccttagcctcccaaagtgttgggattgtacccatgagtcatggcacctcgccctgacacgaattttaaaggagtcatcaagacagtgcttcaacaagcagttatgaacatgcttgaaataaatgaaaaaaaaaaggaaattttcaacatagcaaataaatatgtaaagaaaaaccaattggaaactttataactgaaaaatacagtaaccaaaataaaatcttaatgggtaaaactgtagcgaaactgacacaaaaaaaaagaagacacaaatcatcaggagtaaaataagagatacaggttgagtatccctcatctgagatgcttgggtccaaaaatgtttcggatttcagattttttcagattttggaatatttgctttgtttgagcatcccaaattcaaaaacccaaaatctaaaaatgctccagtgggcatttgctttgagtgtcttgtttgtactcttaaagtttcagattttggagcattttggatttcagattatcagatttgggatgctccaccactctggagcttgtggacatgaaaaggatactatttttaaaaatctacagaaataaatttgacaactttgatgaaataaactaagttttcagaaagtacaacatactgcaagtcactcagtatggcatagataatttgaatagtgctacaacttaatagaactttataattttaaaatgaaaataggcccgaatgatttcattggagaattctagcaaaggcttaaagaagaatttacactatttctgtgtagtctctgccagaaaataagggaatacttcctaattcatttatgaaatcagtattattttgctaccaaaagcaaggacaataccaaaaaaaaaaacctaccaataaagaccaactcctttttaagtatagatgtagataatccttaacaaaatgttaatcagtataatccaacagtatataaatagaattaaacacaatgaccaagtggactttattttgggaatgcaagattgattcaacatttgaaaatctgtcaatgtaatctatcaatgtaaccatattaacaggatcatgaagaaaatatatcaaatgctatagaagcatttgacaaaattcaataccatttatgattaaaactctaagaaaactaggaatagaagaaaacttcctcaactggataaagaatatttatagaaaataaacagcatcatacctgatgaaagactgaatgctttccccttatgattggaaacaaggtgacaaggatgcacacactcacaactcttattcaacaaaatattgggagttccacccagcacagtaaaacaagcggggggaaagccctgacaattggaaaaggagaaatgaaacaccttccttttcgcctgtgacgtgatcatctgtttagaaaatcctaagtaatctacaaaaaatctgtggaactaataatgtagcaggatcacaagatacatttaaaaaacaattgaatttctctacgctagcaatgaacgtgtgaaaaccataattaaaagtgaaatactatttggaattgctaaaaaaaaaagtgaaatacctagatatcagtctaacaagacatgcataggacttgttggatgaaaactattaaatgttgatgaaagaaatcaaagacccaaatgaatggaaagacatactgtgctcatagattggaagactcagcatgttataaatgactattttcctaaaatagatgtaatacaagtttaacaaaatttcagcaggttctttttgtaaatatagacaaaattttcctacgatttatatgaaaagacagaagaaccagagtagctagtttttcatacagttttgaaaaagataaggtgggaggaaacactctatactcaatttcaagacttataaagatagcataatcaagacagtgtagtattggcagacagatagacacataggtcagtggaacagactagaaacccagaaatagctccacacaagtaaagccagttgattttgacagacgtacaaaagagactcagtggaggaaagtggcctgttcaaatggtactggcacagttggatagccataggcaacaaaataaaccttgacctaaaccttttgcaaaaattaactgcaagtggatcatagattctaaatgtaaaccctacaaccataaaacttaaaacatggaaaaaaaaatctctgggacatttgtgattcatttgtatcatggaatcctactcagcaataagaagggaatgtgatgtatatgcaactaatcagagaactcttaaagacattatgctgagtgaagaaaagtcagctcgaaaagtcacatatgtatgactgcatttatagaacattcttgaaacgacaaaattatagacatggaggacaaataacagattagttgttgccagggattagggatggggttatgggaacagagagggaagtgaatgtgactataaagcaggtagtctttgtggtgatggaacagttttgtatcttgattgtgattggtggtagtgacacaaatctgcacctgtgataaagcgatacatagctatacacacacactgtactaatgtcagtttcctagttttgattttatattatagtaagatgtaaccatgggagaaactgggtgcagggtacaggggacctcttttgctatctttggaacttcctttgaatctaaaattatttcaaaattaaaaaaaattttttttaaattatcctagctaaagcatcaagtgaaagttcttaagagaaaaaaagaaaacaagggaagggaaggtacaggatgtctgggaaattgtctgtgacatttaaactggtttttacccagggggcatttgccaaatctggtttcctttcctcagcatcagagagcattgaggaacctgaggaaataataaggtctttctttctgggatgatgaatctgatacgttcttcctcttcaccttaaagctgagactcagctaaactggaaaccaccaccaatcccaccatccttcaggattgcagggaaagttgattttctgcatgcttcttagtttttaatgtgcatcagaatcacatggaggacttgttaaaacaaagattgctgggcaacatccccagagtgtaagattcagtagatctggggtgagacttttaaaatttgtacctctaataagtttccagatgatagtgattttgctggtcgggaaccacactgcaaaaattatttgtatagctaaaaccttgtcggagtgaatatgggggcaagatcactgctgagaattttaagcaaccagctgacccttgtataatttgcagtgcgaatttaacgctgtgtaggtgatctaaaaaaaaaaaaaaattccctaagataatttatccccataatggcagtattcatagactggcagtgagtatccccagactcttgtagaagctaacagaaattctctttggagaaactcatctccatcccagagttgaaagttttcctagaaataaaattctaagtaagtagaacaactgtgatagtcaaaaagaaaaacataaagaaactaagcactgtgagcaggagtcaacagcagacctgctggaaaataggaataggcagctacagaatatgaagtaagtgtttcatatgtttcaacaaaagttgaaaatatgttccaagattcagaaactataaagactattcaaagagattttttaaaaatagctagaatttatacaatggaaaattatagtagttgaaactttattaaaaatcctcaatagggccgggcgtggtggctcacgcctgtaatcccagcactttgggaggccgaggtgggcagatcacgaggtcaggagatcaagaccatcctggctaacacggcgaaaccccatctctactaaaaatacaaaaaattagccgggtgtagtggcgggtgcctgtagtcccagcagctcgggaggctgaggcaggagaatggcgtgaacccaggaggcggagcttgcagtgagccgagattgtgccactgcactccagcctgggtgacagagccagattctgtctcaaaaaaaaaaaaaaaaaaaacctcaatagatgaatttaactgcagattatataaactcaaaaaaggaaataatgaactgaataattactcaacaagcattcaagagaaacagttgaaaagtacgaaagagaacttatatatatttaaaaataaatatttatctgaatggttttctgtaagagagaatggtaaacaacagttaaaagaataatggctaagaattttctgcaacttgtgaacaacactaaactatacattgaagaagcacaggaacctaaggtggttaaataaataaatccttacttagccttgttacaataaaacagcagaacatcaaagacaaagaaaagatctttgacatatctggggaggaagacagatttaccgtgaataaggtcacacccagaagacaggggaacattttcttaaattaaaataaaaatctagaattttatactaagagaataaatccagggaaattcatacgtttcttgcagacaaaaactgagcatttgcaattaggaagtcttcacttgaaatttagaagtgtgtactctaggcatgaagaaagtgactctcagacaggaggccagagatacaagaaagatcaaaaagcataagagtttttgatctttcaaccgtttttgattatattagtagtcatcatagtggatatgaagtggtgccttatggttttgatttgtatttgcctcatggggtaatgatgttgaacatcttgtaacatacttattggctgttttgggtttgtcttttttgttgttgaattgtaagagttctttcctgttttggatacaaggcctttgtcagatacatgagttgcaaatattttctcctcttctgtgggttgtctttccactttcttaataatgtcctctgatgtacaaaagtttttaatattggcaaagtctaattcatctggttttcttttgttgcttgtgcctttgatgtcatatctacaaaactgttgccaaatccagggtctaaaagatttaccctcctatcttttcttctaagtgttttatagttttagttttatattaggtctttgatccattttgagttaatttttgaacatggtataggcaacaggctaatgtattctttgtacatgttggcaatctagttgtctggcaccatttgttgaagatactgttctttccctcttgtcttgacacccttgtcagaaatcgatgaccattgacatatgggtttacttcgggactttctgttctattccattgatctgcatgtctgtccttatgccagtaccatactgtttttattactgttactgtgtagtacgttttgaaatcaaagtatgagtcctccggctttatcttataaaaaacccgacttttggttttgctgattcttcttctgttttgcttcattaatttgtgttctcatctcatcttcattattttcttccttttactatattctttgggttgatattactgctcttttcctaattcaaattattatttattagcttattttatctcttttaaaaatacgcattttaagtgtgtacattttcttcagtatactgcaccagcggatccacaggttttcattttttaagttaatttatctcagttttcatttttagtagttttctgtttataatttgctgttgtaattcagatacatttagttttgtcattttttaaaagcttgttacacatagttttgtaagctgtgatcattttagtgtttaagttctttgcaggtctttttctcttgtctgtgtcaagagtttcttgacaatttggggggctagccctatcagatatcgatatattataaaatgaaaataattaaacattgtgatattggtacaaaggtagaaaatagacagtggaaagaatagagtacccagaaccacccattccctgcctatttgaatactttctatgtgacagaacaccattgcagatcactaaggaaagggcttcaatgacttgtgctaggataatcggacagacacatgaaaaaaaataaattggataccttcctcacatcgtataaaaatcagttccaggttgaataaatacctctatgtaaaagccaacaactgtataaagcttttaataacataaagagcatattatccatgattttaaggctggaaagattcttaatcaagacacagaaagcatgaaaaggattgatcagttcagctacattgttttggaactcatctttgccagaaatctttataaggggagtgagacagcaagcctccaactagagaagatatttgcaacacataattgagaaaggactgttacaaattaaccgggtttggcagcatgcacctgtaatcccactttcttgggaggctgaggcaccagaatcacttgaacctgggagatgtaggttgcagtgagccgagatcgtgtcactgcactccagcctgggctacaaagtgagactctgtctaaaagaaaaaaaaagaagaaggtgtaaagaactcgaacagttgaactagaaagagacttcaaaaagaggaaaactgaaaggaaagtatacagaaaagatgcccagtctccttagtatttaagagaagtgcagactaaaaccaagtgagatattagttacatttaaaagtctgtcaattccatgttggtgttacccctttggaaaattggttttttttatcacctaaaatagttgaacaggtgcttatcctatggcccagcagattaactcgtagataccctagaagttagggtaaataaccctagaaaagcataagcaaatgtgtgggggaggcatctacaagaatgttcatagcaacattttttatcatagcctaaaattggaaacaacctaaataaatatccctcagtagtagattagataaactgtggtatattcatgtagtggaatatcattccataggcccaatttgtgaactacagccacacacactctcacacgcatgtatcacagttataaaatcaggtgaaagaagcaaacgcaaaaggatatgtatgccatgatttcttttatatgaagtttggtaagagccaaaaccgaaaaatatgactgggataaatacttagattgtgaagttacaaagaaaagcaaggcaatgatttccacaaactttaggataaatggtacctcttgggtgtgagaggaggagatgattatggggggaattttaagggattggtaatgggtgatggttacactggtgttcattctttttttaagtgtgtgtatatacagaatacgctttgttatgtaatagtttttgtaagatgcattttttgtacatttctatgccagttatctgtaatcatgatgaagtggttgacttttttttaaaggaaaatataaataaccaaaatcaataaaaaggaaaagacctgattgattaatattatgcaaacagcatcagaccagctacttttatacatgaattctatcgaggaacgtgacccactttttagagttccacttttgtatttccgtacgtctgttgcatattaccccgatcacattaatagggtctccaaattaacacgtctaaaatcagtgtttttatctttttgcttttccagtgtgtcacttgatagtctgtttgttcttggttgactgcccttagttgacttatgactgcctctgtaattatcttataatgatttcattttccttatgttctcagctgttttccacttccctcctcccccaatctcttattgctccacaggacctcatgtccttttctagggtgaaaacagccactgaacatgaattatttcagtttacctttcctaggcttgaatgcttccctgttgctttcagaataatacttatacttttaaaaaaggaaatgtattatagctatcatcactttcacactttaaagcaaataaagtttttaccacttcatactactaacattgctctctcgtactattatacttctctaagttttcctttctaccctgatgaccgttgtgcatttcttcttccatccatgcctttcttctttctttcccctggggcgtagaggggagcttacttataggtcttccctaaggtgctgtccttagtctgcatctttcttcttactaatttgtatgtaaaatgagaatttatgtgacacagtaagtatgttttctacttgggttaataatatcactacgcttcctggcatgcagactgaaatttcttgagttctagcttcttcctcattgcctctatagccagttgactagcaaatttcattgattctttccaaaacttcagaaaattttcctcattttcattgacatgaccacctttatttgccttgcttaatgtcctcagatgtggtttgccagtggtctgtgatgcaaaagtaaattcatcgtacctttttccagctttatttcctgcagtggatcctttatgaaacctgtatgcccagcaaaatggaatatttttctttgacagttgctggttttgcctctgttctttcctctcactattcattcccttcaccatatcccccatcccttctacctcttttctccttacacaatgagtcttagaaagaaagatacggaagtgaaaattacctttcttcaggacagattcttagcctcaaagatatctgtagcatttcatttgtatcttttctgacccttgtttctgccttgctttaaaatgaactttgagtgttttatttctactaactagtttctctatttcttgggatcagggagtcatctttgtgtcccagactcagaagaggaaatcatatactgttcatgtgaattaatggggaacaaatacaaaaaaaccacattttctttttattagcctctattttgggggtggggggtgggaagtgggtaggggtttctaaaatcattaaattttagttaagagcgatcttaccactaatttattccaagaccatagttttatgaacaagaaaaatgtgcctccaaaatttaagtggattccactgtatcacactgctcacataatttgtgatttccaaaattttattagtttttttttttttttttttttttttgagatggagtttcactcttgttgcccaggctggagtgcaataatggcgtgatcttggctcactgcaacctccacctcccgggttcaaacaattctcctgcctcagcctcctgagtagctgggattacaggcgcctgccaccacgcccagctgatttttgtagttttagtatggacggggtttcaccatgttggccaggctggtctcgaactcctgacttcatgatccgcccacttcggcctcccaaagttttgggattacaggcatgaaccaccacacctagcgtggtatttattttttagaaatggggcctcgctgtgttgcccagactggagtgcagtagctattcactggcctgaacataatgcactgcagccttgaactcttggcgtctagccatcctcacgcctcagcctcctgagtactgaaaattttaaggtcattttgccttcagtcccacatgggagcaggagtcctaggtgagctggggttgccataaccataattgaatgtgagtcccctggcagaaaggtaaccttcttttctttatatgagctcatagaaattcatttatctattcctatttctcttttctccccacctttggctttggtagctggagctggtaagaaatctttcttattttctgtaatgtgttttataaattatgtgtggtctaatgattatatggttgtaagaaaaataccataaaggaagagtgtttgtccttagttttcatctttagttatccataaaatctgaactctaccctgaaaaatttgtcgtcattgtatttttcatctttcctcgatatctacttgttagttcaatactatcgtttatcaattttaatgtactgttccaaagaacatatttgttactgttttcatagagaattgagcagtaggacgtttttcttacagaattaaacttacatttttctccatccactagatggctcaagtgcaccactttggcagctcagattgatccttgcttgctttgcttgtagtttctactttgagtactgtttgctttttaaaaactggatgagcccttacctgaacctagctttacatatatgtgatggcagatttcctcgcattttctgattatttacagacttctgaaaagctggtgaagtgttcttcatatccatagtgaaaagtgcattacagtgcttagaagattttgttttttgcttttaagttattttagactttaattcaattgccaataatctatttagatttcttcaaactaggcatgcagttaataattcatccatttcttcctgattcatagtcatttggagtcattttccagcacatggtggtacctcaggagtttttgaggcacacagggctatttgcttcagttctgtagtaatatttatttagtgtttttgtgcttggcattgtatggggcagtggagggaaataccaggatgactaaagaggatattttcatcagcagggagctcactgcgttaattcgtttccttaagtttccttttttattattttttttattttccctgaaagcacacattggtatcttgagtttttgaagccaaataatgagtataatgaaatggctcattagagcttatgtttgtaaccaaccctgaggagaattttgtttttgacattgaccctgttgatattgcctgaaaaaacttaaaaaaaaaaaactgaattctttagaaatattttatgcttatggctttctgttttgagttaagtaaaaaggaaaaggaattaagatttgttgaatgcttatcatgtgccagtttcttacttaatttgatgctctcaataatttggaagacaaatacaaatatctctatttacagatgaagaaactaaggaatcagaagttgcctaggatcaaagaaacagtaagttagagaggcaaactctttgtgatatcaagggttgttttttatttttttgcccaagagaaaataattattttctgaaatggcagaaacatttgtaatatcaactagttggatactttcatatcctaaagacagaaaactccaaacaaaggattgattgcctctcacagttgatctttgagattataaacaaatattcttgccaagctagagcaatcagtcatactggtatctcttttacagatacctttagaatgacagcaaacactataaaattgatttttccagagaaagtgtttgcacctaataatcttatttttcaggaataataactgaattatttcatcagtttgaaaatatagtgtacgacttaaaggagaatggcaagttattgatgtaaatacacattatttacaatattataactagattacattacaaatattgtaacaacaatttgtctttataaaatccccttgatttctctttattgtttaagagtccttgcggctaagctgtgtaaaacaggaaatatggctgtttgccagtgttcttaaggaagcaggagtgaagtaaagcaaacaatacaaaaggggtttgtttaaaggatgtacttaatttctgtggctgtggtatcatttttctggctctgttgtctttgtcctttttcactgcatcagaatacagccattaggtacatatccttcaaagttttaaaagttgaaattgtactttcacaactattaaaacaaaaataaccagtaatgcgaactgaacccaaagatatctaagataaatatcctcccatgactgtaaatttgtatcctccatatccccttagaaattttcgtatgcattgactagatttattgatatttttgttcttttttaatgtattatcagatattgccatcagtactattaccgcatttacacaatgttgccttgtgtggaaattctaaacctttgctaactcttggtaaccaaaataacaataaactagagagattattatcccatcttttgagagaaatgtaaaattattcatttgtctataaagaatctttgacaaaagtattttttaaagcatattgaatcctagccattttattattattagctgtgtacctaaatgatattttagatatgagtataaggaagacaaactttaggttgtcaaagaatgagcatgtctcatgtgttacagtcatggcatgacagttggattacaattatctcttgatgaatcaacttcatctaaaccttaattgcatattaaattatttagtcatttcctgattcagtaatgagaagtcagaatatatagtaatttactgggtagcatgttacatgccatagcttgcggaatgtacttgatcagtaaagtccacaataaatcaaagacaaatgagaaaattcttttagaattcagtgttttttttttccttaatttgaagtcactttaaatgctcttatgtagtaagaaaagaaccctaggtatatttaaatacttaacctgctataactttttgttggaaaggaggtacatttttttttatgagtatttttttcccatgggaaaaaaaataactttggtgatgcagtatgcctttatctgtgtattgttaaaaaataaactaaacaaaaaaaacccctaagaacctttaaacttaacaaagtttatttgagcaggaaaaaggttctagaagcagacagcactctaagatggttcagaatactaccacttacaactggtgagctgttctaataacagggaaaaataggaaatgtcatacagaaattacctgattggtgcagcttggtgtttgccttatttgggcataatctagcagcttttaacctgggattggctgagactcagatgtgtggttataagggtatactcctaagttaggttataacttgtttacacatcaagctagagtacagttaacagtgtatggaggcagctttgggccaaatctgattgaacggtataaaaataagttttgcaaatatttatccttaccacatgagttacatcctaatattctttattctcttctatttcactaaaaaaaattcaaatccaccaaattcatttcatgacccatcggtgtgttggagctcgttagtttggaaaacactgccatatagggttgaaaatttttttttctttttttaccctgttaacaactgactagtctgaaggagctcaaatatttggaaagctttattagtgcagtttagtagctggcttttaaaaaaaaaagttgctttctagaatcctccctgctacataatcaccaaatgttatttcaatattgttttcctaacttgaaaatttaactgaatgactagaaggtgttggaccaagaaatatctgaaataccaagcccacaaaggaaaatttaatattgattgaggtatcatggttatttgtgcacccttaaaattaagccaattttagttgatagaagtttcagctgggtgtagtagcacagcactttgggaggccaaggcaggaggatcacttgaggccaagagtttgagaccagcttgggcaacagaatgagaccccatctatacaattttaaaattaagcaagcttggtggtacacgcctgtagtcctagctattcaggaggctgagatgggaggattgcttaagcccaggagtttggggctgcaagtgagccatgcttgtgccattgcattccagcctgggtggcagagtgagatcttgtttaaaaattaaaaataaataaataaataaatacatatataggtttatatatatatataaatttcaagttaattgtttaaaggatgtcattaaccaaaactaagcatcagtctttggtaatgaaagcattctaaaagtctttcttttagatagattgaaaagtctttatcttgcagacaaagataattttattaatcataagtaacattattatgaaaagtatttgtgaatattaataactcagtttcttcacttatgttgagttgctttacatgttttatctttgcataatctgtaaacttgatgtttcttagttgacagaataagtttacagttagatatataggtaacttttagttcaatattttaaaaattgtgtcatgagaagtataaataaaattcaacgaaagataccatttcttggccttatataatggcatatatttgaacacttggagatagtggaaaagggcatttcacataaggggacagaggcatcaaggcagaagagcttaatatggtccaggaataaaacattcaactggatgggctttgttctaaaggcagtttttgagagaagagagaattaaattaacttatattacaatacctacttgctacaggagataatgggtggatttgaaggcagtgaaattaggcagagagagtagttaaaaaatcattgaaatattttagagaagaaatgagattgaagtaggacagtgtctaaggaaataaaaagtaatttatcaagacagtaaaattaacacaatttggcagctgattagattaattcaaaaatatttgagtgtgtgctgtgcaattctgggaatccagctgtgaacaaaatgcatgctctttacccttacatgtgttttagtccaatgggaagcacagacatttcaattcagggtaatacatgtgctgccatggagaaagacccagtgttgtcttgggagtgagtatactgactgaacttgaagcctcagggatgagtaggtaaagttggggttagagtgtgttacagattcctccctgtcctctccccgcatgttggcttggaggtgaaaagattgtggtacttttaaagcagttaattgtggctggatcctgggattggagagggaggaggatctggtaagagagggccagggccaaatcatccagagtcctgaagttcctggaatcccctagttcttggtccacagccctaatgaagccttggattttatcttaggaacagaaattaaccgtggtacgattttaagcaagggagattcagggtcaaaattgcatgttagaagaattattttagctaagaatgtcttagttataagtcagaaacttaagcaaaagacaaagaaagtgacccagaggattcagcatatgcagaggtaggaagtgcggctggacttcacaaagacttggaaccagacatggttcagtatcagatgcttcctcttctgttgtatcgcatagtgtcttgtctctcatgtctgcttcattgctctgtgtatactgtcttctcttaactatacagctctaacttaacagcctctgaatttctctcccactttcaagtcctctggagagagtctgactggttccttgtcagttgtctacccttggtttaatcagctgtgctaagagggcagggtcatgtagcataaacatggtgcttcaaagccaacccctctcacagttaaggggtatggtgagttgtgggctaggcagaattcttagaaagaaccaacttcagaagatcattttggctgcagaatgaagaattgaggggaagggaactaaaggaaggggacctctttaagagaatacagtaatccaggcagtaggtaatactggcctgaatcaggggtaagtaagaagagaactgatctgtggtagattaaaggttgaatctccagaagtgtatgtagattggatattggagtataaagagtcaaggatagtgtttgtgtttctggcttgaatacctgaatggatgatgatagcaatccctgagctgaagtagcatcgcagcaaatttagtggggattgaagacgaagaatttatttttgtgcacatgcagagtttgagatagcctcgagacatctaagtggtaatgattagtagacccttgaatgtatgcatctatagcagagggaaaagctcaatagtagatacatatttgaaattctttagtgttaagtgataactagagccatgagggtggatgaaattgccatgggagagtgtaacaagacaagagggccaagacagccatgaagagaatctgagggctagcagaggggggaaaatgagcctacagggcagactgggaaggaacagaaaggtgtgagaaaaatccagagtatgcagtgtttttagaaacccaagaaaagtgcttcaggcaggagaatgtggtgaaagtgtcaggtgctgatgagcagcataggaaaaagtcaagttctgtttaggagcaagaagtttgttgatgaccttggtgaatgagcttaatgggattggtgaatatgggaaacaggattgaggactctggcaagtgaagaaatcaaaataacaaatataaacagtgcttgagctataaggagaaagagtgggtagagatgattatgacagcgaagtaaggtttttatgtatttttaaaaatatcagggtcttgatcatatttcagtgctaggagaaagagtgataatcagttgagcaagatcaggagattcttcagagcactattacattgtaatggtgaagagtgaagcaaaagtatgtggaaactagtttagtgaatggaagaagaggtattccctgactttcattttctctaggaagaggttgggattatttacaaataaggtaaagtcgaagacttagggaacaggaggacagtttgtaatagatactgtagaaattagactagtgcaacttgggattttttttttcactagcttaattagaggtcttaaattgaaagcagcaccagtatacatcattgtattggttttgttcagcagtctgattacatgcttatgttgtgctacttcaggttggtacattgagagtaagatattgacatgatggtggtctgactaatggaacatggaatataagctgtggaaggaaagaagtaaaagtgaggactaatagaaaagtgagttgttaaaggcctagaggtcttatgtgcaaagaataagtgagagtaactcagcttgagaggcaggtcctaaaatgagggtaacactaaaggggaatggaccaatagcgtcttaggagattttcctgcatttgcctgcattgctggaagaatggtattgctgataaaagaagtaaacatggaaggaagagcaagttagttttagagggaagaaaagttagatttttactgtttcccctttgagtacctatggatcattcatactgagatgaccaagaggcagttgaaaatataagggagaagccagggctggaaacaaaattgggagattataattgaacccataaatttacaaagaatataaagtggtaaggtctacttagacgctatgtacatttaaggagtaagaaatagagaaaaggtgcttacaagctttgagaatttgtgaagaaactcaaaagaggttgaaagggttgaccaagcagatcaccggatttgtgagtggctttccagagggtttagtggagcatgaaaggagattggaaaggtttgaagagtaactgactttctgaaagtatgtatattgccaatgaatgatgtattattatatgtgatttttaaaatctccccaatatactgatattttaaaaataactttaatttgcttttttattaaaaaaaattattagctatagtctggctttctgaaatagagtatactggtcatttaatttgttaatgcctcaggagtatcatagttatcgattattactcagagctataatatggttgggccctttcaagtgctgttaagaccatttgtttttgtactgaatgccttcagtgtgttgtgtttttcaaggccttctttcccttgtcatttgttgcattaagtcatttgacagtattattcaaggattttttccccccctcgaagcactttactgtgttatagtttataattattggaagcctctgtagatatatctgaggatatgggggttggtggggagtagtgtctcctactataatcatacaagacagaatacttctgtggcctctggtcaccaaaatgtatgaagatttctctccaacagacaccaactgggtgtcttctgattcagttctattctgacattgtcttcctgaaaacagcatcagatcccacaggttgaggtctcagtcccacaacactgcccccctacttcagatgccagtcacaggcataagttgtagccttgtgtctgactgaatagctataaattggggttcccatgatccactccttgggttcgattaattttctagagtggcttacagaactcacagaaatacttacatttacccacttattataaaggatattacagagaatacagatgaacagctagatgaacagacaagatgcataacacaaggagtggagaaggggcatggagttttcatgccttctccagctatgccacgctctgggaacctgcatgtgttaatgttatccagaagcccacaaaacagtcctttagaatttttatggaaacttgtttacttaggcatgattgattaaatcattggccattggtttatcgactcaaccttcagctcctctccccttcctagaggttggagtaggactgaaagtttcaaccctctaattatgattacaaacagaaaggaatagtaccaacatcaaagaccaaaggtagataaatctatgaagatggggagaaaccagcgcaaaaagtctgaaaattccaaaaaccagaacacctcttctcctccaaaggatcacaactcctcaccagcaaggcaacaaaactggatggagaatgagtttgacggattgacagaagtaggcttcagaaggtgggtactaacaaactcctccaagctaaaggagcatattctaacccaatgtaaggaagctaagaacctggaaaaaaggttagacaaattgctaactagaataaccagcttagagaagaatttaaatgacctgatggaactgaaaaacacagcacgagaacttcgtgaagcatacacaagtatcagtagctgaattgatcaagtggaagaaaggatatcagagattgaagattaactcaacgaaataaactaagaagaccagattagagagaaaaaaaaaaagagtgaaaagaaacaaataaagcctccaagaaatatggaactatgtgaaaagacccaatctacgtttgattggtgtacctgaaagtgaccgggagaatggaaccaagttggaaaacactcttcaggatattatccaggagaagttccccaacctagcaaggcagaccaacaacattcaaattcgggaaaatacagagaacaccacaaagacattcctcgagaagagcagccccaagacacataattgccaattcatcaaggttgaaatgaaggaaaaaatcttaagggcagccagagagaaaggtcgggttacccacaaagggaagcccatcagactaacagtgaatctctttggcagaaaccctacaagccagaatagagtgggggctaatattcaacattcttaaagaaaagaattttcaatcgagaatttcatatccagccaaactaagcttaataaactaaggataaataaaatcctttacagacaagcaactgctgagagattttgtcaccaccaggcctgccttacaggagctcctgaaggaagcactaaacatggaaaggaacaactggtactagccactgcaaaaacataccaaattgtaaagaccatcaatgctatgaagaaactgcatcaactaatgggcaaaataaccagctagcatcataatgacaggatcaaattcacacataacaatattaaccttaagggtaaacagactaaatgcctccattaaaagacacagactggcaaattcgttaaagagtcaagacctatcagtgtgctatattcaggagacccatttcacgtgcaaagacacacataagctcaaaataaaggggtggaggaagatttaccaagtaaattgaaagcaaaaaaaaaaaaaaaaaaaaaagccagggttgcaatcctagtctctgataaaagagactttagatcaaaagagacaaaaaagggcattacataatgggaaagagatgaatgaaacatgaagagctaactatcctaaatatatatgcacctaatacagtagcacccagattcataaagcaagttcttaaagacctagagacagactcccacacaataatagtgggagactttaacaccccactgtcaatattagatagatcaacgagacagaaaattaacaatgatatccaggagttgaactcagctctggaccaagcagacctaatagacgcctacagaactctccaccccaaatcaacagaatatatgttctcctcagcaccacatcacacttatactaaaattgaccacataagtggaggtaaaacacttctcagtaaatgcaagagaacagaaatcataacaagtctctcagaccacagtgcagtcaaattagagctcaggattaagaaactcactcaaaaacgcacaactacatggaaactgagcaacctgctcctgaatgactactggataaataacgaaatgaaagcagaaataaagatgttctttgaaaccagtgagaacaaagacacaatgtaggagaatctctgggacacattttaagcagtgcctagaggaagatttatagcactaaatgcccacaagagaaagcaggaaagatccaaaatccgacaccctaacatcacaattaaaagaactagagaagcaagagcaaacaaattcaaaagctagcagaagacaaaaaataactaagatcagagcagaactgaaggagatagagacatgaaaaaccctaaaaaatcaatgaattcaggagctggttttttgaaaagatcaacaaaatagaccgctagccagactaataaagaagaaaagagagaagactcaaatagatacaatagaaaatgataaaggggatatcaccactgatcccacagaaatacaaactaccgtcagagaatactataaacacctctatgcaaataaactagaaaatctagaagaaatggagaaattcctgaacatatacaccctcccaagactaaaccaggaaaaagttgaatccctgaatagaccaataacaagttctgaaattgaggcagtacttaatagcctgctaaccaaaaaaagcccaggaccagatggattcacagttgaattctaccagaggtacaaagaggagctggtaccattccttctgaaactactccaaacaatagaaaaagagggactcctctgtaactcattttatgaggccagaatcatcctgataccaaaacctggcagagacacaataaaaaaacaaaatttcaggccaatatccctgatgaacattgatgtgaaaatcctcaataaactactggcaaaccaaatccagcagcacatcaaaaagcttatccaccatgatcaagtctgcttcatccctgggatgcaaggctggttcaacatatgcaaatcaataaacataatccatcatataaacagaaccaatgacaaaaaccacatgattatctgaatagatgcagaaaagtcctttgacaaaattcaacagcccctcatgctaaatactctcaataaactaggtattgatggaacatatctcaaaataataagagctatttatgacaaacccacagccaatattgtactgattgggcaaaaacgggaagcattccgtttgaaaaccggcacaagacaaggatgcactctctcaccactcctattcaacatagtattggaagttctggccagggcaatcaggcaagagaaagaaataaagggtattcagttaggaaaagtggaattcaaattgtctttgtttgcagatgacatgattgtatatttaaaaaaccccattgtctcagcccaaaatcttaagctgataagcaacatcaacaaagtctcaggatacaaaatcaatgtgcaaaaatcacaaacattcctatacatcaataacagacaaacaaccaaatcatgagtgaactcccattcacagttgctacaaagagagtaaaataaaatacctaggtatgcaacttacaagggatgtgaaggaactcttcaaggagaactacaaagcattgctcaaggaaataagaggggacacaaacaaatggaaaaacattccatgcccatggataggaagaatcagtatcatgaaaatggccatactgcccaaaataatttatagattcattggtatccccatcaaactaccattgactttcttcacagaattagaagaaactactttaaatttcatgtagaaccaaaatagagcccacatagccaagacaatcctaagcaaaaagaacaaaattagaggcatcatgctacctgacttcaaactatactacaaggctacagtaactaaaacagtatggtactgataccaaaacagatatatagaccaatggaacagaacagcagcctcagaaataacaccacacatctacaaccatatgatctttgacaaacctacaaaaacaagcagtggggaaaggattccctgtttaatagatggtgttgggaaaactggctagccatatgcagaaagctgaaaccggattccttccttacaccttatacaaaaattaactcaagatggattaaagacttaaatgtaagacctaaaaccgtaaaaatcctagaggaaaacctaggcgtaccattcaggacataggcatgggcaaagacttcatgactaaatcaccaaaagcaattgcaacaaaagccaaaattgataaatggtatctaattaaagagtttctgcacagcaaaagaaactatcatcagagtgaacaagcagcctacagaatgggagaaaatttttgcagtctatccatctgacaaagcgctaatatccagaatctacaaagaacttaaacaaatttacaagaaaaaaacaaccccatcaaaaagcgggcgaagcatatggagagacacttctcaaaagaagacatttatgcagccaacaaacatgtgaaaaaatgctcatcatcactggtcattagagaaatgcaaatcagaaaccacaatgagataccatctcactccagttagaatggcaatcattaaaaaatcaggaaacagatgctggagaaataggaacacttttgcactgttggtgggagtgtaaattagttcaaccattgtggaagacagtgtggcgattcctcaaggatctagagctagaaatactatttgacccagcaatcccattactggttacatagccaaaggattataaatcattctactataaagacacatgcacatgtatgtttattgtgtcactgtccacaatagcaatgactgggaaccaacccaaatgcccaacagtgatagactggataaagagaatgtggcacatatacaccatggaatactctacagccgtaaaaaggatgagttcatgtcctttgcagggacatggatgaagctggaaaccatgattctcagcaaactaacaaaagaacagaaaaccaaacaccgcatgttgccacttctaagtgggagttgaacaatgagaacacatggacacagggaggggaacatcacacaccagggcctgtcaggggtttgggggagggatagcattaggagaaatacctaatgtagatgacgtgttgatgggtgcagcaaaccaccatggcacatgtatacctatgtaacagacctgcacattctgcacatgtaccccagaacttaaagtataatttaaaaaaaaagaaaaaaatacatttcttggacccatggtagaaagactgatcactatatccagatatccactctgtcactgctcttggtcaattgaacccttcaacttttagttgggtacatggctactttgcggtaagatgtgactgtggtgtgtgagccaagctaatttgcgcagaaggaattgtgtagcttgcaagtcatatcctcagaagagaagatgctcacccttgtcttcttcccacccctcccctggattggagaagagatacgttattgcccaccacatgggcagtaactccctaagaggtgacagagcgataggataaaaggaacctgggtccttggataacttcatgaaatagacttaccttttctctgtggctctcccacttaactctggactattatatgagaaagaaataaactaaattgtttgaaaaataaataaaagatgaatcgggagggagtgactacaaaagttccttatcaggaattctaattggtttacagaaataacattggttaatgattttgtatacattgttaaattataaggtgtgtggcattttatgtcttcttgaggtcagttagtctagagcttgaatagcaagtggcttcaaggggtaattatttacctcaagggagaatgagacatgactgctgttagattttaaatacctttttgggactgataacttaggcccatattccttagataaaaagctttccttcccccctccctccgcaacctttactccttgtggtcaaaaatctttcttctcgaaagcattgttaatcaaaatctaagtgtcatgatgtcccttgtcaccaggaaagctcactcccaggtagtgctgtcccatgttgatgagagaggaggaaatgtctcagtgaggaattttaagagttcccaaaagctgacttaggatggcatcacagagtggcagaaatgagacctcagttaagtcattgatgtatataagtcattgcttgttgaatcatccctagtctttggaatcccatgattttagtttcctccaaagtaaaacaatgagagatacataacattaagaatttgtattgcagaaatataatgcacacattgactacaatcaaaaagtgaatttacatgtcagaatgaaaaaagaacctattcattagggagccaacaacaaaatcttgaaaaaaattaaaacctggttcttctttacagactggttgtagccaggaaataattcaggatttagtccaagtggtagacaaataagaaaactcaaaaacaatggtcaggctagaatctaataacaggtgtgttatagttttcttatgaaacgtgatttttctgtctctagtctcccttttattttttttaaaatatgtaattatatatatataaaatgtatatatttatacttagaaattttttctttcttttagtaacagtctcactctgtcactcaggctgttgtgcagtggcatgattatagctcattgcagccttgaattcctgggctcaagtgatcctccacctcagccatgaatagctgggcttacaggcacaagccactacacccatccagtgcctcttttctaccgaagagaaatagaccaatttatttgcaaaaaaagttttagagttattatacttggcctgatttatttgcataaagtgcagcaagagtagtgattggtcatatagactagttggctttgcctgaaactttttcgtaagaaattttggattagacttttggaaacttctcaagtctaagaagtcaagccagggattaaccatcagcctgtgcctgtaatactttcacagtttggtgaattcttctcttcttgaagtcgcaaaatattttgatattcctgaaactctcagaaagtgacattctttacataccgcaagtcaggattcttgtaagggaacagtatagacaacttattaggtcaggtctttccaaggggctttttattggctctataaagtcaaccttaattcctcaaagtagtttgatcatatgctgttccagttaaaccttggtacaataaccagtgtctccaatgcgtcctcttacaaaacaaagaaaatattgcacttatacaaacaactatattgtcataaatgtcataaaataagaatattcacaaatagttcccaaattctggagaaaatcaggtaaagaggaaggtaaatgtttcacttttccccacaaaagtatactttacctaattgctatgagctataaatcgctcaaaaaaaatgtggactctggcaaaacaaatatgagaagaatcaacaatgtttcaaacaaaaagtgattaaaaaatcatttcagtcctctgtcagttcagtcccatgtaattaattcctgttctgtttcatgttggcttagcaatcttcattaacatcagttttttattcgaattttggaaatttttacctagtccaatggtatcatctccatagttatctgaaacctgtattcaagaatacttgaatatggtacaaactcgtattcaaagtcctttccacgaatttctttgaagacacacactttaggatttggagggaaagaaagctctttaaaaaaacaacaacaacaaaaaaaaaaaacagactagatgcagtggctcacgcctgtaatcctagccctttgggaggctgaggtgagcggatcatgaggtcagtagttcgagaccagcctgaccaacatgatgaaacaccatctttaataaaaatacaaaaattagccaggcatggtggtgcgcacctgtaatcccagctacttgggaggctgaggcaggagaatcacttgaacctgggaggtggatgttgcagtgagccgagatcatgccattgtactccaccctgggcaacagagcgagactccgtctcaaaaaaaagacatgggaataaaacagtttactgcatataccaaggcatatcagatgtttaggaattgcatacaattttggaacacataccaatacaactgtaactcaaagaaagctgaacactgtttcttctctgacagtgctttccatgtttgaaatttgatttgggggaactgtatcagatatcaaaggtttaaaacactagatatggctgggcgtggtggctgacacctgtaatcccagcactttgggaggctgaggcaggcagatcacctgaggtcaggggttcgagaccagcctagctaacatggtgaaaccccatatctactaaaagtacaaaaaaattagccaggcgtggtggcatgcacctgaatgtgagctacttgggaggctgaggcaagagaatcacttgaacccaggaggaggtggttgcagtgagccaagatcacgccagtgcgctccagcatgggcgacagagcaggactcccatctaaaataaataaataaataaatgtaaattaaacagatatcaagataagaaaggtttgaaatgctcagtgttaaaataggatcacaggtcattgtaaaacagtcatttaaacaaagtgataagtcagtgatttttaaaaagtcaaaacctgtgctctttgattagcaggagactccatcaaagagtaagtttgaggagactgtatcaaagagtaagactccatcaaagactcacttttccaaataagacctaataaaggcagcatgagctcaagaaaatctctctctccctccttttcttttgtagtttactcaaaagtaaacaaaaccttttactatctcctgttaacactacctgaaaatcttgttcaaaagagaaaaccgaatcttacctttgtatcagtatattattaatattaaacctaattttaataaaatcttacaataaacagatccatctgatcccagtcagctttgaccagataagattttcatgaatcttttataaactcttacaattttattttttctttctccaagtttttagttttagctatatcatgtaaattttgaaacaatctttaaataacctctaaactaggcaaaattacttttcctttagcaaaactcacaccctcctctcttttttataactttcttcaccaaaaacacatcctactttcattgtatactttgcatacaagagtgtttcccatgtatctagtacttttaattacatatattaactacgattttaactcttagtagttctaatttcaagtgaaaaacctagaaagtaagtagtagttaactggtttatgtctgtatttgtagacaaatcatttcatggtttcatagaaagatatttctataaaatataaatgatgcctacttttttgtttattaacagatctaaagattattaacagatctaaatatatttagcttttttataccatgtaaaaacaaaataccaaattatgtaaactaaactaaaacatatctaataattaatgtttttgtatcttaatgtatgtagaaatgactcaaacattttatgattatctattactttattaaacctaacatgacttcaaaactttaaactactgaaaagaattttgaaactgcaacacagatacccttcctaatgtcttcctcagtcatactgagtcccaactacccacgtggcacccaagtatgattatgaaggggcagggcctatctgagtcctgattttacacacccataatggagcccaggacagaggacagaactgtgaagataatgtctgactcttcccaccatagccaggagacaacagccaggccagaggaagtaccacatatgtctgcagtcctcacttgttagagcccagaatctaatgagtctaatacataagctcacagacaagtcaaataagcatcaaacttatcacagaagcaatagttttatgagcttcagacatccagtagagaaagcctaaacctttctgaccagcagacccaggcaaaaatgtctgattatgtttaaaactgacaagtctgaagacattctaattttattttaccaacaattaaaaattttattttttaattttattttttattttttatttattaattttatttctcaaagattactaaagtcacattaacttgaaaaatatttgggattaagctgtgagcattaatttgtcagtttgataccatgtaaacaatatacaaacagatctgtacacatatatacataaaaatacaaacataagtgaagatttcatagctttgatataaaaattctagccatgagagaggtaaaactcgctattttaaaaggacattggattcaaagttcataaatagaacaagttcaagtttattgtatatgcctgaagcccttaccaagttttaaataacaagtagcaaatttatatttcaagcacagagaatttaagctttccaaaaggccaattcaattttatgttatctttggcaaaaatcatgttaacagaatccaaaagagtaaaacataaaggcctttcttctacaaaaaagaaaatattttatatatttttttatatattatatatctttatatatacttatatataatatatattatacatatgactcaggctagctatatatatatacagctgtgtgtatatatacatatatacacattcaggctggctatgtgtatatatatagctatgtgtatatatatatgtgtatatatatagctatgtgtatatatatatgtatatatatatagctagcctgaatgtcagcttttaattaagctaatttctggctatagacctctttcaaagaaaaaaaatattttcaagtttcttaacagattttagctggaataaacagccaatattcctggcttttgactttttttttctttttaaccaagggtacctttccaagtgactcgccaaaaccaataagccttaagaaaaatttttatgacttgaccaaggatgcacaagccatctccaaagaggtgcaaagcaagccctcacaagatccagaaccaccccaaagacagtttaaataatgaaagtcttggtagccacaaataaggtgcaaatccacatttttgcttgactgtactctctagggtttcagctgaccgcagacagaagaagacaggaaatcaaaagctgttcatggaagggaaaaggatcagtaacaaatgggtaccctaaagggtcaagagtcatattaatattgtaataattgaaaatattcaaattcttgtaaatgtttctctcctaagctaaagatattaaccaaagaaaggaattttttgttgttctaaagaattttaactctgttttagatcttatctcagcggaatgctgcttggctaattccctgcatgttaacatttcaaacacatgataagatttatctctccaagggactgtgaactccagctgggcattaaaggatatcatcagtgccattcattagtcctggttttgaaaaaaaaattgttagatatgtatttttataatctcagtagtttcattctcattttgtagttgcactgtttgctccttttgttccaaatttaaatacatttctctcttttagactattaattttccagttacccattttattgccctaagtagttgttaggttcttctaaagggatgacacttaacatgaaatatgtagaaaaaatatataactcaaaagtccagagctgaaatccaaggaaggaggatgtaggtaaaagccagttaagacaagatggcctggcccggtgccgtgtctcatgcctgcaatcccagcactttgggaggccaaggcaggtggatcacttgaggtcagtgagactagcctggccaacatgatgagatcccgtctctactaaaaatacaaaaattaaccgggtgtggtagcgggcacctgtaatcccagctgcgtgggaggctgaggcagaagaatcgcttgagcccgagaatcagaggttgcagtgagccgagatcacgctactgcactccagcctgggcgacagagcgagacagtgtcaaaaaataaaaagacaagatggcctgaaaagcaccttcaccaaagacttacgtaaatgtaagccaatggtaagtttctagtgactcagcactccctctccaggtacagtgaggtaaagacccttacaaatgaagatttcttttgtagatgtaaatttcttttataaatagccaactaaatgacagaaagctgtattttggacactgattttgttgaatgggtggtctttttatgttcacttttgttagcttaaaaattactgagttcagctgggaaagcccattaaggaaaagggcaaaaaaagcataatctatgtgtggactcagcatggatagctctgataaagaagcaagcctgaagggttacccctaggttaaagacctcttctaaaaaagaagggtttgaaagaacagcccaaataaaatgtacaccttcaaccaaagagtggtataggtccagattattagtaggacttttgtccaataatttatcttggaattggaagaacatgagaggttcatagttggccaggtgccaagtccaggaatggctaagggtggcttactgtgaatcctgctcacagtgccagaaatgtcaacctaaagggaagaaactgaggcatagttaatacagataatttatttgggccaaggttgaggactgcagcctaggacacacttccaagtggtcttggggagtgctccagagaacagaagagtgactcatatttttagagaaaaaaaggatgaatcaggaaagggattgattgcaaaaaggtattcctcaggaattcttgttggtttacagaaataacattggttatttattgtctatacattgttgaactatagtgtatatggcattttatgactacttggggtcagttagtctagagcttccatagcatgtggcttcaagaggtaattatttagctcaaggggtagtgagacatgactactgtacatttaaaatgcctctctgggcctgataatttaaaggggctcgaattccatagagcaaaagttttttttgttttgtttttcataaccctcatgtttagttaacattgctgacattgatgaatcaaaaaacccaaaccacaaaaaaacaagccatttttattatcacttctgctacctagcatgtcaggcagtcatgttatgtttaaattgccttcaaatggtttcagtaacttttcccatatgtatgttattgaaccactccagaaaatcttaaatcccttttgtagaggaagagatgattagacgagaaatacttagtgtctgccacagatttatacagaaaaaaatttttgtttttagtttctggtctttgttgttactttgttggtagtaaaaaatgagtttttttttacaggctttaggccttatccagtgaaggacaacttgaagatgagatagagcataaaattcaagctatttctggagattgatacaggttcattagctggacaattaaactttttacttgtcttgcaagtcttcaacttagatttgtcatatttggttatcataatcaaatggaaatagtagtttttgccccatcttgctgagcttttagattttgagatcatttgtaacatactctgaaattcagtgaattttatttttttctgctgggggcaggcacatttaattacagaaagccatttgccatggaatctttttttctaaaaactacctagcgttaaaaaaaatctgatcataattacgttgctagcaagataaactagcaatacgtatatgtggtatcaactaatatgaaaaaaattatctgtaaaatgcatctgggacacttctcatttgctattcttaatttgcagttttaggaattgtctcgtggtggttgaatgtgatcagcattttcttttatgagcctgggagtcttattagtgaaagatttggcaaaagttagaagaaaatgtcaggcatttgggtcttctcaaggaatgagatttttcagtatgtaaccaatttttttggataggcaaagatttaacccaagtagtacactgtacaaaggtgcctttaaagctcagcattctttcttgtgtaaaacctcataaaaattttatggaaatttatgggtatcaatttttcttagatttaaacttaaaatagcttttgagtaccttgggaaatagtatattcttacaaaatagatgacctatttattcagttgaatgtccttgtgaaaattgacgttgctttactgacactaataatctacatgcagttgagcaagcccagaagccaactttggaatattttgaaatgtttaccattttgagtacaaagtaattttagaatcttggataccagctcactgaagtgttatggcaatatcatacccatatcatttccgttacttatatttgttattgtttaaacagtacccaaaaatggccaggcacggtggctcacatctgtaatcccattactttcggaggccaaggcaggaggattgcttgagaccaaggagttcaaggccagtgggccatatagcaagacctcatctccattgaaatatatatattttaaagtagccagaaacatgtacttactttactgccaaggatatggctgtaaagtctcgagatctttaataaataacttgaatgtctgaatgacttggaaacaagttctgaattagcttactgatttcatgtgtctggcgctatttagctaaatccaccctcctcaaaatgtagaaattgttaagggacagtttcttgttgagacagtttctgtcttagcatcattttgtggttagaatgtagtaaacctactcaaataagctcaattaagaattaaatctattttatgaataggtctttaaaaacccaattgcagaactgcaaaccaggcctctttctcccctttgtgggtgggggtcagattctcctagaagagagggcaaactagatatgattagtatacctgctagaaagaacaattaagtggccagggcaaacaaagttgtctcttggctgtaataatttttttctggactcatgggcaactaaagaaacatgctaattatactgatgcttaaaggatttgccctctattacggagggtctgtgggagtagaactgtaacctcttctttataagcgagtagtacagaaaagggagaaggagaaagaaaaatcttaaatatggaggggaatcatctggaaagagctcagattaatttttataaaattgtgtaagattttataagattatatatttttataagattataacctcttcctggaagcctcatttttaaactgcttatggtagtgacattttattatacatgaatttaacttttgaatatccagctgtacctgtcttgacagataaaatgacagtttcagtagtacagacaattctgcccatcataggaagcttatgcccttgcagatgagaatctgctgttctctcttagtttgtacatgtctcccgtcgggtgagcatgtcatatgtagtgtaaatactttaaataaaatcatggccctgaatgttattgtactaaatgttacattatgatttaaggagattttcggggtaattttgactatgtcagttttgtggattatttggaagagtggaattttgtgcactctgggcttgagtctaaagttagtgtgtaaagccaaagtcagaatcacccttgaaagttccttaactcataaaagccaatatgaaatcttttgtgtacatatacactcttgagcattaattcttacacacatttaaattggagagtgactaagctagactgaaaggcaaaaggaaagtatacaggtgttgtatattcattcagctttaaacatggtataggtagggaattctaaaatgttccttcttgcctgccagctttacttcattttgttttaataataaattctagaatcttaattcttactaattgtgtatttgttgtgagaatttcaggagctcgttagcctcacctttctgtgagatagcttctgaaatcagttggctaaattctaaggttagccattaagtaggtttatgataaaactttgttttattgtagttttcattatttcccttttcttttgctttggtattttagtaacatcacttttaagatgttactcatctcaaaggaggcaaaggaagagatttggtatcaagtccttcattcaactaaagtagaaagagagggaagtagtatgcccctctaggctggtggttgctgtgggaatcaatggaaaaacccctttaagaggataaaaatgggacagttaactggaaacttaccaatgagacattctctttctagagctttttcttttctagcatgttccccccagttttaagaagataacccacactcttatctgtttcttcagtatataatctcaattgtgagattacaaaataatttctctttaataatatgcccaggtgagaatgggagtaaaattctggttttctttatttggtgctagtgtcagcagtgactgaaacataggctgtctcagtctgggccctgtagtacatgctcagacctaggctggcttactcttcatatggctctactaccttagtatagaggaggaaccataaagtccaagattgggcacttcattcacaccacttagtaggcagtctcctaaggaaagaagaaaagcgtatgtccggagagacataaatggctagtcagccatagtttcttggggggaaaggaggaaggggagagtaccctaggatgcaccctatatttcacatattgtttctactacttttggttaaattgtagacaagtctgttgttggaataggccttcttagtgcaggacatagtggtatttctatattaattacttaaaatgtagttgaaaaatgaactttgagaatacctagaactgaaatagatgcatttgtatggtggcagctgagatctgatctaaaggccagttgagggctaataaggagtgaggttaaatttaagcttattactcttttaggaaaatgatgtgagttagggttgaggccaagaaattcttactatattctgaaagtagtgagacttcattcgttagagctaacctcatagtgctcactatgagcactcaccttaaaggttattatctgcctcttgaagaagcagttactcagcggatcctgtaacatgtggttctgccactttgtccataactgattagaccagggcaagcctctggctcaaggctaatggcttatgaagtggcctggtatgaaaactgcataaacagcaataataagattaatcatctttctctttctctttctctcctgtatactactccttgagaggagaaagacaggcaattcataatgggaatttaaaataacagtttgttcacttgttcattggttcattcaacacttttttgaatgtctgttgttagccaggtactactcaaggcactggtgatttattcatgaacagaacaaaattcatgctttcatggaacttgggtttgagtgggacagataataaccatgtactagaatgttagcaatggtaagtgatatgaagaaaaatgaagtgggttgaggggagagagtgtgcttaaaggggaatttaggtaggctagtcaagtaaggcatctctgaggagctgtattaagagatttattatacggaattagttcatgtgggtatggaggttcataggtcccaagatctgcagcttgcaagctgaagaccctggataactgatggtgtagcaccagtttgagtccaaaggcctgagaaccagaacaccaaatgtagtttcagtccaaaggccagtaggctcaagatctaggaagagctgatgtttcagtttgagtctaaaggcaggaaaacaccaatgtccaagctcaaggcaggcaggaagagttcccacttattcagcatttttgttttattcaggccttctactgattggatgaggcccacccacatcacagagtgcagtcagctttactcagtctgtttatttatataaatgttaaagttatccaaaacaccttcacagaaacacccagaataatgtttaaccaaatatatgggcaccctgtgtcctaggcaagttgatgcataaaattaactgtcatagataggtctattggtagccaaagaaccaggttaagtaaaaatagataggctctaagttacctcagtgacttattgccaggattgcctgatgattacagctgtcttaaattctgaaccttgttgtattacctgaattattttccagggtctctaaagtctggctatatggttgcattgaacttactcttttctccttaagtatgttttatgtaactagtttaacctgtgtgtttctacattcaggcttgacagcctagccattttatggacggggcggagcgggggtggtcagcctgatatataaagatatcacagaaataaaccttgagtcataaaaacctaatatagcccccccctttactaatgaagagaaacattggtaaagacacatgaaacaatttattaagtaatttgttactttaaaaagatttacattttggttaacttttttagcagttgtttgttctaactctgtgaagagcctgttttggaaatctgaaaatgtaggagatgcagctattgtcctcagaaagaccatagtctgataataaaatctgcataagtaaatatacagcaaagtagtttagatgagaatttaggttagagctggtttgaatggaaaaggcttatgaagatcacatttaagctagtcttagacaaaatttggatagatacaaaagagtgttaaaaatatttcatgaaagggaaagggaaatgaacaaatgagatatatcagagtttgggggatggtagtttagctgtgttgacatggttgtagtcttcttgctgtaggagtagtaacaggtgagatttgaaagttaaagccgaacctcagtatttccatacttttggttgcacattaattcttttgagcctcagattattccatctgttaactgggataataatgccaatatttgttcatatgttttaatcagttacatctaaattctataacaagagttcctttgtttttaatctccgaagccttctaagggaaatgagtcatcagaaaccatgccatttccttctcacacatactcttgctgttcaagcttcatgatggagagatcagtatatcaaatgcatcctccataaatctcaccagtatccttaatgcccttatcttggtgaatgtggaaaaactcaaagtgctttttttctgttctctcaacacaacaatcacagaagacttatgtgatcaaatgttgcatagggggagttccccacacaccaagcaagtgatcagttttgcagcagatgcctgctaagtgtcttccaattccattctgacactagttacctggagatagcatgagatcccacaggtcgagggcccagtcccttcccaccgccaccagataccagtctcaagtctggaacttctgactggctccaagttgaggttcccatgcccctctctttgggttagattaatttgctagagcagctttacaaaactgagggaaacacctttaccagtttattataaaggatattacaaaggatgcagataatgagatgcatagggtaaggtatgggggaaggaacacagagcttccagaccttcccagggcacgccatcttccagaatcctccacgtgttcagctatccgaaagttccctgaaccctgtcctcttgagcctttcatggagatttattggataggcatgattgacaaccatgtggaaatgggattggacaaaaagggtataatctaatactaacaggccgagtggagaaacccacaagcctgtctgtccaaattcttcttagcctttctgtgcagcattcctttctcaagggtgtgggacaggaccacttctgaaatgagagtcttatgacctgcagtcagaaaggcaggggaagattagactcttggcttgagctggtgaaaggaggatgggaaaatcagagagagagattctgttttctgaggcctggagcaccccaacatcataaccaaagtctgtaacaaggtatatgggagttaagagccgggagctgtggatgaaaacctatatatatgttccctatatatacaatacatagaattatatatatgttattatctaatatgtaatagatatataatatcacacttggaaattgcactttgtctcagtcttttgatgatacttttttatgatagtgacacactaatatctccatccgtatggccacacatgtgctctggatcccattcttttcttcctttttggaaataatatgctatctgagaaacctattttctttctcattcacccattctcactcttcctctctttattggatcctttttgttagcatataaacatgttcaggttgtctctatgttatatgtgttatactatgctatgtcatatataatatataatctaattatcctcccttgaccatttactcctctttatctatttcatctttggtcttctttgttaaacttctctaaagaagtagctatatccagtttccttataaatttcccagttacatggcagctcattttaatctagcttctactgcgttcgctctactcaaatggcttatttgacacctctgttacaatcaatgctattagccattttgttctttaaaacactctcttcctttggcttctccagtatgttcttgttttctgtctaggtctctggctgcatcttctgtggcttccttgtcagctcatctttctccagttgctcattaaatgtggttgttataaagctgaatcttaggtgtctttttacttaacgactactcttgaataacttgtctctcattgctccagtaacaatgacaactcctgcatttatctttcaccgagactactcatctgggatccagttctgtatctagataccaaattgatatttccatttgaatgtcttaaagttatctcagactcaacaggtttaagacttacaacttctcttcctccatattctctttatcttcaagattatttttttggactcattgtagtccaaaatttgaaggactcaaattctctaccgcttacattgtaaccatagtcaattaatcattctaagattcagtttcataatctgtaagatggaaaaaatgtagtacctttcctaacataaggaaacatcagacaaaatgtgaatatgggatgtaataccacggactagatttaccctctagctgtaaacaaatagaaaaccctcctagggttgttttcagtattaaaatagtatttacaaagcacttggaacaggaccccatgtaaagtaagatttttttaaagtgtctgctttattgttgaatatggatatgaagttgtcagatgaagcttgcaatgatgcttaaatgcttatattataaaaagcagttctcaaatcagtacttttaagattgcattttaagaaaccaaaagaaagaatagctccaaaacaagcaatgagaagaaaataaagataaaataggaagcattgaaatataaaagtgtaaaacattagagaaaagtaagagaaattaaaatcttgtttttttgaaaagatcactaatagtgataaaattctagccagactgattagaaaaaagaagacacaaatgagattaataggaatgaaagaggagagatgagtatagattctgtagacattaaattggacaacttagattattaaatgagcaatttccttgaaaaacacaaactaacaaagcctgtttaagaagaaatagttgccaaacagccctatgtttataagagaatgtagatttataattaaaacattccctcaaaaagaaaacaactcatcatagaagacttcactgagatagtctatgaaacatttaaagatgagtatcatttccatacactctttctgaaaataagagggaacactttgcaactcattttatgtccgcattactctaatatgaaagaaaactacagtccagtattccttataaaatagatggaaaaatcttcaatgaaattttagctagctgaatcaatacataaaaaggataatattttatgaccaagcgggatttattccatgaatgcaagggtggtttaacatttgaaaatcagtgtaattcggcatatgaaccaactaagaaagaaaactatatgattatttcagtatattcagaaaagtcatttaacagaattagtaccattaatgataaaaactctcaaactaggatttaaagggaactttctcaacctgtctgtcaaaggacaactagtaaaatcctataatatatatatcatgcttagtgatgaaagactgaatgctttctctcttaagatcataaacaggcaccacttctattcggcattgtatggaaattatagttagggcagtggagcaagaaaaagaattcaaaggcattcaaattggaaatgaagaaataaattgcttttgtatacagaaaatcccaatacacaaaaaaagcctactaagacgaataagtgagcctattacaaaatcattatacaaaaattcattgcatttctacatactagtaatgggtaattggaaatctaaatacaaacaaattaaaataaaaatattagcattcaaaatcttaatgcttatggagaagttaaacaaaattatgtaaagcctgtatattagaaattatacaggcctatgggaacaagtgtcatgtccgtgaatcaaaaaactcaaaattactataataccatttctccccaaattgatgtataccatcaatgcaattctagtcaatatctttacaggccttttttgtaaaaattgacaagcttagttctgatatttatataaaaatacaaaggacctagaatagctgacaattttaaaaaagaacaaagtttaatgacttaaattgcctgattttcacacttactagaaagctacattactcaagacagtgtggtattggccgaaggataaacatattattaatggtatagaaaatagttcagaaataggcccagaaacatatattttatcttattttcagcaaaactgctaaggcaattcagtggaggaaactggtaatctttttaacaaatgatttttggacaattggacatctgaatgcaaaacaatgaatcttaacctttaagtgggcaatgatttcttagacatacagaaccaaactatgaaagaaaaaataaaccagctgtacatcatccaaattaaaaacttttgatcttcaaaaatcactgttaacacaattcctatcaaaatcttagcattattttttgtagacatggacaaatttattctaaaatgtatatagaattatgaagtaactggaaacaattttgagtaagaatagagctgaaaaaaatcacaccacttgattctaactaagacttaacatacagcattatactcaggacactgtggtattgatcaaaagacagatcagtgaaacagaattaaaagtccagaagtagacccgtacaagtagagccaactgaagtttgacaaagatgcaaaagtaattcagtggggagaaatgatgctttttgcaacaaatggtattagaataattagataataaccaaagaaataaactttgacttaaaactcttatacaacagttatcatagatctaaatgtaaagtgtgaactataaaacttttataaggaaacaaaagagaagatctttttgatctagggccaggtaaacatttcttgtaccaaatccataaaggagaaaaaaataatgacttgggcttcatcaaaattaaaaacttttactctgtgaaagacactgttaagagcataaaaaggcaagccacagactggaagaaaatacttggaaatcgcatgtctgataaagaatgtgtatccagaatatattttaaaagtctctaaactcaacagtaggaaataagacaatgcaattagaaaatgagtaaaacactgaacagacacttcaccaaagagtatatagatgacaaagaagcacatgaaaagatgctcaacatgattagctactaggaaaatgcaaatttaaagccatgatgagatatgacacaggtactagaatggctaaaataaaaagtactggcaaaacgaagagttggtaagaatgtagaggaactagatctttcacacattgctggtggaagtgcaaaatgatacagcactctggaaaacagtttgccggtttcttataaaattgaacatggagttaccatatcttactcctggatatttaccctaaagaattgaaaacttatattcacacaaaaacatgtacacaaagccttagaacagctttgtcatagccagcaagagatgagtagataacaaattgtcatacattcatacaatgaataatattcagtaagaaaaagagcaagctattgatataccaacaccttggagaatcttaagggcattatactgagtgaaatagctattcagttcttttccctgttataaaaatacggctgtcttcttatgagttttaagcctatatacattccagatacacatcctttgtcagatgttttgcaactattttttcccagtctgtggcttgcccttccattttcttaacagtgtctttttattttgaaataattttaggctcacatagaagttacaaaatattacagtttctgggtacctttcacccagcaacagcatttgacaaaccatagtacaactatcaaaatgaggaaactaacactggcataaaactattaaccaaactagaaactttcctcagatttcaaaagatttaaaagattacttatggtaattttaatttgtataacttttttttttttgagacagtctcactctgttgcccaggatagcatgcagtagtgctatcatagctcactgtagcctctgactcctgggctgaagtgatccttctgcctcagcctcccaaatagctaggactataggtgtgcactactactgtggcagattttttttttctttcattttttatagagatgggggtctctctatgttgcctaggctggtctcgaactcctgggctcaaggagtccttctgtcttggccttccaaagtgccaggattatagatatgagccactactactaacctataactttttaaatgaaaaaaatgatagtgacaaagaacagattagtagttgccgcagatagacttgggaggagtatgtgattataaagggatggcatgaagatgtttctttgaggtgatggaatagttcagtattctttttttctttttttgagacagagtctcattctgtcacccaggctggagtgcagtggtacgatcttggctcactgcaaccttcgtctccagggttcaagcaattctcctgcctcagcctcccaagtagctgggactacaggcatatgccaccacgcccagctaatttttgtgtttttagtacagacagggtttcaccatgttagccaggctggtattgaactcctgacctcaagtgatctgccctcctcagcctcccaaagtgctaggattgcaggagtgagccactgtaccaggccggaatagttcagtattctgattgtagtggaggttatactaatataaagtatgtgataaatttgtatagaactatacacacacagggcatgtaaaaactggtaaaaactggtaaaatctgaggaaagtttctagtttgattaatagttttataccagtgttagtttcctcatttggatagttgtactatggtttgtcagatgttgttgctgggtgaaaggtacccagaaactgtaatatttttgtaacttctatgtgagtctgaaattatttcaaaataaaaagacactgttaagaaaatggaaaggcaagccacagactgggaaaaaatagttgcaaaacatctgacaaaggatgtgtatctagaatgtatagtcttaaaactcttaagaagacagccgtatttttacaatagggaaaagaactgaatagctctttcaccaaaaataattacataaatggcatataagcccatgaaaaggtgctcaccttcattagttattaggaaatgtaaatgtaaaccaccatgaaataccactgtacacccactagtatagataaaattaaatggcaatccgaagaatgtggaacaactggacctctcacatgttgctggtgcaaatgaaaaatgatatggcctctttgcaagacagtttgacaatttcttaaaaatgtagggctcagcaattccactcctagataattaacccaagattaatgaagaaaaagtgaaattcataccagcatcatttataataaccctaaaactgtaaacagttgaaatgtccaagtggtacatccacacaatgaaatttattccctagtaaaaggactccagcatggatgaatctcaaaatcattagagcaaatgaaagacgccaaacaaaaattacatgctgtgtgatttcatttatatgcagatctagaaaaggcacaataaccaattcagtggttgctaggagttggggggcaaggggtagagagtggagattgaccatatagggaatgtattgaagtaatgggaatgttttatatcatgattttcctgatgatggttacgtaattgtatacattaatcgaaactcatcaaattgtacagttggtacaatttttaggtcctttgcattcgctttgtttttttctgcctagaaagctctctcctctccctgtctggttgactcatattcagtgttcagatcttgcttaaacgtcatgttgtcaggagtatctgttcctgagcccagactggcataggcttctttgacatcctgccgctttccttcattgtccttaccacagctgtagtttcagtcaggcaggtagccatcagcttaaggtctctttttctgtcctagctgcaacactgtgaggagccagatgctgattaccatcttgttaacagtacgtagcatggtgcttaaatcaggtttgaatattgcatgactgagtataagtgagtagagaattgtgtgtcttctgttcttgtaagtggcagctgtggcttctgccaagggtactactagctggggctgcctgcttaaccttggagcctgtctgcctgcctctgccctgctcctggggagttgtgactatccatgctcatctgcctgccatagcctttgttcagacttcttgtcaccgtgaatcccactcctgtggccgggccaccctgttgtgagaacagaaaggagcttttccttgctgttattcttttagcagaaaaggaaacctgccctactgcatgcatgttcctggatctactcaagctttttctttttttccagcaagtggagaaactctgaaacacagtgttttgttacctgctttggtaacaatatgttacctcctgtgaagcaccagagtacccctttgtctcctgattatcttaatctttttgagagagacatatgactcctccaagtaaggttaggaatcctaatctgcaggtagtttgaatgcttgggtggaaggtttaaccttcccaaaggtgaaaacaccatcaactttgtgctcagcctctgctcatatttgcagattatcagagatcactattactgtctccatgtcccccgctgacccagtttccaggataaatgtgtagaataattaataaagggcgtgacagccaacactcctcttccactcttcccacttctcttcttccttatttcactactgtagtaggtaagagggaattcaggttatggtaggaaaatgattaggatgaacaatccctgtatgtgagcattgtgtgaacatagctcagtgtttaaatcattaccaaagctcctttctttattatgggctgtccacttaagaagaatttatgagtcttgtcatttcagacagtcttccctggagcactacatgactagtccagttagtgattttagaaatgtttctctggaccttttaaaatgtatccaagtctaattcctcatttgtttctagtttatttgtcctcggttttacagcttacatagtttggagtttcctgtttagttttgtttatttttaactcctttaggcctaagactcttcattgtttctctttcatctgagtcattataatagtctctcaaaagttcatattccactcttgctccccctttctcctgcagtacaatctacatgtcgcagccaaggatcaggtcaaggcattctcatgctctctccagtggctcaccttcttacctagtttgtgatctggccccaggacatgcagactgcctagtaggcaattaatatctgctgaattaattctttgtattgtaagtcatatcagggtttcttgggggttagcattatcttaaaaccacaaaaaacagtaactttagacctaattggtttcatgacttattgaggaggcgaggaataggttaaagctgctttgcatacattttggaatagtctcttttgtctagtaaggatggataataagtttgttaataaccagtattcacatgggtagaaaaagactgtcttgatttttaatcctacaagtagtaaaggaatggtagtcagaagttgaatcgtacttttaatgcctcaggcaggatagaatagtactgttttgttttgtatcccaatatgctaactacttctctctctctcctttctgttttgcttctcatccttacacccattacaatctcagtatgtgtgttacaccaggagtttgccttggcaggtcagaggatctgtcacagtgaaggcactgtggtgccacttatttacatttgttgttccctccacttggcactaaatgagacttaaccatttttgaatcaaagtttataaatttcttacaaaaaattaaggtttttattctctataataagcacatgagaaagactggttttaaattttaaactgtggagtgacgtaaaaacatgtttaattttaattatttgctttcttttgttcatcttctagtaagttattcatgtattaatactggtaacttctagattggaggaatgatttatccttatgtttcttttaaaaaaaaaactatcagtcattcatatggcatatgctaatcaaggctctgtggtatttttttttcttatgttttttaatgaagcagctcttttcatgatctagcagtctgtgtcactatcagtaagtaaacagtaaggactcaaattttaagattaaaacaagttcattttgttaacatcatgttttgttgcatcttgcagcttcttggtgaatttttggatgaagccattaaattaattgcttgccatcatgagcagaagcaagcgtgacaacaatttttatagtgtagagattggagattctacattcacagtcctgaaacgatatcagaatttaaaacctataggctcaggagctcaaggaatagtatggtaagtgtttacttccaaaaattaggcaaagaatcattaactgctaccttttctcctctcgtaatttagataccttggcaaatatttaacttgctttgaaaaattaaaactaaaaattaaatgaaaactattccacagtaaattgtttgcttcaggatcaatggtcttttctttattattattattaaaggttgagtatcccttatctgaaatgcttaggaccagaagtgtcagattttggaatgtttgcattggttgagcattccaaattcaaatcagaaatacttcagtgaacatttcctttgagcatcatgtcagtgcccccaaaatttagattctccagcattttagatttcatattttcagatttgggataataacctgtattattcataagatacaactctataaactagcactgccatctttaagtataaactatgattaaatacttgggcatagccattgaagacaaatatctctatcagcaaagaataagtggcatgcttgttaatttcatgtatacatgtattcccatagataattgtttaataagaagcttcacttagtcatcactttcacactataatgaagccctggaatttcagaagtcttattctatactggggaatgaagtcagctaatatctcactgtgtgtgtttcaaaattcatccatatgtttaaaattgatttattagctaatttctacaaaaacctcaggctatatcagcataattctttataaactgaaatgcagatcactctttgggatagttctgatactgattgcagatcactaaattagcataataataaactagtgttttggggaattataagcctcactcaagaataattatatttttattacctcttcttgaaacaaatttcagaatctattctaaacaaaatgtaaactgttaagtatttataatccagtatttctcctaggttctaaaaaaactgttttacatgtgcacagggagtcatgcataggattggtgtttgcagcaccatttataacagcaaaaattggaaatagcatcaaatctatcaacagaagaataaaaaattgtgatacagtcatgctgtgaaatactatataacattttaaacgaactggagccatatgtgtcaacaaggataacctcagaaatgtagtgctgggcttcaaagcaagatgtagaatatatatatacatcattataccatttacatgtagcttaaaatatgcaaagcagtaccatatatttatggattatatatatgtacaaaagattaaaacatgcataaataccaaacttaggatgttgtttatctctgagaaaatagagaaaagaaaggaggtttgacctataatattatatttctttctaaaaaattcagagcaagccgggcgcggtggctcacgcctataatccccgcactttgggaggccgaggtgggtggatcatgaggtcaggagttcaagaccagcctggccaacatggtgaaaccctgtctgtactcaaaatacaaaaattagctgggcatggtggcacatgcctgtaatcccagctacttgggaggcggaggcaggagaatagcttgaacccgggaggtggaggttgtggtgagctgagatggtgtcactgcactccagcctgggtgatagagtgagactccgtctaaaaaaaaaaaaaaaaaatcagagcaattatggtaacgtattaagatttaataaatttgcatgatagaatggcatttattatctttcctgcattcttgaagtaatttacaatatcaaaaattatagaagttggagtcattttgtaagccgttttgactggcctgttctcattgtaaccaaccacatttaaccaaccataaattaaatttaaagaaaatcatattatatagtcagtattaggattctgaaagccagctctctgttcaggttttgttttttgttttttgtttttttgtttctttgttttttttttgagacagagtctcactctgtcacccaggctagagtgcagtggcgtgatctcagctcactgcaagctccgcctcccgggttcacgccattctcccgcctcagcctccggagtagctggggctacaggtgcctgccaccacgcccggctaatttgtgtgtgtgtgtgtgtatttttagtagagacaggatttcaccatgttagccgggatggtctcgatctcctgatctcgtgatctacccgcctcggcctcccaaagtgctgggattacaggcgtgagccactgcgcctggcccttctgtatttattttattgtgtccaaaaggatagaagtaatgtgtttacatagaattattcagcaaatcttttgagtagaatttatatgctttttttttttttttttttttgagggagtctaccaggctggagtgcggtggtgcgatcttggctcactgcaacttccgcctcccaggttcaagtgattcccttgccttagcctctcaagtagctgggactacaggtgtgcaccatcacacccagctaatttttttgtattttagtagaggcggagtttcactgtgttggccaggatggtctcgatctcctgacctcgtgatccacccaccttgacctcccaaagtgctgggattacaggcgtgagccactgcacccagcctcgtatgcattctttatcctaccttttcttgatggaagtacaaggttaaggatttatttaggctttaggctatctagtggagctaaataattattatgcatttgtacattgagtgcccacgatgtactaggtggatctttgaggcaacacaacgaacatgcagggtctctgttggcatagtccactatctatttggatccattagcattttaggaaatagttgcaaaaaaatatatgttgtaatagatatagaagacacatgttgagcgtcatagacttggaagggatccagttacttgtctttggagaaagtgagaaatgtatatgactgtttcatgaattcagtttacagatttttgctttaagtttttttttgtgtttttgaatttcttattacagtgcagcttatgatgccattcttgaaagaaatgttgcaatcaagaagctaagccgaccatttcagaatcagactcatgccaagcgggcctacagagagctagttcttatgaaatgtgttaatcacaaaaatgtaagtgaacatttttggtttcctaagtatagatgaaatcaagatttattcatgaatatatgaatatcaaagactaaatattaggggctttaaattgttctgtattaaaacattgtttaaaagggatatatatatatatatatatatatatatatctacagggtgattttcctcaactttattaaattgtatcaaaagaatggcttctaaaatttagattatatgatttcctgtcatttaatttacaaaaggagttttaaaaagataagcgtttgagaagaattttattcagcttgatctcatcttctgctttttgttctccgtcaggctgacatttagaaaactgtagcattagcacagagaggaaattgttcccattatgctttgacactctgactttaatcatattgaatataaaatttatatcacttctccctaccccactcccacctctttaagtgatggcagtattcactgatcactttatgatgaggatagtgggtttagcagaaagtttttgaaactatctagagggtattaacatgtttctaattctattttctaatgattgcaaagataagtctttataaagatatataacttgcactcattttgagaataaacagttatacttttttaaacttacattaagcttattcatacttttgtgattgttctaatggaatgatttcttcagttgaggaaataaactaggagtgaattgtgtaagggacacttttaggcagtcctaaacggaaggcatctgactaaagacatttcatagtgtttgtccaaaagagtttatataatataatgagcacagtactttctgactacagataatacaatttaccacattttgagatctaaatatgtgcaagtctctgtgcattggagttactgggttcattatcaagggaaaaaaaatcatggaagttcaggattaggccctttatttggggagcttacaatggtgttttgaatacaaaacagacatacagagagttaaatatcaaacatcacaaagcagtggccgtttgtcaaatgatgatggtggcccatatattgaaatctaaaaagagggacaatttctgtgagctttaattaactgggaaggctttggggaggagtagacctaggctgactcttaaagatggggtaaaaattggattgttgaaggaaaggagccttcagagaggaagaatgacgtaaaaaaggtccagagacaaagattaaacttagataataatagggaggaagttgtggtagccattcttgttccaagtgggaacttgatgtgttgctcatcacagttttgctggtggcatcctgtccatggatagagctgctcgtgccccttgtggcctgtgagcacagttccatggcagtggtggtgttgccttagtttttccttggggaggagttcagttaatcctacctctcaagcctgggtgactgcaaagaaaggtggttcgttcaactgcatggaatatgactaagcatgtctcacatgattaggcctctagcaggggtggcagaggtttatccaggcagaactctcagcacctagaagagtgtggacaagagtaggtactcagaatatatctgttcagtgagtgagtataaagctaaatatgggaaaactggaaatggtaactgaattattccactcacccatggatggatgtttttgtagtgttttgccttttaaacaatttcatcctctgtacagattgtctcttcactggtctaagcatctctggtttttctcattcttttcatagatggtcttgagtttcttttttaatcttggctgtttatctctgaacacactttgaaagtgacctagcacacactactacataagccacctagcacacagtactgcacatctgatcaaatcctctgagaggagctgaggcatgtcatctcttaactgtagacattaaaaccctgttcagaaattacgtccccatctgactcccgttgtctttctttgttacaggcctgccttacagttcccatctcacccagtctttatattttttcttttgattatggagaattaagtatagtacttcatgtttctccctattaaatttcaaaggtgaaatgtggttgctcttcctggtctactagtgattgctgtgattgcttttttcttccttgttctgacttttcacttgtgggcttcacttcccagttttgctcaggatatctttgtaatagctggattaattcattagcaacttttgagcatattgcagaaattacgtgtctgactatcacagttatccagctgtttccaattcatcatcttattcacaaggatgttattattagaaacattttctaaaatgccattttgaaatcttcatatactgtgtctggttgcatttttctgatttattgctattgttctttgttgtttttattcatggaaggaaatagtatttctcaatgaacttttacctgctcttggtaattgttacttcttttgaagtagttatataccactactaatcaatcattgacttttgcttggctgtccagtctataactgatataatttcctttatttccctttttgaaaaatgggacaactatctgtttgaatcttttttataacagctttattgaaatataatttctatgtcatgcaattcacccatttgaagtataccattcaatggtttttagtatattcagtgatatgtgggaccatcactacagtcagttctagaatagttttatcacctcaggataaaagaaagaaatcttttatcctttagctgtcattcccctacctcccatccttctcagttctaaacaaccactaatcttctttctgtctctatatgcctttaatatttaatacctctcttctactctagggcttcccagatattaatgagaatagatttactatttgtccaagtctcctattgtgcattgcatgcggttggtagacttgaacttatttagagcagccagatgctttcttattatcatttccctctcttaaatttgtttggccctttctggtgtattatttttccgaatttattcactgaccaaatatttaaataccttatgtaaagctgaatgcttaaaagaaaaacatcaattctgcccttataaagtttatgcctaaaaaacaaattcccatccctaagtatcatcgtcagcaaacatttttatatgtgtgtcatgtaacttgccatatactaggcaataaaagtgattaaggcacagttctttctaataaggattctctgtggtagggatgaggctgatgtgaaaatgagactagattacagtgtgctgaataccataacaacattagaagataactggggacaaagtagagagaatagtcaactctgtcaagaactaggagttgtcagaatctacaaaagaggttcacctggaagataattaagttgagtagataaatgacaagcatagggaatagtatgtttaaaagcatcaaaacattttaaaaatgacattcttaaaactagcatagctaaagtatgaagtgtaatataggacttagcaggagatgaagtgagttgatggcatatcatggaggcttttgaatatactgcaagggagtttcagaatatatttgttggctttaaatttttgaggaggtaagtaatatgatcaggtctttcttttaccatattataggcagtaaatggtagctggatttgtagaaaaccatcgttagtgacccttaatcagctcaggccaccataacaaaatactgtacactgggtgtcttaaacaacagagatttatttctcacaattctgtaggctgggaagttcaagatcaagttgctggccaatttgattcttgatgagggcctgctttctgacttggaggtggccaacttttcaccttgtcctcatttgcctttcttcagtgtgtgctcaaggagagggagagaaaaattgctcttttcgtcttcccttgttttaggccactaattccattatgagcgccccactctcatgacctaatctaacccttattaccttccaaaggccccatttccaaatactgtcacattgggtgctaggagttaaacatatgaattgtgtggggtgtgtgtgtgagggacaatcaatctgtaacactagtgttagaaggaattacagcatgaacagtctagatgttagtcttcaagctgtttatagcacagggaatggaaaaaagagattgaaggtcagattgacagtagaatggacagcattctatgagtatttattatggtgcatatactgaaaaaggagtcaaaaatcaccctgagccttcttttgtaaaagagagggcacactggaaaagtaaggggtttgggtaggaatgaaaatgaattcagtgttaccttattttgtgagatgtccgtgcaaaaagtgaaaagaaatggattaaacacaatagtgtgagaagggatatgcttatggatgaaccagtgaaatagactgggaatgaagaaaactgggcaagtgcagtattatgaaaaaccaagggaggaaagggctgagattatatagagatactgaattggaaaagagctggtagaagggatttaacatttgctgataaattatgtagaggtttgtataatgtaagtgcttgataattgactgttcataaatggaattacagataaatgggttacagatcctctgtgcctccacttatccatcccctccttcaactcctgcccataaagttgcaatatataaaatgaaagcaattaacttgagcttagaatgtaaagaaagattttaaactgatggtagtttttttaactcatgtatttgtagttcccaaattaaaatattatgaagtaatttctaatttttctgtctctcgacttttattatagataattggccttttgaatgttttcacaccacagaaatccctagaagaatttcaagatgtgtaagtgtaataattaaaattttgttaagttagtacatttttcttagattgctgctggacactttagctgttctcttttttcactcataaagttacatagtcatggagctcatggatgcaaatctttgccaagtgattcagatggagctagatcatgaaagaatgtcctaccttctctatcagatgctgtgtggaatcaagcaccttcattctgctggaattattcatcgggttagtagaaaaaactatcatcatactctttgttttctcattgaggtgaaattcatgtaacaaaattaaccattctaaagtggcatttttagtactttcacagtgctgtacaactaccacccatattaaattctaaaatattttcattacccccaaaaaagtctccatgtttcttaagcagttgtgcatctttgccctggcatgataccagtctgctttctgtgtctagatttgcctttatgtttccatttatatgaaatacggcgtgatgttttcaagatttctccatgtttaccatgtatcaatagttcattcctttttatgactgaataatattctatataccatatttcgtttatccattcatccatcgatggacatttgggttatttctacctttcagctattatggatcgtgctatgaaaattcaagcacaaatatttgttggaatatatattttcagtcctttgggatatacctgtgactggaagtgctgagtcatatggtgattctatagttaactttctgaggaaccatcaaactgcacagtgactgcactattttacattcccactagcagtgtatgcgggttccagtttcttcacatccttgtcagtacttgttatctgactttttaaattctagccatcctaatgggtacgaagtggtgtttcttgtgattttactttgcatctccctaacgactaataatgttgggcatttttcatgtgcttgtggccatttgtgtatcttctttggagaaatgtgtattcaagccctttgctcatttttaaattgggttgtttgtctttttgttgtagttttagcatttctttatatatttcatatatgaaacctttatcaggtatataatttgtaaatattttctcccattctgtaggttgtctgttcactttgctgatgatttcctttaatgcacaaaaactataattttaatgaaatacaattgtttatttcatcacttgtgtttttggtatcatgtataagaatccattgtcaaacccatggtcatgaagatttagtcttatgggctcttctaagagttttatagtttaagtctcacatgtaggtctttgatctattttgagttaattttttgtctggcatgaggtaaggttccaacttcattcttttgtatgtggcaatttagttgtgccagcaccatttgttacagactactcttaacccattgaatggtcttggcacccctgtcaaaaaacagttggtcatagacacatggtttcatttttggactctcagttctgtttcacatagttcctatgtgcctgaccatgtattatactagtaccacattattttgatcacttttagcttcgtagtaacttgaaatggagaagtatcaattctccagctttattcttttacaatattgttttagcttttcagagccctttgtgatgccatatgaatttgagtatcattctatttctgcagaaagggcaattagaattctaattagtatttcattgcatctgtagattgcttaggtagttttgccatcgtaacaatatttagtcttccaattcacaaacataggatgtcttaccatttccttccttcttttcttttttcttttctttcttttttctccttccctcccttcctccctcccttccccttccttcctttctccaccctctcctctcttcccctcccctcccatcccctcccatttgtcttgtcttgtcttctccattctcagctcactgcaacctctacctcctgggttcaagcaattctcctgccgcagcctcccaagtagctgggattacaggggcctgcccccacgcctggttaatattttgtatttttagtagagacagagtttcaccatgttggtcaggctggtctcgaactcctgacctcaagtgatctgcccgccttggcctcccaaagtgctgggattacaggcgtgagccaccctacctggcctctttcagcactttagatgtatcatccattgctatttgttttgccatggcttccagtgataaatcagctgttaagctcgttgaggatcttttgtaagtgacaaatgcacctctcttgctgctctcaagatgcctttttgtctttcgctttcaacagtttgattatgtgtcttagtgcagatctctttatgtttatccatcttagaattcattcagcagcttggatatgtagattcatgtcttttttgatcaggatggaaggaagctaaaaagaaaaaatagattcatatcttttatcaaatttagcaaattttcagtcattattttcttaaatattttttctgctcatttttctctttcttctccttttggaactcccattatgcaaagttgatatgcttaatggtatgccatgtcttgttttctcctccactttaatgttttgtcccaggcagcattgggctatttacttgccttaaccatgttttcaaggaatgcctctgtctagccttggaccagggtcccacactgaaaatgtggctgctttcttcaaaatccttgcctagttagggaggcaggtagagccaaagactagttaaaatgctggaaatatttcccaatgttttttccccacctttttattgtagtaaatacatataaaatgtgccattttaaccattaaatctacagttctgtggcattaaatacattcataatgtgcaaccatcaccaccatccatctccagaattcttttcatcttgtgaagctgcaactctccacccaccagacagtaattccctattctcctctccccgcaacccccgacagacgtcattctattttatgtctatatgattttggctactataaatacctcatataagcggaatcatgcagtatttgcctccttgcaactggcttatttcacttagcataatgtgctcaaggtttatccatgttgcagcatatgtcagaattttcttccttttcaaggctgaataatattccatttatgtatataccatacttgcttatccattcatcaatcagtggcaattgggttggttccgcatttagctcctttgaaaaatgctgctatgaacatggttgtccaaatatctctttgagaccctacttttcagttcatttgggctacagccagaagtggaattgccggatcacatggtcattctttttaacattttgagaaactgccacactgttttccatagcagctgtaccattttacattcccaccagtagtgcagaagggtttcagttattcctcattcttaccaacactttatttttttcatagtaaccatcctaaagggtgtgaggtggtttcctgtttttaagttgccattttcttggttctgagttcacttgatagccataaacctttgaataatttccagaattctgaaaaagtttattctgacactttgatgttttatggtgcttctgtggagctattttggctgacatcactgcctctcatcaaattcttagtatcactgtatttcactgatttatatggagcaatgtaaagtttgtttttgctctgaagtgaagcagtatacaaaataaactgctattattaccagtcattccaaattgggaattgaatattaccaagttaccaaaattgagtgtatatatatatatatatatatatatatatatatatatatatatatatacacatacatacatatacatacacacacacacacatatatattcagaaatattttatatttttgttctctgggatttttacctgcttttttgcaatataatttacatgccatacaatttattcatttaacgtgtaccactcagtgtttattatatttgaagattgtatgctcgttaccacaatcttaactttagaaaattccattgccctaagagaaactccacatccactcatctttatttcccattcttctgtgttcctttcacctctagccctaagcaaacactaatctactttctgtctttgtatatttgtctattctggacatttcatgtacatagaattatataatatgtgatattttgtgcttggcttattttacctagcataatcttttcaaggttcattcatgtatttattgtgtgtcagttcttcttgtcattttattgacaaatatttcactgtatagatatattgtttatccatttatcacttgattataatttgggttgtcaccactgactattacaggtaatgctgacatgaacatttatgtaaaatttttttgtgtgttggtatgttttgtattttagttaaatctagcttattctttgaaaagtattgagaggatttttttttttttttttcctgagagacagaatcttcctctgtcactcaggccaggatgcagtggcgtaatcatagttcacttgcagccttgaactcctgggttcaataggttgaaaagaattttttttttttttttttttttttgagacagggtctctctctgtcacccaggcatgagtgcagtagcatgaacatggcttactgcagcctttacctcctgggctcagtgatcatcccacttcagcctcccaagtagctaagactatggacatgtaccaccatgcctggcaaatttttattttttatttttttgtagagacggggtcttgccatattgcccaggctggtcttgtattcctggcttcaagcaatccagctgccttgacctcccaaagtgctgggatcacaggcatgagccatcatgcccagcctgaattttttaaaaattatttagttcagtggaattacatcttcctttggattcatctggttcaattacctttactcagtaattaaaataaatacagagatagttttcccattataagacaattatgtcttagggctattgggctttttttttttaagtgaacaatcctgctacaggcttatccttaattatcattgtaagtgaattccttgtatattacatatacagctgctctaatcatttgtctaatgcaatctttaaataacataattaaaatctctttaaatgggagagtattttatcttcctgagcccctactcatacactatgtgaagtagagcagacgagtgaaacttctaggtttgggttgtttgtttcctgagtccttagaccggggcagtaatccaacattgtggaagttcatttgattttagtaaagcacacccctccaaatagaaaggttccagattaatgaggatagcaggtggctggaccagaaaaacagaccaaatggtagaagatagaaaacaatggaaacaacaagaaccacaaaaaacaaacacaaaattacaaaagagcaatatttatggtaatatgttaatcggattagttccttagtttaaaaaggtcagattttggcagcacacaaggctcaacaacaactgcgtatttccataacacaaacattcgtagctaacttcaaaaggctgaaggcagagaggttggcagacatataccaggaaaatgcaaacatcaaaacaagggtaactctatttaatgagataaagttgaatatggcggggtcagagaggaagtgttcctctctgagaataaagagtctcgcgttttcaaagtgaaagacactatccaattaggatacacaattatacatgaagtagggttgctatacaaaaagcttaaactgtagaaaatagaagaatggcacaagcacagttgtattgggatattctaacttactcccttagtatcagtacataaagtggtaaaaatgaagtacatctgtagaaaatttcttaatgtgataaagtggagctaatgagacctactggggtctgttatctattatgaagaatctccctttatcttggcttgggctctttgggaaactctagagtggagatacgcatttaagttttttgcaggtggtcttgaggccacgattggtactcatctctctgctctactacttattctagattcacctccacccttggctagtacttctgctagtctgaggttacttacttggtaaaataacctgacctttcatcccttgggggttcagggcaagtcaggattgctactctgagaccaaagcttacgaggtcccaccatctagatagttgcgggtcactttgtcggaaagagaaagccaagtgatgtgcatggatggctcttctttgcttggaagtgacacacatgacttctgcttagagtgcattgacaaagctagccatagacttgcttaatttgtaaggaaactcagaaatgtggggagggcagacttcagaatagtggtgagccccagcctctgccacagtctgtccttctggctggcaaacattcctttgctccctttattccacaccttcttaagggaaataacccaaagttctattccatcaagacatttatcaaatccaggcattgttcctcttggtccagaaacataggaactggaatgaccaaattatatggccacccctataaccactgctcccctgccaaataccgtagatggagtggtcagacagggccagtgttatcacagtgaacaatcccatttagaaaactgaaaaatgcagtcattggttagttgtaattaaattcttctgtacagacattgtgagtgtcccttgccgtgggtggggaatattcctaatcagccctcctgactgatctctgtggttctctatagtacctggctctaccctgtgggagagtcatcttttttgctatcctcatgaatatatctaaagtggatattgaagaatgtattttccttgagggctgctcacctttctcagcctgcttcttacctataaaagattggggcccaagggtcattttaaggccatccttctcagccttgccactattgacattttggagcaaacagttctttcttttgatgatggaatgtttagtagcattcctggcctctacccactagatgccagtagcactccccagttgtgacaatcaaaaatgttttctgacattgccaaatattattttggggcaaaattactgtgaattgagaactcctgtttgaagtgtagaaggatcatagacctttggtgttaggtctgacagttaactaactctttcagaaatttaagatatttcttatctttctgattgtagttcttttcatagtatcttttttagctcatgggtcctgtattcttggacttaattgaggctgtcttcagtcttctgtaagctttcaagcttctgttggcagactgaggcaaatttatcaattgaaaattttacaggactttttccctgaaagggtttcagaattattatgtgaaaatgatgcatagaaaccaacccaagatatcagtggcttaaggcaatatttattgtttacttgggtctgcagggttggctgtgtgagactgctccaaactatgggtcaagttcaggcttgtcccatattcaggtttcagcatttaaactgaagcatacaccagagacatccttttctcatggtgaaaggtagaagagcaagagctatgctgagtcaaacacattcccccatattccattggacaaaataagacaagtgactgaacctatcgatagggtgaggacacagtctggggtgggcaagaatatttgcagaacaatctaccataccttctttcaggggtctagtagcatttagcttttccaaaatggcaagaccctgaaattctaggctctgttcccttttatttctgctttaaaaggtggctacttcttttaaatgcaaccagtagctaccaacacaaactactgaagttttgctttccagtcttttctagagcagggttcaacaaactttttctgtcaaagccatgtagtaaatattttaggctttgtggataatagtctgcatcacagctacaagactctgccattgtaacacaaaagcagccataggtgatctgtacttgaatgagcatgactgtgtttcagtatcagcactttctttacaaagcaggcaggccttaatttgccagcccctgtgctagagcttcaggttcattgtacaagtggctgtgcaggtgacagcttcatgaaatgttttgttactacataacctagatcacctttccaaccttcgatgtgagtttccctgctgctcaactgctaagccaggatcttatgtttttataataattaacaccccacctctgacaccagtttcagtgttagaatagactcagctgtactgaataacagataaacccttaattctcagtggcttagcatgactcaggcttatttcctttgctgaatgtgtggtgcagatcatggtgggtttgtggactgtgcgtttacatagatgatcagcaacccaggctgccagagaatcctctggaaagttcctaatcaccaaagcagggcaggagatgacaggaagttgtgcactggcccttctcttctttacttccactcacatcccatgaactagaactacccacgtgcccttgcctaactgaggaagctagaaaaattgggggaagaagacagaatgttgggttagttccactgcctgcataaattctaagttgctattcttatgtatagttagcagtgtaattaacagctgtaaggtacatattgatatatatggatgaatttcaattaatagtctttgaggctttttttgacaatttttttgcttaacaaaaatatctgtctttaaaaattgttactttgctcttaattttttcacaatgaagtgcttaaaattggaatgttatttctaaattggaatccgctagtataaagagccattaaccttcaaccatcacactaaacattgaagtagtatcaaagcttgtaatatttattcttaaacatgcagtgtttctttgctgaggtactgtattttagaagtattagcaacattatatttacagaataccaataatgaaaatttttttcttctgtttcattaagacctttgaattgttggtatatttaatttcataaaaccactagattacatatcttctaaacccatccatgattgcctgtcgaaatatgttaaagacaacatacatgcttttctgtatgttaacattacaaaagtaatagttgtctttcaagcaggctattttccttttttgtattaatcggtgatatttaatatgtatactgcatgtcagtacaggtaatacagtgcatttgtgttgtggatttatgctttcttcgttttttggtcctttggcttataatagtattcatcaaagctaacaggcaaagtatgttaaacatgaagccatgagtgtttatgctgctgcctgacttttgatgggcacagcacagaatatgttaaagtaggggccaggtgaaaaattctgaattattcagtagtatctatagcaagtaattttatagattagtggcaccaaggcaatggtgtcctacttctacaaacagacagaaattttatagcaaatttgtgtgacttcaggtgggaaatcagggatggaaaaatggataatgactcttctagtcctttggaactgggtatctgccagtctaaaagatcaaataacatttgttaggattgacaagatggctcgttgttgacttaaaacatctatataaagcttattgtgactttaaaatgagattttaaaaatattggtaatatgttatgcaaatgaatataaatgctaacttatgactctttcttttactgtagtagtttttttatgtgagctttgtgatgtcttttcaaatcccttttactctaaccaaaaatgtctagctaatcataatttctagcaattaaaacattactaacttctctaataactgtatgtattcataaattttaaatcccataaaactgacttctcaggtttgccttttaacgatgaatcagtgcagtaatattacagtgagaaaaacgaacaattaacatgaatgttttgcaagggatagtataactttattgtgaactgtaggattttcctatatatcatggcagtcattttttaatttttattttctgaaggacttaaagcccagtaatatagtagtaaaatctgactgcactttgaagattcttgacttcggtctggccaggactgcaggaacgagttttatgatgacgccttacgtagtgactcgctactacagagcacccgaggtcatccttggcatgggctacaaggaaaacggtcagcacacacatttatttgaaatatttttctgatttagcttttttctttattcagtagattttttatgtaaatacttaagcagaagtacgttgagttaaatgtgtatcattgtttgaaatgtgtatcaaaagtttgcaggtaactataaattttttcatcaatgtttggaaaaacttggggcccttatttgtttaaatacggatacataacatcactactaccattggataaagaatttgttgccatggccctgagacagaatttatgctctttgcttgcctataacttgaaaatgaacatttctaacatggtctcagggatgtatatagtgtactgacagtttattattagtgtacatcagtgatatttgcctatatttccaaccccatgaaactaaagctcatagcagtagcactcattgtaaattttaggagatacattaaggcctctgcaaagctgatggataattaaggtgacctcttgaaggaagcagtaaagtttcattaaaacgttgtatccagccttaaggaaatgacttttagtattttgtatgggtatatccaattgtatcaatcaacctaagaatcagtgttgaacaaaattatctggcatgtagatcatgaatttaaacattttgtatgcatatacctacttatatttaatttaggaagaaattttgttgagtcttagaaatttaggagatgaataaatctgctaagaagcatgggattttatggaaataaaccatcgttttaaaaaatgtggtgacttcatccaaaatactaccaagaataaaacctagacattttttctggcaaggaatctggaatagcagttcattttgaatcaggaaattgtaataagtcaacttttaagattctttttttataaaagatacgattaagctgagcttgattttctgagctgattaaaaacaaatactttaaacatttgctattaattttttattcttaagtaaatatgctgttctttttacttacactctacctgaaatttgaagtttttttggggggggggaattgataacttcacgtgacccaccagcatgaagattgcttttgcatttgctgtaattgattgtcatagatatggtgttatgtgtcagtgtcctataaatatgatcttaggatagctccctgccagaaattagcactaagaaaaactgtcatatatagaattgaggctgggtatggtcgcttacacctataatcccagcactttgggaggccgaggctcgtggatcactcgaggctaggagttctagaccagcctgagcaacatggcaaaaccctgtctctactgaaagtacagaaattagtcaggtgtggtggtgcacacctgtaatcccagctattctggaggtgaggcatgagaatcacttgaacccgggaggtggaggttacagtgagccgagattgcaccactgcattccagcctgggcgacaaagcgagactctgtctcaaaaaataaaataaaataaaaaatgaactggcatatggttcctctttagttaagaattatgtaggtcaccttcttgccttcccattcccaccctaggaaacggagtcaaatgtaatgcttaatgattataactacattagccagcaaggttaaacataagtacttcctccttttaatgacatctcacactcattttatttatcttatttatttatttatttatttatttatttttgagatggagtctcgctctgtcgcccaggctggagtgcagtcatgccatcttggctcactgcagcctccacctcctggcttcaagccattctcctgcttcaacctacgagtagctgggactataggcatgtgccaccatgcctggctaatttttgtatttttagtagagacagggtctcattatgttggccaggctggtcttgaactcctgaccttaggtgatccacctgcctcagcctcccaaagtgctgggattacaggagtttgagccacaacgcctggcctcccacccattttaacaactttgctttatgtaccttttattgcaggctactcagagcattttggaaagcagtgtaatcaatatatttttaactgcttaatagactaagcagttagtttaaagctagagttgtgcatgaatcagacttatgttcctagtcttcactggcccagataatatcttctctcatgcttgcagctttcaaaatacttttgtttaaaaataagcttttctgaaagttaccaaataagttgtatgctggatatttgaagtttaacattctctataaaatctgtagagaagatttattctaatagatttttgtcaaaaacggaaaccttagaaaaaatttttctctgaggcactaatttataaatattaaattttttttctaaaatcttatccttgaaagctgaaccatgacataaatatgaaaatattcattcattttaatatgacattttagggaaactttagttccacagtatttccaaaagtaatttccagtttagctcttaagactcttcagtgaactggcagccttttaataagaatgtactgtattagaaagtacaggctttaattttctaagtcctttaacatgagtaaagggcatgtgtctttctgacatctatttgtgccgttttcctcttgtcattttaaagaattgggaccttcagatgtcacaactaaatgcaagtttctaaggcttttccttctaaattgctcattcttccctcttttcctgttacactgcaagcacttactctctcctttttgtgtgatattcaaacccaaaggcataaaatgccatgatgtgttgtcagtttcccttagtaagtggagattccaaattgtctgtttctgtgtctagcagattcttgtcaacattgattgggattcccatttacagttggcaagggtcatcagtaagtcttccaggagactcttcatactcaattcgtgggaactgacttactgtatctagccaactttgctttatgtaccttttattgcaggctactcagagcattttggaaagcagttagtttccaaaactaacttcttaagccaaaagcagtttggttttatgggtttaaaaaactttaggtaggaaacatgaaatacatttctcttactaagttttccttgattagttgttggttctctgtgcacttgttccttttgggatagtagggtaaatgtagcatgatgttgccaagaaaacaaatggacttttaattcagaacaagcatagcacttctcaattaaatgtatttgggaaatccagtttaaaaattctaaagagctttagattaacttttttatcataattattcatagagattatttctgttagatattttaatatgctgaattattttctcatgcttttttctttaacttagagagtataatgcacagttgaacttctaaatagtatagtataaagattttatttttataattttactacctcatgtacatttttatttacaaagtttgtgtttggttctatttcatattttataaacaagttctcagggacaaacatgcagggtttttctatttatgcaatttctgtgcatagctctcaatttgaaattagatatgtagttaaaatgccacactttacattttcttttgtgaaccaaagactttcaaaaaataatttgtgttttaaattattccattagctaaagttacaatcactttttttcttttcgtgacgttttgcagtttttatataatgcagtcatattatgcttctttgattttaatgaccttttgctttgcttttccttcttttgtgctgcaaacatatagtggatttatggtctgtggggtgcattatgggagaaatggtttgccacaaaatcctctttccaggaagggactgtatccttgtgctgctgcagcagttaattagttaggcgatgaacttctttatgttctctaatgaaaatgaatatgctacatttatacagatgggtttttaaacaggcataaagtttgtggctattatagttcaaaaattgttgagataagaagctgaaatatttgtaggctgcatctggcagtaggacatacagtctctgctggtagtcagagcacattcactgtcactcatttttattttatactgctttttataattttgaagtatacatggtgtgtgtgattttatttatttctttcttttttttattttaaccaaaatctttatgttaatgtcattgcattttgttttcagttgacatttggtcagttgggtgcatcatgggagaaatgatcaaaggtggtgttttgttcccaggtacagatcgtatccttatctttggcctaaaatgtagtttctaaaggtcaaaatgtatgatagcacttcagtttggtcaggtataatgtattttgtctctccctaatatattgttaaattactcttaaaataccacctactatttgacatagacttttctttccgttatttattgtttcatatgttaattctgaaccctgctcaattgtagttatgcacaattacttgctggctttgagttgatttaacctaaatcaaaaatcatggcttgcattaaaaatttataataattatacacttaagtctagaaatacgtacaacttaatatgaattttggagctgtctgttgcttctggccatccttttgttttgtcccctacctcctttttgttaatgttctgtgtggtttgtgtcttttgattgttgtctcattactcacataacatactgaccctttcatctgagaatttcagcagtagtagttttgtatggtaacgatagctttggattcatactttttgttcatcccactacttttaatatttatattaacaatgatttgttatgtgtttaccagctagtaacacttagaattgtttcaggaggaagaatgggaaaagccatattcacaagattacaataagtgagttttaggccttggccttcagggtcctggagtgtaaagactagaggaaaggagaccaagaaatcctaaccttacaacttagcaaaaaactgaatcttttttataagggtcagagctttagaaaatttttttaaacctaagctaaacaaagaatggcaaaagaaaatgccacttttatcgaagcctttatttttattgcaactgattattttctgttagtgtagaaaactcagtaaaacaggatgtgttctagaaatattgtctaggagatataatcatgttttctgataaattgacagaaaaggaaaaattttgtatattattatagcattgtgtgcagtttgcagttagagccactatggatagtaattgtcattattcttagttgcttatcattttatttagaatttgtgagtttaagcttccattttaaggtgaaatcagttagtttgaacacacaataaataaggttaataaagcttatttattgatcatttctgtccacctacaatcattgccttttgcagggtgcctgtgagatacaaaatttataattgccacatcctttcttaggaatttttaaatttctgttttcttgtaatatgaatatgactaatgtattgaacattagttatggagtatttttcttagctacttgatattagatattgatcagtggaataaagttattgaacagcttggaacaccatgtcctgaattcatgaagaaactgcaaccaacagtaaggacttacgttgaaaacagacctaaatatgctggatatagctttgagaaactcttccctgatgtccttttcccagctgactcagaacacaacaaacttaaaggtactttttacaaatatgtacatttaatcccatttggggtgtgtagtgtgtgtgtatgggtttgtgtgtttatatgtattcatattcttatgggacatgaacccaaggttttctctggatggtggggaaaaaaatgaggtttttgttttttttttctttaattttatatattttaatcatatgtataagataattttacagtaatatttttaaaacatatgctttttaaaaaatctcaaattattaataatttgagaatctttacaaatatatgtacattaacatcattatgtttgcagccagtcaggcaagggatttgttatccaaaatgctggtaatagatgcatctaaaaggatctctgtagatgaagctctccaacacccgtacatcaatgtctggtatgatccttctgaagcagaagctgtaagttattttcttaatgtttacagaacatattgcattcttagagttagaatgacaattaggtttggaggagaccttttaattttaaataaaaatgtagatacatgatgatgatgtttttctgtttcttcatgaagactacgtcaaataaactaatgaacatattcgagcccctcctacacaaaataaagttacctcccactgttttttgcaatcttgcctggatacctaaccagagaactaggatgttgaatgctctgggggaccatcctaactcaggtataaaacaaattactgtatccaaaggaagacagaattctatgatctgtgatataaataaaatgtggcaatttcaagagctagaagaaaagaaaaaagacagttaaacattttatttcctgcaatgaaggagtcttcctaaactattatgtctgtataagtaagttgatgattgatcagtcttgatctaatgatatatttttataagtcatctgtctggctaatatttcaaataactacaaagagttaaaatactcccagcatactgacttggttattattgccttgtgtttttcagccaccaccaaagatccctgacaagcagttagatgaaagggaacacacaatagaagagtggaaaggtacattcgtcagattcttagagggaaaactgtgaaggagcttctggtttttatatggtgatttattatcatgttagagaaatttgtgactttaatatgcataaccgaaatgtaatattaatatttttacataagtagaaagtaagtctgcttccttccttaacttaatcttaagtttccaagtttcccaccccagacacagacacattagtgctctgtctcatatttttttccatggtttgtgaatacacaaatgtgtttagtgtctcccacctctcctcttccacccttttaaaatcacgtatggttgtgtacggtgtatgctatatgtacttgctttgtttatttattatatatttttttgagttggagtctcgctctgtcacccaggctggagtgcagtggtgtgatctcggctcactgcaagctctgcctcccgggttcacgccattctcctgcctcagcctcctgagtagctgggactacaggcgcctgccatcacgcccggctaatttttttgtatttttagtagagacagggtttcaccatgttagccaggatggtctcgatctcctgacctcgtgatccgcccgcctcggcctcccaaagtgctgagattataggcgtgagtgctttgttgatataatcagatatctggaaggttattctcttttagttcacgtatctgcctctcttgctttaataactggttagtgttctgctgtatgaatatgtcacactttatatatccatctccctcttgatgaccatttaaattgtgtccagtctgttgctgttagaaacaactctgcaatattcatgttcacatatgagaacatgcctggaagaaaaatcctggaaggagatgtgctgagccaaagatatttttcagttatttccaaattactctccaaagaaatggtagtagtgtacacttctgtccatattatataggagtctctctttgccctcacccttgcctacagaatgggttaatttttaatatttgtaaatctaatatagtagttttattctattttatgaatgtggctgaaattaatcatgctttgatagtcatggaagttttcaaatatttcttcagaaggtcccctgggacatgtgggtcaggtaatttttaggtcccgtttacttccatttgtgttgctgtccttcagtgatttgaccacttttgtaactgtgtgactttgagtaaatcactcccccttcatctcaccctcctacactgccgcctgcattttacctcatcttaaaatagaggcagaagacctgttattaagagttgtctctaaatcctgggaaggcaaaggggactggggaggtataaacatgaataagtgacccatctataaatgtattttgctaagcatgaatttgattctttcttagaaattgaagagatttagagattagttttctctgaactttgggaaacccgtggttagcagagcccgtgatagagttaaaagaatgacaaaatgataaaattggatagtgtctgctgcatttgaatatgtataaagatatagctctgtactgagtatgtatgaaaacattaatgtaatatttttacatcctactaatttacaatagacgatgaagtattttgtagaatcttgtggttttttgggttgttttttttttttttttttttgagacagggtctcactgtgtcgcccaggctagagtgcagtggtatgatcatggctcactgcagcatcaaaactcctgagctcaagtgatcctgctgcctcagcctccccagtagctgggatcacaggtgtgatccaccacacttggctaattttgttttttttttgagacagggtctcactgttgcccaggctggtttcaaacttctgggcttaagtgatcctcctgcctcagcctcccaaagtgctgggattataagtcttaagccactgcgcccagcctaatttttaaaaaaaaattttgtagagatggggtctcactgtgttgtccaggttggtcatagactcttaataggccagcagttgtaaggcacaccattatgtgccacaaagaaaaaaaacaccttcagttgtacagcaccattggttataagatatagtcaatttcagagattaaactgtgaaaaaagtacatcttaaaatcagtgagatacagtgttttcatttgtataagaatatatttgggggttttgattgctttaaaaacatttacctttattctgtatcctttactcctagccccaggtgcatgtcagtaattacccacagactgcctttttcaagatctacttaagagttttagcgcatagcagaaagaaaaattaattgccaaagccattaattacagatggctttgcctagttagtgctcctaattagttttggttcttctgccttaatccctttgtgctttttcccagaggagtgctattttctctcttaaaaaatcctcttactgcaaatgtttatcattcctttttgtttctttgaagaaaaccatctcttattctctcctttatcagtgctttctatttttctccttccaagccttaagttactatagcaaacaaacttatctccagttgttgttcattccaacatattcatttgttttaccttattaccaatataaatgtcatactctgtaatcagggattctttatcagaattttattcttcaggaattaacacagactccttgaaattcgatgcaatattttttgtttgtacatttttctcagaagagggttcactacttttatacaattctcaaaagattccatgacccaaagaagatgataaatagtgttgatgtggcatccaccattaaggttaagtgtggtgtgccctgtgagtctgaatgtctacttaagaaccttaagtagacattaagaaccttaagaaggttttttgtttgtttttgtttttttgttgttgagatggagccttgctccattgcccaggctggagtgcagtggcgcaatctcagctcacttcaacctctgcctcccaggttcaagcaattctcctgtctcagcctcccgagtagctgggactgcaggcgcctgcccccacgcccggctaatttttgtgtttttagtagaaatggggtttcaccttgttggtcaggcttgtctcaaactcctgacctcaggtgatccacccacctcggcctcccaaagtgctgggattacgggcatgagccaccacaccacggccgaaggttcttcttacgtagacattcagactcacaaggcacatcgcagttaacatcagaatcacttctgatgataatataagtgaagaatataagacaggaggcgcatatattaataccagcagagcagctcccagtgtgtctcttcagttggaacagttgtcgcagtggtctacttgctgtccagaagcctgataagagaaaaagattcccatggagaaatgttcttggaagtgataaccatgcttactcataaggagttgaaatgtagcttacctgctacttttcctccaataaaaatgtgtttatctttcattctgatttgttgtgaagcttttgcacactctaatttaaatcttggtagcatatatctagttgagtacccacagtgcaccaggctctattccagggcccaggaaatggaagtcagtaagacacgtggttcaagccctccctgagacagatggtagtacagaatggtatgtggtatgatgtgctgtagcacaagttgctggtagagtgaaaaagaaagcttctaccccagcactatcaaaccaacttcagaaacagtgaattacaggaaagattagtacttccttttaatatgatccattgttgagtgtcaaggaattgttattaattaacatccttgaatcttaggccgacatttaactgactgtcattgtaaggacactgtttgaagtacttcacatgtataaaaatttccacttaaaccatacatgcgttgtgagattggctcttagactttgaaaagttcatttttgtttacttcttttacagaattgatatataaggaagttatggacttggaggagagaaccaagaatggagttatacgggggcagccctctcctttaggttggttacaatataagcttggttaagattacagtttacttcttgtgttgtaatcttcagtggcctgaaacctgcagttcttcccatattgacaaaatcattattattccaggcttaataagtataaggaaatacagttttgttttttctactaatacattatactaatatatcagtaactgttcataagatgcacatctttttctatgatactgacattctgaagaacagaaacttaaaaactttttgttggcattgttgctgggtctttaaagaggaaacttctcaaaattcaatatacatacctttctatgatcttgacagtctttactttggataaataaaagcttcactgcagaatttagtacatgtaataccaaattgctgtctttctctttttgatattattgatttgttgaatgaaggcaataacattaaaaccatcactagaaagtattctttctctaagaagaaaactgggtttgtaggagttaaaacttttttttatcataagctgatcttatatttaatgttagtacaagtaaaagtataaaggatagaggggaaaagttaaatggcaggtaacatgtacgctaagtacataccacataacagacactagtggtttatatactttatttcattcagcccctaagatcctaaggtataggattattgcacacatgttatggatgaggaaactaaagttcagaaatttgagataacataagattccaaatctattatgtagatgaactaatacagtaacttcagagtgtgtggttttttcagcctcccattttattatctggctggcaacagagacttctctggctagaggttaggacagttgtatgaaggaggtgaaatttgagctgagccttaaagagtgagtagtatttcaaaagatagatcttgattttgaagtaaaactatgccattttaattcctcagaaacttctacttttgaggaaaaaaatagatgttgtatctagcatcttgtatatgggtaaggtttttaaaactatagcgacattgtatactataaacataattgtttaagccattttttgtggcttgctttgacatttttggttatatattttagagttgtatattttaaatctttgatcaagaatgcagtcttccagattatagtgtagatcctgttgaatatatgaattggttttgaccgcttttacctattttggaaatggccttttctctacaatttacttataacaaatttaaagctctattataaatactttgtgtaattaattagctttgtattgctatatagtagtagtataacaattgttcatgatggaggctcaggtgggatttgaaaagttcattatgtgggacagttttatactttagcatactatccaagtgagtggcacagctggagtgccagatgtttgagtaaatgtaataatttcatgagttagagcatttgtatttgttcttaatttgtaagtgaataatttgaatcttagtccagcacttgcttatgatcacaaaataagtcagtgaaaaagatagaaattgaggtttctagactttttctggatcctcagttatagcttgcaaagacgagtattagcaaattaagctgttataaaaatattctgctcttgattttgtactaaaacagaaggagtagtgtttggtaaatcaaaataccagataaccacagtaccatttccacttgatttttaaaaggaattttattctttttccctgtcgagtgccttcctatctttgttttggtttggctaatagtaaagtaagtttacctgccttgagtgtatagaggctcacttaagagaggaatgacccacgtgagactaaagattttccatattattaccattcagatatttgagaatttactgtattgctttaaagagaaaacaagtgtgtgtttttttcccttaggtacttgatttttagattaaaaagttaacaatgcatttaaaagtcaatttttatcagattaagacatttggataaaataatagaccctgaactagaggcatatataaaaattgtatatgttggagcccttttatggtttgagtgtttcagtacaagtcttagaaactagtcattgtgtactatgtatggtacacagatatactgttcagtcagaaaaggcttattccaagtattgattgaactaaatagaatatactatctgaatttcactctgactgggaagctaatggacctttcttgggtctaggagattatcacctcttttacctctcatctctcaggcctgaaatgctcatcctgcttttctcttccatttcagctcccatcacctgctttgcctcttgtggttccattcctttctgtatcccagtcccctccctaaagattttcctattcccactacactgcctattttctttttgcatttgaagaaaagctcacagaggacttctcatattgaagtgttttattgctcatctggacagaatggagggatgatctcaaatacagatgctgggttcaggagcagtggttttcagcccatttggtttcagcgtctttgggtgcctgaacctcaccctcagaaattctgctcagtgttccatttgaagaccattgattttatttcataaatgtattcttgagaacttttaagtaacttgcattattccaatttggaatgacccttatttagtgttcatgtggttcaaaagtacttagcctagtgcatgagttacctttaactatccttcatcccccagcataagtcattcctgtccccttcctaaaccaatccccttgaggatttctgtctcgagctcaggtattcctgttaactttttaaaatccaggaaatgcttgttaggtaatactttcggcaaaggaaactgtttgctcttactttatttaataaatccatatttctgcttatcaagtattagagtagaaataagaagacccaagtttacttaactaggccacttgagtgacactggcatgtcccataacctcgtgtaaactggggaagttgaattgaggtttcttcctgttaaacttaattttattccttgtcttggcatttgctttaaaacaagatgtgccagaagtacatcttgtttcaaatttgaatcatttgaatttttcctttttagtgagaagctataaagacttttttgtagggaagtagcttttaacttttgtagttacacagtcctttaagatcctctgtccaaaaaaaggcattacagacagttttgcatgtattatcagcagtattcacacataccctgaagcccattcatggatcttgctgcaggaccatttctaaatgtggctcagatgtaaaattcttgtcttaaactgaaaaacacattcattgaaaggataggactccacgattctagacattttcagaattctcacctcatagctgtcaatgaagagtgtctttaagttagtgtgttggatatcatttgcgattatttttagtgagcctttgaaacccaagagaaaaaattaccactggaggcagtcagtgcagtgcaagtagcttgatctgcagctgtctgcaactgatttgctgttttgtttctcatagcacaggtgcagcagtgatcaatggctctcagcatccatcgtcatcgtcgtctgtcaatgatgtgtcttcaatgtcaacagatccgactttggcctctgatacagacagcagtctagaagcatcagctgggcctctgggctgctgtagatgactacttgggccgtgggggggtgggagggatggggagtcggttagtcattgatagaactactttgaaaacaattcagtggtcttatttttgggtgatttttcaaaaaatgtagaattcattttgtagtaaagtagtttattttttttaatttcaagtgatgtaatttaaaacctaagttgtgtttcaaaacagcaacaaaactgtattgtatttttttgctgtaattaactgtataatgtaaacctaattattttatcatggtttaaattttttgcatatttgctttatcttatgctgctgattttttttaactgaatttgtaagattttgtttatcaaagcaactattatgtggtgacttgcctatatcatgaattatttaagatttttatagttttttttaattagaatttatttcagatgttttgttcatgatactatccttcagggttatgtgcttatcaatgaaataaccccagaggagtgagggaaaataacttgtagccagttatattcaggaataactactgtaaatgatgaacgtgttaggagacctccaatatttgctacttgccaatcctaatttagttacaagaattggtaggcaatgctacttaattttggcaaaagccccgtcatctaa

SEQ ID NO: 43 - DNA, 69317 bp, Mus musculus
ggaggcggggccctgcgcgatgacgtgggcgggcgtgcgcgttgacggcccgcgtctctgttagtcagcggagcggccgaggccggacgttgcggccgaaacgcggagccgcgaacaggattgagtagcggccgcggccaccgcaggacggcgccgttctccgctacgggcttccaggtcgccgttggctgcactgccgggtgagtgcgcgggcgccgcggctcgggcggccgccgcttttccccggccgtgaccccctcccgggaacgcgcgcggggcgggggcggcgcgggaacaatagcgcgggcggcgggggcagcggggggcgtggtccactccgcgcgacctggcttcaccgctccggccggcttccacgtcgcgcggggggaaatggagcgggtgggcggcaagttcggaggtgctcccgcggaggtcgggccgacgcgaccgtgcatacgtctcccgcacccacggggagcgtgttttgactgtgggcggtttctttgtgcggacgtgagtgccgcgacgccgagaagagccgggtggccgcgagcgcgccggcctgcgggccgcgccttgagaggggcgcctgccgctgaccttttgactttcccccgccgctgtccctttgtcttgcgcttgggttcctagtccagacaaggtagaaccaagtccattgtaaagtaccgtaaggaacgcattacattgttattcccgaaagtttcccatcccaccgggaatttaatatcatgttgactgcacagtgtccggtagtttctatttttacttctgaaattaagtgatcttttcagtagaattctggtctgccggtctattgtgttttgagatcagcttccaccaagtacctggtcagttagaacatgtttatttcattcattcatttggcaacagttagtgctgtatccaggtggagaagatgtgaaggccaagagaaagacccttaaaaattagggtagtatggaacagaatagatgtgcctttaaatgagacgattatgtaagggatgtatgttaagtaaggtatttggctcatttgactggaacttccaaggatagtgttaggaagaatatccaggtttggcttaaatatactacctttattcttaaatcccaccccccccttgtcaattttcgtatcattggtaatggttacttcagttctcttattgaggctgttaaacttggaaggtttacttctgtgtctgacgaagtaatcaaaatggtacttagaggcctattttgcatcatttccccatcaccaagcatggaagtcatactcattgggttgattgaaagacttttatagacaaaaatttaaaataaagccttaaattctccacgaagtttcagatgtgtcacataccactctcagttggctagatcataaattaatagaggatgttacctgttaaagaccaccaaagggtttggaatcactttttcacttctaggttaactattcctgatttttttctatatagttaataaaatagaggattatggcttgtgtgtatagtcataaaaagttgagtagccatacttaaaagtcagagatgctccaaactctccaaatgaaacacttacagtgtcttgtagataaaggggatttacttggtactctgtcatcaaagttgagaactttgtccacttctagtattttaggtaagagctttctctagtcatgtatgaatacacccagacacaacagtgatgtttcattaagaatctagcatgattgcatttatctcccttaaaaaaacttatgacggtgggtgtgcctgcatgatgtttttgtggggtggggtcacacatgccactgtgtgcatgtgaaagcctaagagcaactgtgtgggcttcattctcttcttccacctttctgtggggtctggacatggaactgggttcccctgcttccaggaacctttacccagtgagccatatttatctttttgtgactattatttcacaagggtttcgatgatttaagtttgaaaatcaacatgtaaatgtatcttacaaatatttctagtagttcagcgctgcttaatttctttagaggtgcttactagaaaggttaaatcttaacttgtatttaaccaactcacaaagcatatgggtttaaaaatccaagttttggtgcatttccactatttgaaaagtatcttttcagtatgaaagtagttcagatgaacttatttactggtaagataggaatgaaaaaaaataagaacatgactttgttactataagatatagatcttgagacagcaaacttttattgctttatcttgttaaatatattgggttctggaagggactccagaattaagaaattatttgagtgattcagactctacaaaggttcagttaggttgttttctaaattctgttgtttaaacagcttttttttttttgatacttaattcacataaaagagttacccttatagagtatactttttagtggtttatttgttaattatgcattcatcactactatactattctgggtcatcattttgcacaaagaacccccaccccttttaaaaataatctgtctggtgtttgaaaggaacagaatatgttaccttagtgagttttatcagcatgacagactaggaaactatatgcttcctgctccttgtaatcctgagagaagttagctggaaagggattagtgtaagagtaaactgaggcacaaatggtggcgcatgctgtaatcccaggatttgggagtccaaggcaagatgagtttgagactgttctgggtcccaagctaaagaataaattgtaccaaaatgaatacagttaggatcataatccatgaccagtattatggaaataggctggagaagatgctagatggcagtgaaagagtaatttgttgttaataactagctgtaaaccatcctagtggtatcgaggggttgctgaataggagccagcttcttgttgctttgctttgcctgtcacttgacaaatttgagtcatctccatacttgagatactttacctcaggtgtagaagtatgtctgacttaggagtcagttctctagatgactggtcaagtcagtggtatggatttctgactgatgtaggacaaggaagtcacaacctggagctttacacatgaatcacttgctctttgaattgtgatgcttgttgtctcagtcctgatcacggcctaaccattcaggagctatgcattcctaccctaatgcagctctggttcaggattcagagttcactaacaggtgacaggagtactgacatgagtcatcctgccattcagagcagtaggtgtgcctaagatagtccaggaacctctgcttccttgtagtttgtctttagaagtgtggcatctgctctgcaagttcttcgttggagttgttgagtgactggaaaacttcaggcaagagaagtaagaatcagagaaaattattaatttgtttcttatcagacttatgcaacggtttttgataaaagctagatttttttttcttggagtggcaaattctatttgcttcagagcaccatgccttctgatgacatactcttccaagactatggaagatgggaaaatgggaaattcattattccaagaagcttatgggtttaaggcatggttacatagtgaattatgttcctttaaaggacaggaaaagcctcaccctaccaaagcctgctgcagatctctgaacactttcggggtgtgtgtgtgttgggggtggggggcctttgagaaattttttgccattttctgtatgatgtaagttatatcacaaatagaacaaatagcctacatctcctgttacatcttcagcaatatcagatttggttaaaatttgccaagtttttaaaaaagtttaggaaccaaaacataggaggtggctagcatgtctttaggatcatctctgagtcccactccatattccacatgtaactaattttgtgacatagctagttcaggttatgcagcatgtctaagccagccttactagcctttaaacgagaagacaataccatactcctatagtgtcccgcagtttacttaggcagtgcatgagactgctgtggttcttggtggtagataaaccttcaggaagctttagagttttcaggaaaaaacatttttttttttctgttttaaatgacttaaaaatgtcaagtgaatttttaatcattttgatgcacagtacatattcagattcttcaggatatgccagttgtttctgtctgcatctctggtggatttgttaaagtatgaaaatctcaactaatctgaattgcctgggattatttgtgttaacatttggactggtaatcctctctgatttaaaatttggaatcaatccaaaaacaaataattatgtctggtctaatgccaccactccaccccacaacctacccccccccaagccatttctcacaacacagtagtattccctatgctttcttaggtttgttttggcaaatatctgcaaagtaggaatgtaggagctgagaataattctaatcatgttacacaatcaaagaaaatgggacactgccttatcttttatgtttaatcttattgaggccttcgacgtgaagaatgcaaatttatcagagatctgctaactacagtagttctttggagttattagtgttctttgcagtttctggggatataataaatggtatatggcatttcttgttccttcttggggatagcaataatgaagacactgatgttatataagacagattccctgagaacccattctatgccactttaggtagtaggtggtttggaagcctgacaggtactgaagtaaagtcaaatctctattctatagtctcagtctaacttcacagagaataaggacaagcatgcaagcaagcagaagcaaatatgttggccatttcattaggaaatttcttttgcctatgagatatttggaaatgttccaatcttaacatggcttagcctacctttaaaaaatattgcttgctttgtaaagagcagaaagcaaagtatctttcctaaatttggttatagttgaaagtgtacagaagaatcaaaatcacaaaacacaaacctcactgaagttgtttcaacagagtattgaaataagtttatggaaagtatgaatagcagatgatagagaagacattgcatatactacagtcctccaacttgtattgaggctatgaggtaaagcttgatctgtgctcagagcacttttaagaaataagtatttctccagtaccgagtagctttctgatgtgcggaggacccagcctgccagccattaggttgctaaggacagctccatacatctgccttgcttgggagggagctttaaagcagtgaagacttcacatttcctgaaggctgttagtgaggcaggaactccctcttcctgaactcatgagaggatgggtctctggctcagaagttgtttgagtcaactgaaggctatagagatagggaagaagctattgctacaaagactagagaaaggaccactttgcagtcaaaacaaaactcaaagcagtaaggctttgttatactgagaatttatttacatttcatttaattctgacagagaagtacaccaacttcagcatttcaaagacttaaaaagtgacacagttgaccttctcactgtgccagctacccactaggaaactgttcctgtggatccttccaaagatagttgattcaagtacaagtgaatgtagatctctcttattcgaaactttggtctggctatatttcagaattggggcttcttctgtaagatcaatttcagaacgatgataaatgcatctaccattttgtgcaaatcctgataggaggtatatctaaccttttgacagtgacaagaccttgttaagtgtaagggctcacatttgagaactggatagttcctcaaaaaaacaacaccttcagctgcagcacctccaccacctcctcagagttttaagaaggcttactgtttggtgttaagccacattactgacctcagctaaatgtaagctcaccggccacaggttgaacatacctgcatgtaatcaaacattaataagcataggtactacgataattggcacgagtaaagatacattctcttgccagttcttgtcagattttgctaccatagagggcacacttattttaagaaacatttcacctttattttcatggattttggtctttcccaaaggggaccatactgaatacccactgtccctcttccctttgtacctaagtgttgtagaattgctgttctttgcagattttttcccctaatagagcttcatttcatatcactgtgtaagtaacattttaggtagctttgtgatattccactgttctctctttggcctcctataataaaatgccttacatagggtagattaaacaacagaagtacgtttctcacaatgaccggttggtttcctaggttagggccctctttttttctccctatattctcacatgaacagagagtgcttcagtcttttccttttctagggacattatttcaccctatgagctcatctaacattagtacttcccaatggttgcatctccgaacactgtcattgtggaggttatgactttgcatttgggggcaggcacaaacatcaagtgcttaatttcatcatggtggtgtgccatttgcccaggtgtgttggcacatgctttaattccaatgctctgagtttgaagtcagcctagtctacacagtgaattctagggctacatcttgagaccctgtctttaaaaaaggaaggagagcttttaaaggtacttgctctttttgatatatagttaggttacttctgaccaagtagattatcttgtgcacacaccacttgatattatgcaaaaggagggtatcttataggataaacttgtagaggtaaaactaatggctcagagtgtttatgcacatgtagttttgatacttgtaactaaaatccaatttccattggtcctgcattgggtaagaattaactacttttttttcttcattgcccttaggagttagattaagagtcatggaagggctatttgtattttctttcttaggaactgactttatccttgatttggtgttcattttcttagatttgtaaaatttatttatttatttccatatggaaagagctgtagagacatcagttgtgagcaagaatgcccatgtgagtgctgggaaccagaagggcctcttggagagcagtaagtgctcttagttaactgctaagctatctccagctctagtttttttctattttttgtttaaaaatttctgctgttttcctttttctttctttttaaactttttttaatgttttattaattctttgtgaatttcacagtcccactcatcctgtcccttcatatctaccctgcaacctccccccaaaagaaaacaaaaaataaaaataaaacagcaaaaaaacaaaacaaaacctttttgctgtggaagctgccatataacactgtgtgtcacacagtgtgccccttctgtccacacatcttcatttgcatatgtccattgcagtgagtctttggtctggtttgaggcccctgtcttctagtactctattaatactggatccttgctgggactcctctcagatatcctgttgttgtcctgggtcatggagatcctgcagctttggatctgcaggactgaccccttactcacttcagcagttcagagatggggtagatattagaatgggtcaactcagagccctggatctgggcctacatggaaactgaattggtcagccctccagcactcctctgagtcactatggctagcttccctgctttgcccaggctctccctctctcatgacctagggggctcatcttacctgactgcatttctttgtttgttgaccatcccaccagttcctggcccttagagttgctgggcatggtagcaaacactttgaatttcagcatttgggaagcagaggcagacatgtctctgtgagttgaaggccaacctggtctacaaagtcaggacagccaatacagcctgggcttgttacatagagaaactacatcttgacacccactcaccaccccaaagaccctgaagtaatttactactgatgttgagtaagctagaaaaaaatgagaactcaaggaaaatgggattctagagtattctgatgatgtaaatagttaatactgacgcaggcttaccatgtttccaagtactattctagtgtttttacattgcttaagcatcccatgatgacctcaggcatgctaactgattttgcagatgaggaaacatttatagattactgggaagttgttggtgatgctgatgaacagtttatttaaacaagaagctaaattcaagttgattaaatggtggagttttgttgctgttttgctttttggtgtgtgggtgtagacaacctttaaaaaaatgaaaatgtggagtccaaaatgtaagtgaaaatggcaatgtttatggaagaacatatttgattgtcataggattggtgctttccataggataggcaaatcagtttgtgcttttccaaggaatcttggtgtttggaaggtgaatatttctgactctgatctctgtggcatttatttttttcagagaagtagggcattcaggcaagcagaagagaatggaagtgtagggagtttgaagcactggttcatttaaagtttgaaattttgaatttaaatctataaagtttgaaattttgaatttaaatctatcagtctggtttgtgacctcctctaacccccaatatcacattatttaactgattataaagaaatacaagtaaggcattaagatttattcagggtcaggcttttgccatgtttaacacagttcttatgggaatcaaaatcagtagaagaaatggctcagtggttaaaaacacttgctgctcttgcagaggacccagattatattaacaggactcacaagtggctcacacatgtctttaacttcaattctagaagacccgacttgaagtatgcgcatggtacacctacatgtagacaaaacattgatacagataataagtaaatctaattaatactaatttattaattaatattttgtgactggatttgtactatatgactccggctggcctggaaccatcctcttgcttgtgcctccttcctgggcactatgtttaaaggctagcaccaccacactcagctaaataaatcttttaaataaaacagtaggaagtgcagacagatgggtagatacataagacttccaagaatttcatagtgtaagggctggcaggtttgcagtctttgtcataagtaggtaggagaagaaaaaccagtgtttttcaaccttcctaatgctgtgaccctttaatacaattcctcatgttgtggtgacctcaaatcataacattattttcattgttactttataacaaattttgctactgttgttaattgtaaagtaaatatctgtgttttcagatggtcttgggtgacccctgtggaagagtagtttaatcctctaaaggggtcataacccacaggttgagaatctctgttttgtgtactcttgaggcagaatttcattttcaaacagttggaagcctgcccacattatcaggaataatttcttgtgcttaaactcttctgacaatagatattaacatttataaagtatttccttaatagctcctagatttgtgttcagttgaatatcttggtataacaacatagcaaggataaccccaaattgattatcataccagcttagtacaagagaagaaacaaggaaataggcttttttaaaaagatgtgctgagagtagtaacagaaaatcatggactctgacatggatgaggaggttaagtcaacatgtgcatagcagaagtcatagtgtagagatgctgaaattgtcagttagtacttgggatgggggtgatttcactagtgcagtggttctcaacatgtgggtctccacccctttgggggttgcatatcaaatatttacttacgactcctaactgtagcaaaattatagttatgaagtagcagtgaaataattttatggttgggggtcaccacaaaatgaaaaactgtgttaaagggcttaattaaagaacagcattaggaaggttgagagtcattgcactaggataccagttactggtattaataatgcccaggatgatcctagatgttgggtactgagatgggaaagagatataaatttgtggaatcaggaagatactaaattaaagagagtgggccttggagtataactcagtgctagaagcttacctagcaagtacaaagccctgaattgtgatatgtgtgtgtatatgtagaagggttagcctggatatgtgcagtcagcaagccatgatgggaataaagatgtatactattgttggtgtaaatattatttggaggtttctacccaaccttagatcattagttcacaaataaaagacacaaaattttatatttatactaagccttaaagcttagagttggactgatatcatcgaccctctatgctattttatgtatttcctgtcaataacttcaagataatacttgccatgttccacctaagcactcctactcttaacaggctggccctaatgaccatgcactcatgatctgcctaccccatggtggcttttccttcttcctcctctctctttgtggtctctgcctgagaccccaagctcggtgtcttacttagggtttccattaccatgaagagaccatgaccaaggcaactttttttgtttgtttgtttgtttttgttttttggggggttttttgtttgtttgttttttgttgttgttgttttttttttttttttttttggagacagggtttctctttgtaaccctggctgtcctggaactcactctgtagaacaggctggcctcgaactcagaaattcgtctgcctctgcctcccgagtgctgggattaaaggcgtgcgccaccacgcctggcccgcaactttttttaaattggttattttatttatttacgtttcaaatgttgtctcccttccccatcccccctccatgaatccctcttctcctcacatcctccccttcgcctctaagagggtcctcctcaacccatccatgcagtcctacctcacccctctagcatccctcttctctggctccttccactgaggccagacaaggcagtcctctgtaacatatatagcagggtccatggaccagcccatgtatgctcattgattgatagcttagtttctggaatctctgaggggtccagttaattgatattgttcttcttcctatgagtttgcaatccccttcagctcctattgtcctttccctaactcttctataggagtccccaagctcagtccaatggttgactgtaagtatctgcatctgtctcaggtgggttctggtagaacctctcaggacagccatgccaggcttatgtctctaagcacaacttggcatcagcaatagtgttgaggtttggtgcctatgcatgggatggatcccaagttggggcagtctctagctggcctttccttcagtctctgcttcattattgtccttgcatttcctttgacaggaacaattctgggtcaaacattttgagatgggtgggtggccccatccctcaactggggccaaggcaactcttaatgtttaattggcgctggcttacaattttagaggttcagttcattagcagcagcagcagcagcaagaagcatggcattatgcaggcagacatggtgctagagaaggagttgggtgttctgcattgattcgaaggcaaccacagagactggcatctgcaggcaactaggaggaagctctcttctgtactgggtggagcctgagcgtaggagacctccaaagcccacccccacagtgacatacttcctccaacaagtgctgcttcttgtgggccaagcgtattcaaatcaccacagctagaaattttgctccttcccttctctcctgcccagcccaggctataggcatctttattaaccattcagggagaacttggagggcaaggtttacacaacaaaagctggtatacataaagatctcatcttggcgcatccagatcttgggatacagtgtttagcatttgaatatatagtagcaccagaccaactcactatatacatgtttcatgagcaatttgcttaacattatagagcttagtacaatacttagtactatatgccatatatgaaggcagggaaataccatagatgtagtatgtaagtgcgcttgttacaaattaggaattttgggcaagggataaagaaacaggtaaaataaaggatttatagagcacctttacagtgtgaattcaagaagtaaactagaactggtgaagcaggcatgtgagatgtgatggatcagttcttatgatgggagacagtggtattagttctagtgctatgggactctccagcagtggattttgttgttgttgttgttattgctgttgtttattttttgttttcagaggggagatagggtctcactatataaccctcttgtttgtcctaaccttgttagagactgagatgttttagagctaggccctggcttctagaaaaactgctttactttatgttttctttactcttggagtctgacctaacacaagtgttctgttttcgttgattttctcagcaatctttgataaaacctttggaaaatggaagttgtttcttggttaccttactttgtggcctcttctctcagaaataagatggtgtatgtatctggtttaagagcagtgtttctttgttgcacttgtccatacattctgatactactgattggttgactgcttgctttccttccagttttggtcccttattaactgaacctcttaaatgactcccaacttcttttttttgttgttgtttttgttgttttttggttttttcgagacagggtttctctgtgtaggcctggctgtcctggaactcactctgtagaccaggctggcctcgaactcagaaatccgcctgcctctgcctcccaaatgctgggattaaaggcatctgccaccacgcctggctgactcccaacttctttagaatatttatttatataaacaagttgaaagaatcttacagggaacaccagttaacatttcatctccctcctaagtgactttaaaatttttaattttctttgtgaagtgatcttactgcaaagcttaaataaaataaaaagagagagaaaaaacattcttttccttaagtgcttaccaaaattcactagtgaaatcaccggggccttgtactttctgctaaagaaggtactaactgccggtacactttctttaatagacatagctctattaaggtgactggttctttttcttttgtgtatatgcttctgtttaggctatatttgtgaaaagaactttgatgggttctttacagaattgattcattttatcctaagttaactaggtcagagattcacagtaattcatagcattcctttgtcattcttttacaaaagggtgtggggggtcagttcttacctagtaatccaggctgccttgcaacccacaccttagcccattctggcctcaaactcattattctcctacttagcatcctgaatactgggtcatcctgagtaaatgcgccatcactgccccgctcccagcattctttttaaatcttgagacagactcttcctaagtgaaccatctggctttgaactcaccgtgtagctcttacaggccttgaagttgtggttctcctgcctcagcctccttagtggctgcaattataggcctacaactcaaggcccaactgttgcttcttcctcccaaactactactttctatttgttccttgccctagagaggtatctattttactttatattttcagataagcttttgggttttgttggtttcatgtatttccctggttttcttgtggtacttgctttaggtggtattattaatttttatgtctagtattccatgtttggtcaatgggaatttctaaaggtagcttctgtgttgacgtggtgcagagatatgactgttcactgagtgcttccttacttgctggcagagtgtttcacttgtatttaccttgtcctaacctgaactctaacctaactctctttctttagaaagttgttttcagacttatttttatttttttaattttgtaatatatttatgtacagaaagcttagtgtacatttaacccaatttagtggcaagttctttatcctttgccttttccagcttggtaatgcaagccacagacttaggacccaggacattgcctcctcagtggtaacagatctcctcatagctgtcactataattggtcctaatagcttccaccagcttagccagagcacccttgtcttcccagttaacctgtgtgaaggcaacagtggtgcgtgtcttcctgtggaccaggcacctcagcctggcctttccttgatgatgcagtaggacacccccatctttcgacacagtgcaggcaggaaaaccaccagctcaatggggtctacgtcatgggcaatcaccaccagctgagccttcttgttctccacaagaactgtattgactgtggtgactgtattgactcctgcttggaggacaggtggtctcttagttgggatgtcgcctttgccagcagctttcttctcagtatgggtcagtagcctttgcttctcgtcttgctttgtctctggcctgtacttgagggcaagcttaagcagctgagtagctgttgcctgtccggggcctgggtgaactggttaatggcagggggtgctttgagctgcttatagaggatggctctttgccactgcagcctgatgtagcgggccatttgacgaagtgtgttagatctcttttgggctggatgtcctgcccaatgccagagttcttgggacttttctcaaataaaagatagaacaacttcttggcctcctgtttcttgaggacagcgggggaccagggacaccttcttccccttggccttctttcctttgggcatcttgctcggctcggctggtggagagagccagacttatttttacatattgtctttttttttttttttcttttcttttctttaaactttgaactggtttgcttattgggatttgggcaatttatggaagagtgactgagaccattcctcatttcaaaaacagtattttcctgcttggtttaagtaagttagtgatttgtagttgagtgcttatctcatgttagatgaagaaacagttgaatgcctttttaaaaagtttaataattcactttgtaatattctgggttagcttgtttggtgttttggcatctctataatttgccacttttaaaagcaattgaatttttaatttaaaaaagcacaagtacacaaaatatttcacaagtagttgtttatatattctttctgacagtttttttgtgccaatactcttgtttcttgccaccttaattttatagaaggggaaattaaggcaggatgagatcagtaacaagactaatttgatgcatcatgaggtgtaactggacatttggctactttattgggttctttctcctgcttccctacactaccccatcccttctaaccccctaacaccaggtcgagaagaaaggttagagaggaaaggaggtgtcaatatcattagactgcttcctgctgattaggggtgtccttgggagaaagtccagtctttgtcaatctgcaatcagcaatctagcaagcaggggcagggacagcaggatgagcagcagcctctggggctgctctcaggactctggcatttttatgccctcttaagagtccccagaattccaaaatcacacacctgccagagcatgagacaaatcatagttagctgctgtggacaagctgaagaagccctatcatatcctacatctgggattaaaacaaaaacatattcatataacatttctgtgtttttaaagaaaccaaaattctcactgcagtgaggcctgtgactctgcatcctgttcttccttctcctcctgttgattccagtataataggtattactcctgttaccatagtgccctgttttgatattacaagagccatttaaattttgaggtccttaattggaagtatctagagcctcttgtatattcctttgaaatggtgttctttgctgcagttctctggccaagaaatagatattttcatgattaatgccatttctttgaaaattgaggccttaaaaagtatattaaatctagttagagcataaattttaaagtattctgcatagtataggttaaataagactgaaacactaacaacagtgtctgtggctggtatttttgtatatagttactgctagaattggagaatttttattttaatagagaaaaacatgttttatatggtattacattttgggtcagaatttaaaattctgattttgttgatatggtgctcttaaatcttctttcctggcttattcctgccctatccctaccctcctaaagttcctaggaccatatggtcactcgcttatgatacactgcttttgaaaagatgaaaggaaggaaggaaggaaggaaggaagggagggagggagggaggggagagagagagagagagagagagagagagagagagagagaagattttgctgtttgttttgttgttgttttaagatcttgtctcacaatgtagtcctagttggcctggaattcacattgtggaccagactggccttcaactcagacacccacctgcctctgcctcttgaatattggaattaaaggcatgccccatcatgtctgacaacagcaagggttttgaaaactgctgcattatatgaaaccagctgtgatggctattcctggttgtcagcttgactacatctggaatgaactacaatccagaaatggaggacatacctgtgatccagatcttgaggcatagtggccatgaaagtttaggtctaggtaaggtagtacacatctttaatcagtcttgcttttctggtatgttggggtaaccagggctcgctgtggtgggagaactaggttgcgatgatgccaagtagccttggtttctgttgcttatgttcttgcccttgtctcttgccatctggttatctgtggtgttagctggtcttgctgtttctgactatggcttgtccctcctacaagcctgtgtgtctgaactcctggaagaccagttctctcctggaggaatttggatatgaagagctatggcatagggtcagctctggggtgcagatggaaaccagaaggatcctgaccctggctgtgccttagtttttgtgtcctgatggctctgggcaggtccctcttgggccaggaatttgagcagaagtggtggtcttacacaggcgtgtctgcactcctgagagaccagctctctcccagcagcgatatttgggtatagagcactgagctaaataaatccttaatcatgtagatcccaggcatttgccatttgtctcatagttggaagttttgtcctttgcacatgtagattagttttcagccaaaatcttaggcaggttactactacagtactttggtgctctttctctagtctttacaccaacctacagataccagctacctttatcttcctctgtcttgttagctcagagaagctaccatgttttgtttagtgtggcctttttttacagtgttctggaaagagtgcctgtctttgtggcaggttagttacagagagcttatttaatttgtttttccttttccagggtttgctggatagttttgtgtcaacataacacaagttagagtcattttgaaagaagaaacttctttgaggaaaatatccctactagattggcctattggcaagcctgctgttcatttttttttattaataattgatgtgatgataactgaggatggtgtcatgctgggctgatggtctgggtgctgtaagaaagcaggaggccaggtgtggtggtgcacatgccacctctgatgggaaggtctctgagtttgaagccaacctagtctacatagtgagtaccaggacagcctgggctgtcagagagaccttcacacacaaacacacaaacacacactttcaaaagagtaaatgagtttgatagtagccagtttgtgagtggcggggaggagtgcttcctcatcagtcagttttgttgtgaggtcaggaaggacgagcatgcggagaaggagaacacctacaccagctatttggacaagttttttagcaggaaggaggattccgaaatgctagaaactgagccagtggaggaagggaagcgtggggagagaggccgtgaggcagggcttctgagcggcggtggggagttcctcctgagcaagcagctggagtccataggcaccccgcagttccacagcccagtggggtccccactcaagtccatccaggccaccttgacaccttccgctatgaaatcttcccctcaaatccctcacaagacatacagcagcattctgaaacatctgaactaaacctcagcagacatttctctttgttcttcatgaacacaagttagagtcattttgaaagaagaaacttctttgaggaaaatatccctactagattggcctattggcaagcctgctgttcatttttttttattaataattgatgtgatgataactgaggatggtgtcatgctgggctgatggtctgggtgctgtaagaaagcaggaggccaggtgtggtggtgcacatgccacctctgatgggaaggtctctgagtttgaagccaacctagtctacatagtgagtaccaggacagcctgggctgtcagagagaccttcacacacaaacacacaaacacacactttcaaaagagtaaatgagtttgatagtagccattgtggggcctctgttttactactgttgtgaagaaaaggaaagaaatgagaaatttgaagaaaggagaaaattgagtgctacagagaatggaaagtaattttaacagaaaaagaatagtattgtgaactcatgaagattggtcatgaagtaacagttgtattcattctgccctcctatgctagtgtctatttgaacttgatgtagacaggaaagtaactggatttatttagagttggtgtttttgcaaatctggaatttaaggagatcagaatattgataagaatttctttaaataagatgaaatatgaaatttaagttgacaaaggatataataaaagaagataggtggggggggtgtagtgattcaagatactgaaggctctctatggtcagataacgttcatattagtgatctatttacaaggaaaagagattgtaattgtccagtgtggtggtttgaataggtttggcccccagagattaatgtgtttcagtgcttgagcatagggagaaacactattaggaggtatggccttgttggaggaagtgtgtcactgtgtaggtgtgctttgaggtcttctgtgcttaggctctatccaacatggaagagatctcctcctgtctgcctgtggaaagttccccttctgctgtctggagatcaagatgtagaactcttggctcctggagtacctagtctgccttcatactaacatgctttctgctatgctgatatggaccaaactcctgaaactgtaagcctgccccaatttaatgctttcctttctaagagttgccttggtcatgtcccttcacagaaataaaatcccaagatgttggtaccagggactgggtattgctgtgatagggctgacatgtttttgcttggaggaatgtggatttggggattttggatttggaaagcagtgtaatgctttaagtggggcttaatgggccatccttgtaggaacatggaacacagagtgattcctgggggagggggttggttcaagaggtttcagaaaagaatttttgtgatattttggtgaagaagtggcttcttttgaccttgtctgaagagtgtctgaggctatcatgaagagatttagattaattgtattgacaaagaaaatctcagaacagcctagcatacactctcttctgtgattcactcttataaaaaaggttttgatcaagcacggcaagtttagaaaggaaaaatacaaactgtatggctcaagtattaaaggggcactaggaagtaaaatggagctaaatcctgtgttcaaggacactaaatggaattaagggagtgataaccttggggtaggatcccacctagctaagattattgtttacacatttcaggtgttattatgacttgattattgttttcatttggacataaggagatatgattgtgcatcacattgacaagggagggattatggtagctagtctcttatccacttgactatgtttggaatgaactacatataatgcagaatttataaagatcttgtgaaagggagttaaagaaaagtttaggttcagcaattgtagtaaatacctttaatcccagcactcaggagacagagacacagagatctctaagttctctaccttgaactaatcaagttctagggccaagcttaggcagtaaaggaaacaattgaaaacagaaaactggtgaagatggaatagaacaggggagggggcatgatccagccccataaagcagccgaacttggcactttcagccatgtggctctctggctttagagacaagaatagaaggtactactgggaaaattaatgctgattagctagagctaagaaattagcagtgattaagaagagaccagcatcactgaggtgacatcttctgggaagtgttttctgaaagcacaaagaggctgtgttccagagataaccaaggttgtaccttgtgctggcagctggatttggtaatgtgtaagagtcatgtgggtggtactggttttgaaatcatgctataccttcacagcaataaaaccctgtgtaagacatcaaggagtgcttgactatttctagaggtgaatcaattcagatgagccatagtcacagatggtgaatagacaggtgggaagatgattgttgatgaccacgtcgactgaactgaaagatttcagtttgggagggtttagtcttacatgtggctatcactcaccttgatagcagggtttataagttaaaggggaaagttttagttaggtgagtgaaaggagttggagacaagacagtgagtggtgtaatgcataaatgcatgtgggaatgtaagcaataggtctgccagttttaaaccgagggtatttgatttgagcttgcagtagtctggaatccttggttgattaatatttctggggtgcttaaactgtctctttagccaaactgcacttagggaatgagaattaaatagttgttaaaaaaaaacaatgtatctgaataaatatttgactctaactatgggttacttgtatgatcacagaggcaattttgattggacatattttgggttttgttttgagacagattccagctgtttatctcagtctgtgtaatataagctggccttgaattcagaattctccttcttctgcctcccaaattctgggattatgggtatatgccatcatgggtcagattattagttggtcatcttggaaaaatcttgtatgaaaatatggtacatgaagcttaaaaagattagggtaacagatttgttttttccataatatttaaaagctatacaaattttgtgagttacttttgagtttacagttttagtactatttatagtactaaataactcactgttattcccagagagctactcctgcttaaaattattgccatctgctgttgtttccaagtggttattactttttcatcatgtattaaccaaatcaggacaacgtgcgttggtagacagatagactaacccatataggttagtagagcacattaaaactcaggctttgctctacacaaggccagttagtttggttttctttgagatgaggtcttgttatgctttacaggttaacttctagctttctgcctcagctccccaagtagctgggattacaggtgaggcagtgaaacaggcctctagttgatttttgacagaactacgtacaagttacttgagtcaggatggcctgttcagcagatagtgctggcatagtagtttggatattggtaggctacaatatgagctgttactaaagctcctactctctctctatttttccataatagatttcagatctatatatacatcttaacctataaaatatctcttccctctttgttctcacagtttaacccctagtccccagcaagagctagtctgcttttctgtaggtttataatttttttctgtttaagactagatttaaaaaaaaaagctttacaactatctaaaatcatgatatgaatgcaccaaagttgcctcagggatataactattttcaaaacattttacttcctttagattttacttgttcaaaataaagccctttaatacaacaaaaccaaaccaaatcaaacaataaacctcagctaagacttcaagtaaacaaaattctcagggaaataagctaaaggaaggcacagagtttcccagatacttaaactggcttttatctaggacggcatttaaaaagggattttgtttgtttttttgtttttaagatttattttgtatgtatggattatgtacttaacatctgtgcaccaccttcatgcatttgccaaggaatccagcaagggcattggatgtcctggaacttaagttgagatgattgtgagcctccatgtgggtgctgggagttgaacccaggtcctctggaaaagcagccagtgctcttaactgctgagtcatctcttcagcctcaagcagcatttgaggaactggaatatatgagtgttgtatctttctccagtgatgagtttttgacaagtttccccttatttgtaactattttaattgtaaaatacacactaaatgtatcagtaacatacatacaatattgtatgcctattaccaaccactaaacagttccaaaatatttcctgacctcaaaaagatatcctgcatctgtgaagtagtcattctgtctctcctaccctagccccaactgctgccgagctagtttttctctctgtaggtctgcctatctagattattttatatactggaaccttacaatatgtattacttaacgtaatgttctcagaatttatctgttctgtatcatgtgccatacttcatctccaaatgatactccattgtatgaatgtaccatagttaatttatttatcatgaacttgagttattgatagcatttggatattgtgaatagtgctgctgtgagcatgcatttttatttgggtatcatttttttctagttctttagagtgtagatctaacactataaagtgttttaacttattgaggttctcacctgtcataaaatgtttcattatctgttcctgctagtcacatacaaggattggtttttcacatcttagccaatgcttattatctatcttttatattatagccaccctaatggaatacaaagttgtgtcctctatgcagtgtttattataaaattataataattatatcatgtcttcctttcctttcttccctccaactgctcccttgtacacctctcttaatttatagccttaaaaaaaatctccctccatccctccctccctcccttctttccttcctccttcccactctccttccctctctccctctctctgtgtgcattttgaaatatataaatacaacctgctgcgtttctgtactgtcacttagtaaagttgaaggtgtgcttatttatgccatcaaccagcagttaaatcccagacttcctagaaaatggggcaaatgctttaggaaagtttaggaaagttgtgagcagatgtggaataccattccacagggaaatgataaactagctatacatacacactagtcatggtaagtgtgggttctgtttgtggtcaccatttcactgcccttccagccacacactgaagttcctattttttaaactgaaaattttctatttttaaattcttgttcatttaatgaatacatccaccacaaacgtattgattccttacagtagtgaccaaatcttttctttatttccattgacttgatcaagttttccaggctctgaagtgcaggaaaagtccattctagacttttttgaaatgtttgcacacagtaaaatcagctgttcatcttttagcagacatcagttgcaggctttgctctgtattcctttccttctacagtccactccctttactcccgtcccctccctttccccttctggacaatgaatctaagaaggaaaaatacctaattatgttttcagactaaattcttagttaagatttctgtaacattgcatttgtattttttctgccttcttaggcttgtatatcataacctaatctctatgttccttggaatcagtcatccatttacccttcatgggaaaaatacaaatgaaaacatatttatttccttattatccctctaggttttggagtaccgcgtctgaaatcattatattttagaactaaaaccagtcatatcagtgattcataatctaaaaacattaatttgtacatgagaaaaatataccttctaattgggagtaaaccccactttattgtacaattttaagtgatttgtaacttctaacagttgcagacgccagaagtaattggattgatttgggtactctcaagaggttgttttcattccttttactttttttttttttttaacttaggagttttatgttttatatatctcccaaggaccttgactttttaggtttgcctcagccctataggtgagctggatgagagcccagcagggtcgcaatgttctcttccccaatcccagttgttgttgttgttgttgttgttgttgttgttgttgttgttgttgttcttcttcttcttcttcttcttcttcttcttcttcttcttcttcttgttttgtttgtttttgtttttgttttttcttcatagaaactcaggctgttggtctagccacccgttctgttttctgtctgttctccttcaggccttcataatgttctgcaatgtttgtttatattcaggttatatagtttaaaacaaaacaccttgtgtgtttgtttccatctttgctttcatataatatctgactttgatttaaatttgtgactatcctgtcattcatttttcttgacagcttcttgattctctgcttttatagattataatacgctgttcccagtaaagttttcctttaaagttactattaaacttactactatccactagatggctcatgtacaccgctttggtggcacaaattgatgtttgacagccattgtttatcatatcaaaagtaaagacagtgcattatatactttgaagattttatattttacttttgacatctgatttggagtagatgtggtgtatttctgtagtcctagcacttaggaggtgaaattagaattgtgagtttgaagctagtctgaagtacatacatataaagtgttggaacaaggtaagtttgtcttttttaggtggtgagacaggatcttgatattgtagctcagactggtctgtaattctttatgttgaccatgctggccttgaacttgtggtctttccgcctctacctctacagtacaggacttgggctgcatcccttggctgtgtctgtctttataaaagtctcctgatttatttttgagtccttttgataaactatgtaaaataggaaatatagttattacctagttttcttaaggaaacatgtaaaataatagtaacagatttttaaaaaatgattatttgggaatctcatattatacatcctgatagcactcacctcccagtcctcccatgtccccattaggacctcctacccacccactcccccccaaaaatgaaaaaaaaaaaaaacaagtctattttgtgtagttcatatactcaactggagcatggtcaaatccttagtggccagccagtcccccagtggaggatggggagtctttctctgcctgcatctataccagaacaactgtggagagctatgtctctgtgaggctgccagggagaagcagggccaggtctcctgtactgaatctccatggattcaggcagcagcccagatcacatacaaacaccatggactttgtggtaacatgagccacaaagatcaataacaggccctggccatatccggaccactgacccacttatgttagcatggccccctgaggcaatagcctgagggtatcaccaaggtgtcagtcagccagcagcacagactgcatagaccaacatgacctctggttgcatagtggtccttcaaggagtccagtccagaaagtgaactgttcttcctctcaggcctccattgcccagagccaagatgatcccatggtggctggttcaggggctgagtcttcctctgcataagctccaagctattgtacactcactttcccaccaatcctactgggcaatgatagcatgtcaacctcagccctctcccctcacctgtcatcaccatcatgcctccagttctgcctccataatgccgcccctctccatcacatacttgtcaccatcacgcctccagttctgcctccataatgccgcccctctccatcacatacttgctcaccatagtagtccttgtcaccttcctgccatgaggcagcgagcaggccagggtcataaacagttttaaatgttacaaaagaagcagttgatttctctacttgtatataatcatttttctagcttggcagtctttgattctttttgctgttaagttacaatacagtctaaataattttaggagttctagctattcatacaaaagtaaccatttctggctaaaccactgatgtgcttaagatgtcatcattgataaaactgtgctggctttcctggaggcaccagggacctcagacagactcctaacataactgccatctgagaggcttcaccatgcaactggtggaaacacatgtgggcagacccacagccaagcattaggaggtgcatgggggaatccagggaatcttatggaagagggggagaaaggattaaaggagccagaaaagttgaaggaccacaccaggcccatggcccataggcccatggcctaacaaagagcatgcataggatggacctaggccctcagtatatatgtagcagtttgtgcagcttagtcttcatatgggattcctaacagcaggagcaggggctgtctctgactacattgcctacctttggctcctttcccccaactaggttgccttatctagccatagtagaagatacccctagttctactgtgacttgatatgtcaaggtgggttgatatccatgggagcttccccttttatgcggagagaggaaagactggaggataaaggagatgggagagggagacaggggaggggaggggaggggaggggaggggagaggagaggagaggaagatgcaattggaatgtaaaacaagatgtcatcctcccataattataagtgtttggctgtgagtttctgcatctgtttccatagttgctggttttgaagtctttgagatgacttacatccctcatgccaccttataaattatcttacatgttgaccatattctgatatattttatattttttatgaattaccaagtattgtcaatattattgtcatatttataccacgttgctttgtatgaaaatttccagacttttttttttttcctttgtttttgtttttcgagacagagtttctctgtgtaacagctctggctatcctggaactaactttatagagcaggctggtcttgaactcatagaaatcccgagttctgccttctgagcactgggattaaaggcttgtactaccatgcctggccctgactttgataattgttgatagccaaggtaatagtaaagagattcatattttgtcttttggaatcctgggactaaaggtgtgtgcctccatgcccggccttcaacttaaaaatatttgattgactgattggaagatgttggcccaagagctatctgaggtatgactgacaaaggaaaatttagtattgattagaatttcagttacctacatatattcttaaaattaagaccatattagtaactaataatgtcaccaacggtcagggtcttgtgtttccaggtttttggcctttttttttttttttttttcaagtaattgaaagaaagctcacacataactgcaaaaatactacagaactttatttaaaacaaagcaatagaaaaataccagaatacacagcaagggaactggcaggccaactgagtaaagatactcagggatccagactaattttcagggcttcctcttacagggttcaaaaggaggaggaccttagttacctggggtgtagtaaggtttgttctgttttgacgtatagatagattggctggcatactcattttttccactgctcttgtctcctcccatagtgtaactgattttactcatatgcacacccaattatgtagaaaacaaatggtgactactaagggattcttcctcaaagttcactggaggacacagttttgtcttactgcatgctcacccaaaagtagttcaggccaaaaaattccaggttactaagctgttctctatttttgcctgccttcgttatataaataactaataaatgaacttttgagatggctaactgagtaagttcatttgcctttaggctgatgacctgagttcagccctcaggacccacatagtagagagagagaatgaactcttacaagctgtctctggtctaaatcgtgtactgtggacacccatacacataagaagcaaataatgtaaaatgtaaatgtaatatatacaccaatttttcaagttaactattcaaaggatgtcactaaactttatcctttcatccttgaaagcattacattatgaaatatctctacaagtataattttataactaaccattactattatgaaaaatatttgcaagcactaataacttagttgcttcatttatattgaatgcctagatgtttatatattttatttttaagttgtgtgtgtgtgtagggtgtcttttcatgtgtgcctataggtaccattggagtccaggagtgaacagtaggtcccttggagctgagttatagacagctggagtactttaccaggtgtgggtactgggaacaagcctggtcttctgaaagagcagtacacactcttttaactactacctctctctctagtctcacatgtttatatttgacttttcttggttggcaaaacaaggctaaattaggggccagagtggtgagatggagagttaagagtatctactgttctttcagaggaccagagattggttcccagaacccatgtcaggtggcttacacaaccagggtctctgataccttcttctggcttctgcaagcacctgtactctggtatgcattacacacacacacacacacacacacacacacacacacacacacacaagcactcatacacacacacttgaaaataaatatttaaaaaatagatatgtagataaagtttgaatctccagaacaagttgggtgtggaggtgtgaagagtcaaggatgtttctggcttgcttgactatagaggtagtgatagcgatttctcagctggatgaacatggaagaagcagatttagtgggacttgaaggaaatggttattttttgcatgcaatttgaggtagttttgagacatctaagtaagttatctggtagacccttgaaagtatgtgtctgccgtagaaaaaacgctcaataataaatacttgaaactcccgagttttaggtggtgataacaagttctatgggtagatgaaattcccctgggaatatataacaagagatgagggaggaccaagacagccctgaaggaaattctgtttgaaggccagtgaagaacaagggctacaaaggagactgactggacaggaacagaaacggatgagaaaaatcaatggtatacagtattcttaggaacccaagcaaaagtatgctaggtaggagactgactggccttttttcttttttggtcatttctggaaacaaaattgggaaatatagtctgtaaaggtagtgtaaagctatcagatcctctcaaatatatttaaaaagagggtgaagtaaggtgtttgtgagctttcaggaattttatgaaaaaactcaggaaagattaaaaagtataccccactactaggccactgaatattaaggttcttgatgactctccaaaggtttcaggagagcaaagaagagattgcacaaagcttactacctccaataatacattactgtatgctattgttttatctatcacatatgccacttacaacatttaaaaatttttagtagcttattatattatgaaaaagtattagtcatgttctagctttttaaattggagtatactaatgatttaatttccttaaggttattattactggaactctaatactctcagggccttttgatttctcttaggatcatttgttcttgttcttgtgaacccagagtgctgtttaaggttgcattgtttatcgttatattaacttattggtatttgtattcagaggccttttttgttccctccctaaagcacttcactttgttagaacttaaaagattatagaggctctgtttggtatttgtaaggagggtatgtttccccagcaaggaagtaaagatctgtggatgctgttcaccaaaattctctaaagggtgccagtattcagtcattcatctttgacactgcctatttagattgagggccaacacttgcaagattgttcccactgcagatgccatttgcaaagcacagttgtagctctttaccctacttgcttgccaccttgacacaactaggatcgttttggaagaaggaatgtcaattgaacaaatgctgttgttagattggcccataggcaagtctgtctatcctccttctgcccctttctttcataatctactaattccaatttgtgttgttcatacgttcatgggtgtcaggctatccactggagaatgagtaacctactagtagccacccatcttgcccaaagtgtaataattctttagctccagtaattgtcaactgtcaaaagctactcagtgagggccaggggcaatgtgaatttcctcatccatgctataattttgcctggcatgatcttgtgtaggacttagcagctagcctcagcttctgtcttgacacatccaatagccatgtcatgtccagaagacaacatttcacaacactgttcctcatccattctctgcctcttatattctttctgcctcctcttctgggttccctggacctacagtggggtgagaagtcctgataaagctgtgccatttaagtatgagtccctatattaacggctgcccactacaaaaagaagtttctctgaccaaggttgaaacagcccccatgggttagcattttatatggaactccctgtacctatgggcagctagggccacttccactgctttgagttgtggaagtgcctgtatgcctaactctgagtgagatccactctgacacatttctttctttcctcagttttctttttaattcctactgggagcaggcacatttaattacagaaatgtatttgtcatggaatcattctcttcacacatagaactttttagaaattctaaatatagtcacactgttggcaagataaactggtggtaattatatgtggaattaactaatacaaaacattttctataaaatgcatctgagacatatatcatttgctattcttaatttgtggttttaagtgtctctggtggtgattgaatgtgatcagcattttatcataagccttaagaatcttattagtaaagtactcggcaaaagttattattagaaaatgtcaggaatttgagtctgtccccaggaatccttttattttatatgatccatttttggatatatgaagattcaatccaaattagtacaaaagtgcttttaaaagtaggaattctcagggttagtgtcgtcaaattttgatcccaaacagggtccttggattgtagaactgtcccaactgtccctagtttacagcacaactcctgcacctaaaggctcagcattcattcattgcaaagagggactgtaaagattgtaagagagcagaaagtttgctgtgagcttcgctgcctagaaatgtcagagaagctgcatccttgaagttccaacaatatggctgcctaaagaaggatgacaccagtagacataccagtgtagaagagggaaagcctcaactcttagacaaagaacaacagacaactaaggagaagtctttctcagggaagagctcaagtaacactttacagattaagcaggttatggttatacatttaggagtgtgcgtgtgtgtgtctgtgtctgtgtgtgtgtgtgtgttatacacatgcatataatttaggaaaaagacaccataaatttgattgagaacaagttggggtacatgagagagtttgggggtggagaggagtcaaataatgtaattatctcaaaaacatatgtgacaagtaagagggcaggggcaagctaatcaattcatctctttcttggagttgggcagagatccaaaaatttgggtatctcctaatgataatttggattattagcttgataggatttagaatcactatggaaacaaacctctgagtatgtctgtgagggatttttttagattagattgactgagatgggaagacccaccctaaatgtaggagtcacatagtaacattggccaggactgtggaaaaaggagaaagcaagctgagattggtcattgatcactccctgtcaaaatggattcaaattatgagccaaaataagcactcctttcctttaaaaaaaaaaaaatgtttgttcaggtattttgtcccaacagtatataaagtacctaaaacactcctctcatggttctttctggcagtaagttatctactgtcctggtgctggtagatatggcatataaaatgaagattataatacgttagaagttgtctggacgtcttaggtccatccaatttggctaacccacctgaagagtagcttctggcccacatggaacattctttaaccaaagatacagaaggtaggactttatgaggttatgtagtcagtataaaaatgaagcaaggtcagactgagagtgagaaggcagtcactgacagcatttgagtagcatcactagacctcaagtgctacctagtactataaaaggaaaataaagccagggaattccttcctataccaaaattcataccactggtatagaaatttatgggtataaagtgtgtgtgtgtgtgtgtgtgtgtgtgtgtgtgtgtgtgcgtgtgtttgtgtgtgtgcgcgtgcgtgtgtatatgtgtgtgtgtgtgtgtatcaaagtatttttgagtaccttggaaaatggcatcttagaaatcaggtcactcagttgaatgtgttgacaaaattggcattcttttaaacaactaatgttgagcagccttagaaccaccttcctaatagtttaagatacttgtattttgaatgcattgtaactttagaagcttagatatcagctagctgaagtgtggtggtaatatacctatattgtgttctgttgtttaaagtacatgtttttctggtattgtttaaaaattaacctctctactgaagacagccactttcttctaattaagagtctctcctgatttttgaagggaagtcccctcacagacccccattagtgccctattagctgcctctgtatgatgtactgtcccttctaatgctctttcacctcagggcccaactatctacctatccctgtttaaaaaacaaacaaaagcaattttaaaaaacctcattctgaaggggaatcagtctcaacctctcttacctgtcttaacttgaacttccacttgtctgttagaattaggaaacggggaagagaagaaaggaagaaaagaagatgatattgacatattgatactagagattgaatccatgcaaggtatagagatagtaaaaatgtcctcttcagataagttgagggcttaaactagctgccaaaagccaagccaccagtaaaacccagagtattattaatacagcacccagcctaggtgtatagaaccatgtctctctggcttctggagtcttgagccataagacttcagttgtccaagcttggagctatggaatcccgagtctgtcagcttagccataagcttgcagcactcatgcacacaggtctgccagcagcagaagggctactcatcaaccaccgtctgaggagagccaaagcggccagagctgattgtgagcttttgtgagctgtacagtagcttctctagttttcctcttccactcactgttcttctttcttctgcaggctaatgccagtgttttgcttgcaacctttcaggccttccatctgacctcaccatagattatgacatggccccaggctgcccatgatatttattgagttgattatttgcattagaaattgtcagttggaggcctgaagaggtggctcagcagttaagagcattggctgttattccacaggacccagattcaattccaagcaccctcatggcagctcacaactgtctataattgcagctctagaagatccaacaccttcacatagacacacatgccggaaaaacaccaattcacataaaataaaaataaatcatcttttaaaaaaagaaattcatttgggtgtcagtttcttgttatcattgctttaacaaactcccagcctctcccccagcaaaactcacactccagaaattctttgaattccactggattggtgatttgctgggttaatgaatggtagcttagaattgtcttgcatgcattctgtttatcttgtttgttttaaatggagtctctatgttacctaacttacttttaaattcctgggcttaaatagtcctcactatatcagcttccagagagccagtattataggtccaacctacacacccagtgcatgcattgtgaagtagaatacttcagagagatctgttcagtacttaaatgaggagttggggagccttgactttttatctgataggttatagaatgttggtcaagaccaacatggattgcttgatgccctaaacacattagaagagtattgtttgtgcactaatgtatgaaaccccctcctcctccttgatcagtgtgtgaaggcccattccccttcttgaccttaccgaggtttcctgtcctgcttctatcctttcggccattgtagtgtatcaggacctcaccattgggtgttaggagatttgtcacaataaaagaactttgtctgttaaataggtgcattatatgcttatagtttgctgcctggctttccattgtaagaaaataataataataataataaactctagaaaatgtttaatttgcttgcttttgttctttttatgcctatgtatgtgtggaatggaggtgtatgtggaggtcagaggtcagaaatcaaccctagatgttcctcagaagtcagacactgtattttttgactgtgttttgaatttggtgggatgtggggcttgctaataaggctaagtttgatggtcagtgatagatagccaaggatcctccagtgcttgcctcccacacactgagactgcacatggcgctccacttaaccaactttttatatgggtcctggaccttgaactcaggcccttgatactcatgttacaaggtctttactgactagcttatcaacccagcctctcttttattttttttaataagataattatgcatttacaccagtcacttaaagattagcgaaacagttcatcataataaaaatgtttttaaagaaccagtcagtatttatttacatgtaccatgtactgacctaagctctgtggtggttttgtttcttgtgatgcacacttcttaatgaggatgacctagcagcctgtgttactatagtgagtagagtaatgacttggatgttaatactacacaaaatcattttcttaagacatgttttcttttattttgcagccttggtgaatatttggatgaagccattagactaattgcttgccatcatgagcagaagcaaacgtgacaacaatttttatagtgtagagattggagattctacattcacagtcctaaaacgataccagaatttaaagcctataggctcaggagctcaaggaatagtgtggtaagtttttatttcaaagtatgacgatcagtcttgacctcttctctttgtaatatagatcctttggtaagtatcaacttctcaaaaaaataaaaaaataaaaaagtcagagcaatgtaaatgaaagctgtactgtgtggggctggacaaacgactcagaggttaagagactgttcttccagaggtcctgagttctatttccagcaaccacatggtggcttacaaccatctgtaatgggatctgatgccctcttctggtttgtcctaagacagagatagtgtactcccgtacattaaataaataaataaataaataaattaattaattaattaattctttaagacaaaaaaagaaaaaagaaagtgaaaaaaaaagaatgccatattgtattaattttcctaggggattactggtcttttattgttattattactgttattcataagttgtaactattaaccaacactgctattttgatacataaatcatgactaaatacttggtcaaagttctataaggacatatactgatatcagggaagaggaaatggcaggcttgttcgtccatggatgcatcgtttcccatagctgattagtgagatgtctcatggaatcttcattttcactctgatgaaacgggtatttcagaaatctcactacattaccctggggagtaaagttagctagtacatctgtttcaaaacccatgtatctttaaagttgatttataaactaatttctacaaaagatccaggttttatagatgagcataaatctttataaactgaagtagaaaatatgccttgggatagttctgctcctgatgcagaatcactaagttagcattataatctagagtttggagaaatgctaagccatacccaagcataattacatctttgttacttcataaacaattttatttaaaatctgttaaaagaaatcagagtgtgtactggctagttttgtgtcaacttgacacagctggagttatcacagagaaaggagcttcagttgaggaaatgcctccatgagatccaactgtaaggcattttctcaattagtgatcaagggggaaaggccccttgtgggtgagaccatctctgggctggtagtcttggttctataagagagcaggctgagcaagccaggagaagcaagccagtaagaacatccctccatggcctctgcatcagctcctgcttcctgacctgcttgagttccagtcctgacttcctttggtgatggaagtgtaagctgaataaaccctttccttcccaacttgcttcttggtcatgatgtttgtgcaggaatagaaaccctgactaagacagagtgcttttgattcagtatgtctataaggttctagaaaagctcttgtatatgtctacaaatacatgtacacagagctattctttgaaaaattatttctaatagcaatagttgaaacagaatcaagtctggaagcaggaaaataaaaaatatgatatagtcaaacagcaaaatactgtacaacatttaaagtgaactagagctgtatatgtaagccaggcattatgaaaagtaagtgctgagtagtattaatacagcctacacaatagtgtaccttgttgcaccattcctctgtactgtgaaatgactatatatagaaaagagaaacacttacctctgagaacacaagagaaagagtccttagctgtaatatgtctcttttttagatatcagaacaattgtagtaaaatcctaaattattagaatttaataatagaattgtataatgaaaacactgactttcattcttttctaatatcctcatatcaagtattcatatttattaataccttgagttcctcctccaaaacaaaatgttaaaggagttgtgatttttagtcttttgtatacatattatcaggatagtttcctttctgtactcattgacttgtgtcttatttaaaaccttgtagtcttcaataattacataataatttattctgtgtgtgtgtgtgtgtgtgtgtgtgtgtgtgtgtgtttgttgcctacatgtatgtctgtatgctgcttgtttgcctagtgcttgtagaggccagcagagggcactggatcccctggaactggagttgtagatggttgtgaactgccatgtggatgttgggaattaaaactcggtcctttgagagagcagctagtattcttagccatctcttcagccccagaattcttcagcaaataagaataagtagaagtcatggttacatatcctttcttgatagatgtgcaaggtgaaggagtcatttagacctgagactaatactaatgatttgtgcagcaaggctcaaggggtaaagaaaggaacctgttgttaagccttactgctcaggacccgtctggtggaaggagagagccaataaggaaaagttatcttctgtcttccacatgacaccccatccacacgcatacgtgcatacgtgcatatacaaaatagatacatttttaaatgtaattttttaaaaataaaagacaaaaagaacttgtgtcctagtgcccacatacactcagtggatcttgggtaacagtctagttggaaaaagtaaggagtctacttgattggtttgtaaaaatttggttttagagatttgtgtttaacatttattattattatttttgatttcttattacagtgcagcttatgatgccattcttgaaagaaatgttgcaatcaagaagctcagccggccatttcagaatcagacccatgctaagcgcgcctaccgagaactagttcttatgaagtgtgttaatcacaaaaatgtaagtgttcaagttcacatttctgaggtatagatgaaatcaagatttattcatgaatatatgcctgtcaaaggctttttaaaaattattaggagttttaaattgcttctctagatcgaaacatttttaaaatctaaagtgatcctccacccccgttattaagtagtagcaaaagaacaaaaacgtcttctgaaatttagatttgataatttcctagcatttaatttgtaggagtcttaaggagatagtgtttgaaaagtattttattcagaattgagctctcttatgtcctttttgtaagacataaaggtgacatttcaaaaagctgtacagagatgaaatcatgcccattttatttgggcattgggatttaatgggacacaaaattcaaactacctctctgcacctgattctgacttcttttatcagtactaacttttattcaaataataatagttgaagaaaaactttggaaatatttacagagaactaggaaaacatttctaacttgaagataaaactttcgttcgttttgaaaataaaaagttaatgtaagtttgcattaaatttactgatgtattcagaattatttttatttttttaatgttttttaatgtgtgtacactgtacactgtagctgtcttcatacacaccagaagagagcatcagatcccattacagatagttgtgaaccgtcatgttgtttctgggaattgaactcaggaccactaaccactgagccatctctgcagccccttaggaatatcttaatgcaatagttcttccaaagtggaaggacataaactaggagaaaattgcatagaggacagttttatgaagcactaaactgaaagtgctggccagagacattgtccaaagagtttataaaatgtaatgagttccatgcttctggtgtagaaagtacatcacattttgagagctagctatctgtagaaccttttgtgtattagagttacattggaaaatatatagatgttaaggattaggcttattatttgggaagtttatgatgttttgatggtagtgaaatatgctgaattaaatactacaaagcaataataatttagctgtcagttggtagaaggcataccgaaatgctgagatttcaagaggcaggttcttgtgcttcagcacactgggaaggcttaatgggggcaaaggagtagaagaaactgactcttaaagttggggtgaaagttttttggaaaaaggagtctgacagaggttgagtgacattatcaaggaagaaatggtggtctttcttgttgcaggtgggagccagacatggtgcttgtcagacgagttctgcttatgctccctacttgtgctagagctgctcatgccccttctgtctgggcagaggggttttagagctgtggaagtgttgtctaaggttttctttgttcaattcaaatacttcttcctccaccctggttggcagcagagaagctccatttgctaaatggagaatgtgggaacgaaccatgtacatatgttagcccgctaaagtggtccagactggatggatgctcagcatactttgtttattgaatgagtataaaaaattaatatggtgaaaactacaaatggcagctccactctgccacccctggtgtgtaatgggtattttgtaatgttttatctttttagagctttgctgttctggacagatgatcttgaaatgataattctatgctcttttcaagttttttgtgatttttagtttttcttttcatcaggtcactctgatgaaacacttagcatacaaatgctgcgtgtctgatgaattaattcctctagtagctgttgaggcttgtctctttaagtattaagccacttgactcattgtctaacaagtaatcagaggcctgatagcaagtcacattgcatcctgttggtttgagaaaactaactttttgttgtactttttgttgtccaccttcagatatcaaaagtaaagtgtggctattctcagagttttaggcaattccctagtcccccaccgcgccacacgcacgcactctgggataatatctttatttcaactttacatttactggtttcacttgccagaattgctaagattgtcttcataatagctagaactgttaagcatattgtagaaattgccatgtttaactatcagaattattcagcttcccctaattcttcttcatgtccatatgcatgttattagaggcattttacctttttgaaatctttatattctatatctagttgtattattcctctgtggctgttattttttgttgttgttttatcctcagaggaaaacagtgtttttagtaagtttttacttggttgtgataattaatagctctttgatgtctcggcatatcccatctcctcatcatcccttgacctttgcttgttattctgagataactaattgcttttttattattataaaataggacagctgtgctgtttatttgcttacaaaagctcagtaagatatggttcaaatactattcagttcgtcaacttcaagtatatagttggatatgttcactaatatatgtagtgagaaagaaatcctgtgtccttttattgtcctccctacttcccacacccaacagctctaagcagttttgtttccatatgtctttaacttttaatatctctcttgtactgttggttttcccaaatattaataaaaatagttttactacttgcccaggtccccatatatatatactttatctggttgagagactcagatttatttacagtagtgcctctaacttaaataattcattttaccctttctggcttaatgtttttttctgaatatttactgacagatgccttctataagcagagcttaatgcatacgtgaatggcatccattctgtcctcatgaagattatatctagagaaacagtccctttcctaaattactggcagacatgaagtgcacttttgcatactggccgaggaaagcagatcaggtagttctttctaacaaggaccgtctgtggtctgcgatgagcttattacggaaatgagattctgttacagtgtgctgaatgtagaaatgacatgaacagtaacagagggccaaggatgttggactttacaaaggaggtccatctttagataattaagctcagtaaataaatgtcaaacataggaaataatgcactaaaagattaaaaaaaatgtttgaaactaattgatatggccaaagtgacaagttttaatatttagcaaaatgagggacaagttagtgctgtagtctggggacttcaggtggactgctggggaggtttactggctttacagtttgagggtgataagtaatagaatcaggtctgtctttataatattataaaatactcccatattatagatagtaaaatggtatctgaatttgctgaaaactgttgttagagactctgcttgtactagtctgttcaggctactaccacaaaatacagtaaactatgtggattaaaaaacagaagaattatttcttaaaattctggaggctaggaagtcctggataaggtactggctgatttggttcctgctgattattctcttcctgacttgcaaacaaacacttcttgctttgtcttcccatggtacatagacatggagaacaagatctttttgttattcttacaagaccactaatcttaccgttagaaggacctgggccttatgacctaattaactctaaagtccccagttgtagatactatctcattagagtctatgccttcagcatgaatgtacagggccagatacagatataagcctgtcactgtagtattaaaagtaattatataacaatccagatgtgacttttagaatccttggcctctaaatacacagaaggaatgggaaaacaggttgttgacatactgactgatgatggaatgaacaatgttgtttgaaatagtttatggtattaatgctgaaaaaggtgtcacactgagccttttattataaaagagagggtgcttctgagtgcatattttagtgcatattttagtgcatatttgggaatgatgtgcagataaattcttgaagaaaaagacaaatattatgtaagaataatatagacataaaaagaaaaggttaaggacagcagtgagacatacaacatagatgaaatagtgtatttgactggccctggctcagcagttcagagtacttgctgttcttgcagcggacctgaatttgagtcctaacatccacacagtggcttgcaactgtcctttgtgatctagcacccatttctcatctccacaacaccaaatatccacagtgcacatatatatatatattttcagacaaaacactcatatatacaaaatagaaacagaccttcaaaaaaaagaaaaaagaaaaagaaaatggcccagtaaagtgtcactaaaaccaagagaaaggaaaggactgtgattccatagaactgctgagttgtataagaattagtagaaagtacttaatatttgttgacaaattatgtaggtatttataataaaatgagaacttgatagagtattcataaatagaaattgttatgtgaaaccctttggttgacttactggtttctaagacttttgaggcagtttcatagcaaacttgaaagaaagatagaagcttgcacatatcccctgcctcagcaccctcaaaatcagtagacaccacctgggttgtacatttacatacgttcttttttgtttccagtgctaggaaatgtacccagagtctctgtgtgcctagtaaacatgaccactgaagtgtactctcagccctaaggttcacttggtttaagagagcctatgagcttgaacaagtgtggtatttttctgtttccccacctttatactactcatttttatttgtccaaaagatcttctggcctgatctttttctttttctttttttttttttttttctgttctccctagcaatgaaattttaataaataagtttacttgtgctttgggtataaaactggaatgattttaaactgatagtgaattgttgtaacatatgtattttcaattcccaaatgaagtattagaaagtagtttctaatgtttttatttctttgctttgccacagataattggccttttgaatgttttcacaccacagaaatccctagaagaatttcaagatgtgtaagtgtggtaactaaaatgctgttaatacaaagttttgctagtgcctatctgtagatcgttgctatacactttagctgtcatctttttctacccatgaagttacatagtcatggagctcatggatgcaaatctttgccaagtgattcagatggagttagatcatgaaagaatgtcctaccttctctatcaaatgctgtgtggaatcaagcaccttcactctgctggaattattcatcgggttagtagaaatatatcaccatgttcttttctaaggatttttttttaattttgtgtattttgcttgcatgtatttaaagtgcacaacatgcatgcagtgcctgcagagtccagaagagggcatcatatctactgaaacaggagctatagacaattgtgagctgccatgtgggtactgggaaccaaacctcagtcctctgcaagagcagcaagtgctctgaactgttgagccatctctgcagcccaccatgatctttccttttcaatcattgaagtgaaattcacaaaacaaattacgacctgaagtattgagtagcatttagtccatgcattagtgttgtacaatcaccatctatgtcaaattctaaaactttcatcagcctttctctagtgaagactacatccctaaaattgtcactcttcattttgtctctcttctcagagcctgttaattcaggacaatggatttacctgtcctagatacctcatataaatgtaataatatactatatggcctttgtgtcaggctcctttgacttagtgtaatgtttttgtggtgtctatgctgtatcatatattagtatttacttttatgaatggataatattccatatatcatattctacagataatttttgttttactacctttcagttaaatactatcttgctatgaaaattcatgtacaagtatttatttgctctttgttctttagtctttcagggtaggattgctgaatcatgtggtattcacgttttaaggaaccatgaaactgtttttcaaattttacatccccagaatccatatataattgtacagttttcctgcagcattgccagtatttagtacctgaccgctttattttagtcatcacagtggctatgaagtggtattttattgggcttttgatacacattttcctagtggctaataatggttattttaataacttttctattgccatgacaaaacatcatgaccaaggcaagttatagaagagtttactgggggcttacagtttcaaagggaagtccataactgtcagggtgaggagcatggcaacaggcaggcaggcagcagtagcccagagcttcctctactaacagcaacacagagaaagctaccttgactgatgggagcttttgcaacctcaaagccaccttcaataacacactcttcccaaacggttttaccaactgggagcacagtattcaagcatatgagcccatgagggccattctttttcatgctaccaaaggagtcaagaatctcctcatttgttggccatttctatgttattgaaaaacatgtattttttaagcccttgtttctaagttgtttgcgtctttgttaaatttacagatttgtgtgtgtgtgtgtgtgtgtgtgtgtgtgtgtgtgtgtattttttaagcccttgtttctaagttgtttgcgtctttgttaaatttacagatttgtgtgtgtgtgtgtgtgtgtgtgtgtgtgtgtattccagttctatatatacaaaaccattaccagacataatttaaaatctgtagattgttttcactttgctaatgatgtgttaattaatatgtaagtggttttaatttttatgaaatatcaaatatttgttgttttatgtggtcttgtgtcttgcacaagaatctactgccaaattgaggtcataaaaattcaacattgcctctttttgtaaatttttggtccattttgaacttatgttttgtatatggtgtagtgcaagacttatcttcactctcccatgtttagaaatccagttgcccaagctctcaggttgtattggtgccttagggaatccagctgactgccagttctctataattagactctatgtctgtctctatattagaatcacagttttatgaagtttattatttttaagtgtatgtgtgatcatgtgggtatgggacccatggagtccagaggtggtaggatcccctggagctggatttacaggatttaatgagctgtcatttggatggtagaggccaaacccaggtcatcttcaaggcttagctgctgagccatctgtccagctataccagttacacatgtaactctgtactgctttgaaatgggatactatgaatcctgtgtcctttcttagtagttttaaaaacagctttaagtgtataggaatttggagattagctttttcacatctacaggggaaaaaaaagccaacggactttggacaatgaatccattaaatctaaagaatgagttggttggtggttttatcacttgtcttgagggctttgtaagcataagatcttcccatttcctaagctgtgttagtctgtagtgctatgagttgggtagctgaaacagcaggagttattttctcacagctctcaggatccgaaactttgtggttttggtgaggtccataagcactctctgtagcttccttcatgtggtttttcctttgtcagagagcagcatgtgttctttctgacctccgcttatgtgctcataaacactgattttttttttttttaagatcatgtcatttgcaccatagttttacttctattcaatttggccaccttcccccatctcccagctgccctagctagagcttacggtaaaatcttagagaacagtagtgaaaatagtcatttgagtcttgcttgttgtaatagggaaagcttttcatcgttcaccagtgtatttttctgtttctcattgttgtaacaaagacctaacgcaaggtacacgcatgcaggctcaagggtcccagaattacctgagtttagaccatctggttacaaattgccaattctaccatggtcctaactgaatggtaagagtcagaaccagccaaagaaagaggctttatggaagtctggctccagcatagagtttttagttgttttgttggctatagagtatgacaatactgtgtcactagcaaggggcgctcacccagactcttctaggtattttatttggtcactataacataccacttcccttagtaggcaagaatcattcctgattcatgctaatacattgaatctccatttcctctaaaggttgagattgttgcaagccaaagcccttatcataaattatcttgttaggttatcatggtcaaaacctccacattaacgggacagttcgtcaacaggatattccaagtgttgccattacctgtaatttagggcaaagaccagacctctttctatagaagatgaatgaattcttctccatttatcgtctattccttatttacttatttttgtcattaaggagtattaaacttagccagaggttttatgcaccaatttaaattactgtgtatgttgcttcccttaactgttgtactgcattgatagatttttttatatttagcgtcctctttattcctgggatagatcccatttggacatggtatatataatctttccagtatattattggaactgatatgctagtatttctgttggagttttttacccttggattcattactgatttcatttgtagtttgtttgtaaagatggttttaatcatactttggtatcaggagtttcctaatctcagtgaaagttaagatgcgttccttcctctcttgtttcttagctgcttttgctcatttagaagattttaggaaataaagtatggctgaagaaatgttcttaaagcaataaagttgagctagcagtagatatactgagaggtctgttggtgtggtgacctgtatcttaggctggacaatgtgcgaaactagggtggagctatacatgtaagaagcttattagagagttccattaagatcagtatctattacaaagtaaaagtggacaaagggagaaattacattggctacatttatttcaaaagcctcagctggtggctcccatttaacctctgcactgaaaacaggtccttgctggaggagtttcctaaaggtcaccagcagccgtccctcttgggcaatggaagagtaattgtctgagccagggtctgagcagatatcacagagcctattgaagccactccttgagtcactcttcccattgtcttagggtactaatgtctggctgttcctgtcgaatattttctgactttttctgaagcaattaccaaaaattttgacataactagctgtcagttttgcatttagtcctcacagcacccccatcctcggttcaccttaactgtgccattctgtgattactcacttggtttaagaagcaatctaaacttttattccttccaggcactacagttagatgtccctgtaggcacttagaaacccttgctgagagagacttccctctaactagttcccactgagtcagcagaagagatctgtatggtaataccctggctcacatgctggcctggaagtgacacacataacctctactcagtgcatccacagagctagccataaaaacctgcctccttatagaagagcaggaaaatgtgaggaaggcaaactcatgggtgttggtgagtaccgggctccatagcctgtggttgtctgacatacctccgttctctgtcccacacctccttaatgtggatacaccttagtgtctgtgccaggttcagatgttgatcttctgagcccagaagcataggaactggctctgtcttccctcctctcaagttccttctatagaatagtcaggtggttccagggtagtcaagacagtctcattggaaattgagaaatactgatgttgatttattagttgcatttgacattatgctggatggacattgtaagtgttccttcctctggaggtaggagtgttccctcttgaggagctggatctgatttctgcacagtgcaacttccccgctgttgtccacattacctgtctgctccctatggaagtcttcctttcctcttatctcccttaaatagatcttaagtgagtattgaaggctgtgtactgaaggggtgctcagctttcttggcctgcttcttatccctgaaagatagggacacaagtgtgttctattgttgacattttggacactctttgttgttatcctgtctttgtaagttacttagtaattttgacaacagacttgagttgtgttatttgtggttcagtttattatatcagtaaccttggtagcttttgattgtatgtctttttaaagcatatttgttagctgacagtctatgtattattggacttacttgaaactcctgagtctaccttcaagcttccaggcttccaagatgtccatgatttctaacaagctattcatggcttacaaaagcacagtgtgtactcagggtctacagtgttggcccatgcagcattactacagacctcaggtcaggttcagtgttacttccagggacatccttttcccatgctatgaagtagaagaatagaaactatgctacctcgagcaggttcagaatttttcagatctggtgagcatcatgtaattttgagttccattaactgaaacaggtcataaggacaggcatgtaaaaggatgttaagctaaaccatctgttgcctttttctgggtctagcagcattttgcttatccaaaatgatggcactgttactttcatttctagttttaaagtaaccagttacttctaatgcagacagtagccaccagcagccttttttgctttctgacctcttatagagcaagggttaaggaattatgtaaagtccatattctgaatgttttttgtttgtggacatggcctctgacacaactactgacaactactgcccttctatcataatatcaactgtagataacatggggtaaaaatgactatggttaagtttgcattaaacttcctttgcaaaagcaatcagttgaagtcctgtgcagatgacataaaatagtttacctctgcataatttggatcactttccactttgatactgctgtcaatactgttaaataaccaaactcatgatcctgtgtccttgcataggttgtctgatctgaaatgcttggggccagagtatttcaaactgtgaaatattttagattttagatatttgcatagacttatagtgagcatccctaatctgaaaatcagaaatttgggggggatccaaatcaaagaactgtcatgatggcccctgtattcttggactgatttgagactaccttaaagttttccttagcataaatatcaaagtagttataacagccttttgagtattgacagttatactaaaaaaccaaaaatacttaaatttgggcctttcagatttcagattagggataatagtaactcccaagtcttgggattcagccagaaaacactaggcttagctacaataaaaaatatcaaactcttattttgttttttggttttcaaagcagggtttctccgtgtatctctgacagtacaggaactctgtagaccaggctggcttaaactcagagatccactgcctctcaaatactgggatcaaaagtatgcgccaccactgcaaaagcagatatcaaactctcagtagccaaatatgactaaggtttatttttcacattctgtatgtaggcacatcatggtaggggtagacatttggatttatagagatgcccactatctacaatgttactaatcaccaaagcaagggaagatctgcaggaggtcatgttctggcccttctccactctgttcccactctacctactaggtctacttttgctatcttgcctgactagagagagaggcttggacaatggggggaaggagagggtgggttagaatgttgagttatttctactctatctgctcaactccaagtaaactccaagtcactcttcctataagtagttatgacatatgtagaaagataaacattgatacagaaaaaaatgaactttagttaatattcatagagacaaatactcttggcagtttatttccatacacagtttcttttaaactagaaatgtatttgcccctaatcatttcagaacaaaaagtattttgagtttttttctagactagaccacctagtataaagaggcagtaatctccagctgtagcaacaatcctgggaggactactgagtttatagtggttattcttcagcatgggtattcctttgttttatattaccaacattctatttgcagaatagaaatgataacatttttatcttctgtgggaataacgtgtagtcttagtatgcttaatttcaaaaggccttagtgtctgttttctttatatattttttttaattaggtattttcttcatttacatttccagtgctatcccaaaagtcccccataccctcccacacacacactcccctacccacccactcccacttcttggccctggcgttcccctgtactgaggcagataaagtttgcatgaccaatgggcctctctttccaccgatggctgaccaggccatcttctgatacatatgcagctagagacacgagctccgaggggtactagttagttcatattgttgttccacctatagggttgcagatccctttagctccttggatactttctctagctcctccattaggggccctgtgatccatccaatagctgactgtgagaatccacttctgtgtttgctaggccccggcatagtctcacaagagacagctatatctgggtccttacagcaaaatcttgctagtgtatgcaatggtgtcagcgtttggaagctgattatgggatggatccccagatatggcagtctctagatggcccatcctttcgtctcagctccaaactttgtctctgtaactccttccatggatgttttgttcccaattctaagaagaggcaaagtgtccacactttggtcttcgttcttcttgagtttcatgtgtttcgcaaattgtatcttatatcttgggtattcttaggactaccggttagtgtctgttttctaagcctatccatgttaccttgtcagagtaagttagaaacagcacataagcattcttgcatgtagatatttaaaaagggatctttgtgttaagggccttagcttttgctgttaatctgctagtcatctgtacatgtgagagagtttgtgctgtggatatgagtgttcatcaaagctaaaaggcaagagcatgatgaatgtgaaggcctgggtatttatgccactgtcttcgttttaataggtattgcacacattttcttctacctcgagccaggcagcagtttttcacaaagacagtattactatcagaagaaagtaattttatggactagtgtctgttacatgtgaacggaagtttataagcaaatgtttgtgatatatgtgggaagtcaggaatgggcagactgataatcactttttggttctttagaactgagtatctagtgtattgagactgattccaaactttcctccccacaaaagtgaacatgtatggctatcattgttcaagtaacatatacctggatcgtgtcaggattgtgtaaatattatcagaatgctccatggtggatttagagcgttttaaagtttattgtgactttagaatgagtttttttattttttaatgttagtgagtacactgtagctgtcctcagacacactaaaagagggcatctgatcccattacagatggttatgagcaaccatgtggttgctgggaactgaactcaggacctgtggaagagcagtctgcttgctcttaaccactgagccacctctccagtcctaaaatgagattttttagtgctattaatttagtatgtaaatgaatgtacatgctaatttatgattcttaccataatagcacttttttgtttttgattggtattttgagatggggtcttgctgtgtgtcatcatttttgattgctgtggcaaaaaaactgaccaaaaacaacctcaggaagaaagggcttatttcatcttacagtttcatgtaacagttcatctctgaggaaagtcaggctagaacctggattagaacttgaagccgatgccatggaggagtgctgtttactggcttgttcctgggttatcttggcctgttttcttagacagccaggaccacctacccaggaatggcaccatctatgggttagatcatcccacatcaattattagttaagaaaacaacccacagagttgtctacaggccattctggtagaggaagtttctcagctgttgtttcctcttcttacatgactctagcttgtgtcaacttaacaaagaactaaacatacactgtgtgtattgaacttccagcctttctgctttgtcctcgaccaggctctcctcatcttcatagagataaataaaagaagtaaaacaaaatagaaaataaaattttaatacatttttgtttttaagtaaataagcattaataatgtactggctttgtttatgcaaatgaaatgatcttaaatctgacttggtgggtttgcctatggtaaggaacctctgcagtggtcctgcagactatgtaactcagttgagcaaaacaaatctgtgtgtctgtcttagcaatcattttaatgtttatttcttcaaggacttaaagcctagtaatatagtagtcaaatcagactgcactttgaagattcttgattttggactggcgaggactgcaggaacgagttttatgatgacgccttatgtggtgactcgctactacagagcaccagaggtcattctcggcatgggctacaaggagaacggtcagcatacactttcgctttgaaatagtcttctggttttgtttatcaatcagtttttaaatactgtaattgaaatgcatgcatttaagtattcattactacttcaaatgtctatccaggatttgaacgttttgccgtgaatgtttgggaaagcatgagaatcttatctcaaatgggaatacctagatgaagagttctaaaactaggatttatgccctctgcttgtctgtaatttaaacataaatatatatttctcaatgatttaatcttagtaataattctagtatatattagtcttatttgctctcatctccagcacctttagtcagtgttaacagtagcgctcacaagccgggtgtggtggcacacacttttagtcccagcactctggaggcagaggcatatgatttctgtggtctacaaagcaggttctaggacagccaggactgttacacagagaaaccctgtctcagaaaacaaaacagaataatataaaacaaacaaacaagcaaaaaatagtagcactcactataaactctgagagctacattttccaattctggaaagttagtgggtaactcagcctcgtatggaagcactcgtgtttgattaaagcctgtgccccgtcataaagagattgcatatagtattatctgtggataggttgaatcaaaccataactttttaagtgtggcgtgtttctaggatggaaattggaacagtggttcactttaaatcaggaaactattaagtcaatcttgaacatacatatatacatacttaagcacatgtatatgataccagtgaaattggggagattgcttaatttccttaccttttttgagctaatttaaaacaaatactttacatatcaactatcggtttttaaactaaacatgcttttctgtttctaagtctcaacataaggtttaaaagttttgttttgagaattgataggcagattgctattgcttttgctgtgaaacttttgattatcacagaaattgcaccacatgttaagttctataaatatgatcttgacattagagaagctgtcataaaaattgacatgttgtctgtcctctcttagatgagagtcacttagatctctcattgcttttcctgcctgtttccccaggaaccaagtcaaatctcgtgtttcctcactcataactattagccagcaggaggtggcatatacatatcttcctctcagacacacacacacaggggaggggggtagaaagagagttttcctgtttggttttattgcagagtatttcaggacagtttgggaaatttggggggtaattaatctattttaaacggcctgatagcaaattagaccccttatagcaggttttataatatggaggtctgccaagagactgtagatcacagatctgtaggctctttgacactttgatattgtattccaccgaaactaacttttaaacccaaagtttaaaaaaaaaaaaaaaagtaaaaaagagataatgaaaaacacttgtttatcaaggtttcttggtagataatgctgttctttttctgtccatttgtagacatgggtcgaggtggatataaatgtaaagtggtgttgccaagagaatacgttacttttagttcagaataaacaaagccttttcagttaaataagcctgggaaacccaggtgataattttctgaaaaaaacattaggttactattttattaaaatgcagatatctttctgtttttaatatgctaaattatttctgctcatgcttgttaatttaacttaaagagagagtaaaatgcacagttaaacctcaaaatagtacatcttaattttataattttatggccttatatacattttaaatcttatttttaaattttgtttggttctacttcatatattacatgcaaaatctcagttatagaatgtatgttttttaaatttatgcagtatctgtgcatagctctcactttaaaattagacatgtaattaaaatgccatacttcatattttcttttgtgaatcaaagctttttgaaaagtattttgtgttttaaattatgccattatttgaaattaaaaccacctttttctttttgtgatgttctgcaattttttagatgatgcagtcatattacgcttctttgattttaacaatcttttgctttgctttttcttcttttgtgctgcaaacatatagtggacttatggtctgtggggtgcattatgggagaaatggtttgccacaaaatcctctttccaggaagggactgtatccttgtgctgctgcagcagattaattagctaggtgatgaacttccttctgtttgctcatgaaaagaaatacatgctacatttgtacagtacaggttttaaaatagatgtaaagtttgtgactgttatagttcaaaaactggttgagctaagaagcttaagtgttagtaggctgcatttggcagcaggacatacagtctctgctggtcgtcagcacattcaccgtcattcatttttattttatattgctttttataattttaagtgtatatggtgtgtgtctttttagtgtttatatatttttctttttattttaaccaaaatctttatgttaatgtcattgcattttgttttcagttgacatttggtcagttgggtgcatcatgggagaaatgatcaaaggtggtgttttgttcccaggtacagatcgtatccttatctttggcctaaaatgtagtttctaaaggtcaaaatggtactgtgtcagcctggtcaagtagaatgtattttgtctcttcctgatacaaagtattgttaaattacttttccagagtaccacctcttacctgactttcttctcctcgtttattgatttatatgttaattttgaaaaggtctcaagtgtggttaattcataggtccttgcttgcttagagttaattaacataaaaagttacggctttcactaaagtttctaacacttgagtaagtctttaactattgtgaaggtagcatgaattttggaattatctgttgctactgtttgtttttatgtttgtttgtttgttttttggtttggttcccccatgtctttctgttattgttctgtgtgctatgtcttgttgtctcattacattaacatagcatgctgagaatgtcagcaagttttcctgtgttggtaattaggttggattcatgcttttagttccatcagtttttagtatttatgttaacagtgatgtgttgatcagtgagtgacacagaattgttttaggtggaatgagaatatttaccatgtaacaataagaacgtgtgtgggacaatagttattcttcagaggcttggcgtataaagacccgaaaaccccagtctacagcatactgagatactggtatcatgttcatttatttcagagctttacaaacgttattaacataggcatacccaagaatggcaaaagaaaatgctactattattaaagttatcatttttgtcacaactgggtgttttctgttagtgtaaagacctgaaaaaagcagaccaaactagaaatatttcttactctctaggaaatacatttacattttttaagagctgggagaaagttaaatttttaaatattaagattttatgcagtttgcattttgatttttatgtatagtaatgataatttttagttacaatttttattttcaatttgtttttttatgcctccattttatggtaaaattagtgtttatatatacctgcacacacaataaataagattaacaaagcttatttattgatcatttttatccacttataatcattgctttttgtaaggtggctttgaggtacaaaatatataatggctactttcttcaggatttaaaatttttccattttcttatatttagtgatgtatatatgattaaagtgttgaatatttgatacatggagtatttttcttagctacttgataatagatattgatcagtggaataaagttattgaacagctcggaacaccttgtcctgaattcatgaagaaactacaaccaacagtaaggacttatgttgaaaacaggcctaaatacgctggatatagctttgagaaactgttccccgatgtgcttttcccagctgactcagagcataacaaacttaaaggtaagttgtataattgtatgcatctcttttggatatacatgtataggaagagtttagtcatattcttaaagggtctaactcaaaattatgtctactagtagaacatgtaaaggttttgttcttttgtctctgatttttgcattttagctggatatggtgacacttgcctttagtcttcatacttggggagcagggtcaggaagatttctgagttcagggccaaccagggctacataatgaaggccctactttattttttatttttttaagatttgtttgtttgtttgttttttatttattttatatatgtgatacactgtccctcagatcccattacagatggttgtgagccaccatgtggatgctgggaattgaactcaggacctctggaatatcagtcagtactcttaaccactgagccatctctccagaccaagatttgtttattattatacataagaacactgttgctgtcttcagacacaccagaagagggcgtcagatctcattacgggtgattgtgagccaccatgtggttgctgggatttgaactcaggaccttgggaagagcagtcagtgagtgctcttaaccactgagccagctccccagcctcgaccctactttaaaaaagaaaaaaaaaatgtattttataaatcatgtatgtgccctggttttatagaaaaattattctttaggtgtggtggttcccaatgtaatcctagcacttggaaagctgtgtctgatagattgttaggagtttgagataatcttgagctacctagtaagttccaggctagcccagggtacatagcatgacctggtctttaaaacacaaaacaaaagaaaaacaaaaaaacaggggctagagagattatttgctgctcttgtggaggacctaagttcaattcctaccctccatgtgaggcagctcacaaccactcccaaatccagctccagagtgtccagtgccctctctggcctccctgggcacctgcactcatgtgcacacatacacctgccccttccctctgtacacacatatacacataactggaaaatgcaataaatcaagtgatggtaagcacctttaatttcagcatttgggaggcagagaacagctcaaggctagcatagttacaaagcaaggtccaggatagccaaggctacacagagaaaaccctatctcaaaagatgaaacaaacaaaacctgtaataaatcttttttagtactcataaaaataaataacaaaagcatctttttaaaagcataggatttgttttgtcttggtttagtttggtttggttcaatttatataaaccaagttcatctggaaattgttatcctcttgtctccgcatcctccgcttagcaattacaagcatatgtaccaccacatgcttggcaaagatgaattttctaaaataaatgtaatctcagaatcctaatgtgcatggttgaataatctcatgaactggtgtatattaatatcattatttttgcagccagtcaggcaagagatttgttatccaaaatgctagtaatagatgcatccaaaaggatctccgtagatgaagctctccagcacccatacatcaacgtctggtatgatccttcagaagcagaagccgtaagttactttctcaatgtttgaagagcatactccaaccttagagctgggactgaaatactttcagagagaacttgtcattttaagtaaaaatcagcacagatcaccggtgttggtgtttgccgaggttttcctaaagaaaactttaggttaatgagcatctgtccaagccctcatcatcgtccaggaacctccactgtttctcactctgttgaactcacagttgattagaggagcctaggatgcctgtgggtgcatccttagatagaaacaatgttttgtatttaaagcagaacagatttctgaaatataggtagaatgtgacaattttaaaatttgagataaaagaaaaaagacaaacagcttattacttagaaaggaatcttacagaactactctccagaaagttaaagttaatgataactgattgacctttgtctcatgattcattttttgcaagttgtatgtctagctgatatttcaaataattaattgtatatatacatccagtaaactataacagttgttctgacttgtgtctttcagccaccaccaaagatcccggacaagcagttagatgagagggagcacacaatagaggagtggaaaggtaacactcaccggagtctcagacactgagggagcctctggctttccatagtgacttcttcatgttacagaaattagtgttgctttctgttttcataacttatgtttagtagtaaggttttgtttatttgtcttacaaaagtagaaagtcagtttccttccttaattttgaaaatttgtacctcagttatagtcacattagtgttttcttccttgttccagcagccatgtttggggtgtcccatctacaagatgactggtgcttgtattctcagtgtactgtacacacctgtttgttgatgtatccatatatcttgaagatgacagaccctattgggtctaacgtcacactttaatagctggcaggtggtgagctatagggaagcttgtgtcccagtccatatccagctcccttgtgagaagcactgaaggtggaccttcacacagtctgttactgtggccatgtgtttatgtgcacgtacttcatagaattgagacagtagtccaaaaagcttatatgctggaccaaattttaaattttagttacttcctgattttttattaaagaaattgtagtttctgcttctgtcagcatgatacaagagtattgatccacagccactctaaccagtagagtggcttaatttatcatctttgaacatcagatctagtttttttctattttattaatatggtcatacataaatatgctttttattatttcagtgtacagtgtaacaggtttcactataacatcttcagatatggacataacctctacattgttcgtgccaacctcctgttactctctcatggcctcccttattttctctctggtcccttttcacctcctaaccagcccttgtatgtatttgtgtcatgtatatttatattgtcaaacccaggttccacattggaaagaaaacatgcaatatttatctttctgagtcaaaattattttatttaacttgataatctctagttctatccatttttctggcaaatgacataatttcattctactttatagctggctaaaactaatttgcatacacataaaccacttgttgttgttgttgttgttgttgttgttgttgttgttagagacaggatctcaaaaaagctaggtctgcctggctggcctggaactccctatgtagtgcagactaatgccaaacttccccagcactgcgtgcctctagagtgctgagattaaagactgccaccgtacccaaccttaccacattttctccgtgctttttttttttgttgatggccatctacactaatagtgtatttactgctgtggatagtaccacaatagaaatgggtgtgcagatagctctgctattgcctgccttaggtgcctttaatggaattctgctttttgggtttttttgaggaaccagtaatttctatagtgactattataatttacatttttactctaatatgtatgaagcttccttttttttccccccacatctttaccagcgtttgttacttttggctttcttgatagatggtagccatttccattgatgttggatagaatcttggtactatttttgtgtgtccctgatgacatgtggaatgttgatattttttttcatacatttattatccatttgtatttttttgataatttcctgttcggatgaaaaataaattttctatctattggttaggtagttggttggttcttagtattcagctttttgataatgcttttaaagttgtaagaatattgaaatagaagtatgtgtgtatcccagactagcatcaaacttgtgatcttcctgcctcagtctcccaagtactaggattacaggtatgtgccatccatgcctggtctccagcaaaggatactatataaacaaaacaaaacagaaataccttgaacttcaggaattacacagatgtttgagaagttctttatattttttcacagaattacttttatgtaatttttcaaagagtatatgactcaaaagtgatagataatgataccaaacaagtcagaatcacaagcaagagcattgtgtctttccgcaggcaaatctgtcgtgcaatggtctgctgggatccatgagtcctaggaaggggtgttgatgctgacacctgctgtaggctacttggaaggatctgaagctgctgcttcttttccttcagtaaaaatacccttctgtcccattctaattgtaaatgctgctttggttataaatctttctaattacagccttgttgcattaggacagaacccaggaagtagaaggaaggtattgacctcaggtctcactttgacagaattagacaagggtctgtaaggcagagtgctgtgtggctgatacactcaaggcaggggctggtttctgacaacagctgccctttaaccagctgggacaattagagcagagagcttagctttctatcaacatctatctgtggtcgaagatcagtgaattaattgctaacacctatgagtctgaagctgacactcagatcctctgccattgctatcattgcaagaacccagcttgatgcacctaacagatagaagctttgacttaaggactcatgcctgagagtcacttttcctcttctttttcagaactgatatacaaggaggtaatggatttggaggaacgaactaagaatggagtcataagagggcagccgtctcctttaggttggttacaatataaacctggttgtgattgtgccttgcatcttgtgttataatcttcagaggcctggaatctgcagttcttcccatgctcactcagtttggtagttaaatttgaaagccatgacacactattgtcttgatgcatttgctgatttaaagccagttttcattgacaccacagccatgtctttaaataagaaaaaatcccttagagttccttattctttgctttgaaaagtcttcagttggaatagataaaaacttcaccacaaaatttgctaaatttgctatgtgtgccatcacgttctgacgttctttttagtacgttagtcacacttgaatacaagcttctgaggacctcttgtctctcagtgttctgctcatcactgtacagaagggggacaagtgcgtcagcagagtcctgcctgctcggctttagcatcttggggccctgagcactacacactgtttttgttctgtatatgtatttttgagaacttaagttcttgtacttctatttagtgagcttatggcttgaaagttgctccatcttgttgagatgctttaacatgttcttccctctgaatgaggcttcccccttaaaaggatttctgtctctccataggttttcctggtttttgagctttttcattttttaaatgcatgaaatgcttgttcgatactgctttttcacagagaaaagcattttctctctgtttagtaagtttgtatttgtttttgcctggtatttacctgggtcaaagtatgcctgagtttacctactaggctgttttggttacctggtaagtgacacactctcttgtagactggccacttggttcaggtccctcctgatcagatgctggtctttttttttttggtttttcgaaacagggtttctctgtgtagccctggctgtcttggaactcactttgtagaccaggctgacctcgaactccacctgcctctgcctcccaagtgctgggactaaaggtgtgtgccaccactgcccggctttttttttttttttttttttttaagatgctgttcttttgtgttggcttctactttgtaagatggacccaggagtatcacttgaacactgtggtttttgtgagactatcaaaagtaattttctatactattttagttctcaggctgtttttagttacttggatcttagagatcttctctccaacaaaatgaagtgtaagcagttttgtatgtactctcaactcttttggaacacaccctgaggcccatttatggatcttgctgtagggccattctccatgttacttggattttaacttcttgtcttaaactaaaaatgcattatggaaaggaaaacaagtataggtttctagacattttcacaattctcccttcgtagtttgtgtgcataagagaacattagtgctgggttcaatacgattcagcaacccgtaagcccaggagaagtctatagaccctgaaggtaggtagcacaggccaggcagcccggtctgcaactctctctgcaactggtttgctgttttgtttctcatagcacaggtgcagcaatgatcaatggctctcagcatccatcgtcttcgccgtctgtcaatgacatgtcttcaatgtccacagatccgactttggcctcggatacagacagcagtctagaagcatcagctggacctctgggctgctgtagatgactacttgggccttgggtgggtgggagggatggggaattggttagtcattgatagaactgctttaaaaacaattcagtggtcatatttttgagtgatttttcagaaaatgtagaattcattttgtagtaaagtagtttattttttttaatttcaagtgttgtaatttaaaacttaagttgtgtttttaaacagcaacaaaactgtattgtatttttgctgtaattaactgtataatgtaaacctaattattttatcatggtttaaattttgcatatttgctttatcttatgctgctgatttttttactgaatttgtaaaatttttgtttatcaaagcaactattatgtggtgacttgcatatatcatgaattatttaagatgtttataagttttttattagaatttatttcagatgtttgttcatgatgctatccttcagggttatgtgcttatcaatgaaataaccccagaggaataagggaaaataacctgtagccagttatattcaggaataactactgtaaatgatgaacgcatcaagaaacctccaatatttgctacttgccaatcccaacttagttaaaacaattggtaggcaaccttacctaaattttagcaaacaccttatctaatggcagaataactcagagcatgtctttaaagatgctgggcacatccttctccattttgaatctcctacaccaacccaagaaaaacttaaactaaggaatgtggtatattctgatcatctgtggcatgcttaaagcttttgatcacacaaagttaagaggacacttcatgaatctacatttccgtggagatcaacagatgcttcccctgtcctggctacgagcctgcttctgtagacactgagttaatctcctcaggctgtaggtcctggcattggccacgagcctggactttccctgttggacagcttctggcctctggcctttcccagttcctgttccttagcgggtcagtctgttgagcaccagtttgtggtgtttctggccatttgattctacctgtagcattatcctgtttctactagctgtcaggaggttccaaagcctacttaaacttgtgtaggtgacatttaaatgagcaatatgccgttcatctgaaaatagtagcacacagccatatgtaggatgtcattttctaaggactgtttcttcacagtgagcagagcaggcatagtggtggttctttcatctgagtctttggttttttatatctgatttccagtatggacgttgagtagtgtaagaatggtgctgctcctgacaagtgtgtgttaactgtttacattttatatctgcagaatcctttctctgtaactgaattttcctaagtaaaatgtcatcaaggtctcattatttctgaaatgatgtctataatgcccaggcacctttggtattatctggaacaagagggatttcatgtaatgaactgggaaatgcatacttcatgagctgcaaggttgtaggaaggagcccggagccccttggagctcacaatcagcaggagtaagagcgggcacagcttggcagatttctgaaaggttgcttagcaggttcttttgttttggtttttggatttttcttcttttggttgctttttaaaaacatttagtgtacaattactttcaagtaagctattttaagtcttgttaatgtgcaatacttaagattaagatattacctttttaaacatagcaagtttatcaagatttctagcgtcccatcttttagtgattccttttctatatgtacaacatggtgcatttattttattagacaagtatgaatttgagactgttacgcctcttggttctagaaatacaaggttgaagtcaggattttagcagaaattggagcatgagtgtgttcttattttatattagttttgcatctaactggttttggttttgccgtgataaaatgtgtcactattgcacttaccagctgatatgctgtagttagttttctgtgtttgtgtttgattgctgagaagccatcttcttcattcagatttcgggtaagtaaggaatactagttgtttgattgtctcatctgttgtaattgccagctcccacttgccagcaatcatgtttcagttaaatttaaaaaaaaaaaaaacaacaagctctcaatgcttaatgtaagctgaaatacctaacagagtatacctaaaagcaaggtctgtttgttaaacatgtgcccaacacattaagatccactgtacacacacacacacacacacaaaacacaccactgtgtttaaatcttttaacataaatcctactggtacttttagagtcttaaagcatcttaagtatttttttaagaaattacaaataacatttctgtctatcagtacttattaagccaccctataatttgacttttcaattatatatacttatgatacccattgtcttactgtctaaaagttgtttagctgagaattagcattccacttcatggtttaggaaagagagccttattcttcctacatgtcttcctggttacaggtctcgtacccactaatacatagtgaccatctgtaagatgagcatgttgttgggattgctttgttatagagcatctcactctttaatgctatttgctagtggtttttactgtgtcatgccatgctgctgattgccaaatctcagaagagtgcacaccagaagcaaaggcccagtgtgttcacacctggctagtaagagaagcagtagtccccaccaatacagagaagctggttgtgtacaaagcttgcctgtcagccttatccctcagttctgagctcatctcactttgttaccctaagacgtggaggtagaaaagacacttgacaggataggatgagcagtaggcaagggaagctgtttcctgagttacaaaaagaacttggtttacattattggccagtttctgccgcacacatgaagacatcatcagtgttgcctcagcgctagcctgcacggcattttgagattgaaaaaaaaaaccaacaacatagtatattttcagaaatactgttgtagtttgtgagtgttgttcattagtcactcattagtgtagagtggatgcatgatgccccatgaccccagtaagtcttaccagtgagtagaatacccagcaccgtctctcacccgtagccctcttcagcattgcctcgtggcttgttgcattctagtgtgcatattctagtgtgcattgtgtttctactgatctcttgggtgtttcctgtgaaccacaggaggcacatttgtcctaatcgcacgaaagaaagatgaaagagataagggcattgaagcagaaatgtgtggtttggggtaagataggaaaattgtgtcctaattaatttcaaagtaactgctcttaggcaaattgcttttaaggggagtctagtaagcaactttctgggcacttctggtttagattctcttcattactgaaactcctgagaaatattacctgtggattagttttgcacaatgtcctattctcacaatgacttaaaattaaactaggtttttattgaactacctcacactgattttctatgctttcccaagtaagctgtagcccttactgtttgacctttactgagtgtaaattataaatgtgcgttgaatactttctagccactgttcacaaaataccagtaagcatgtgaagtgcaaaccttgcgtcagtaagagacagtcccgtgtagtcttccactgtgtctggggaattgtgctgcatacgcttattgacatcctcactgtttttgtaagaaacctgctcgagataccagtccatgctttacattttacagaaggagaaaatcttagtaaattttacgaagaaatacattacttttgtaggcccaatatttggtatatttttgagaagctgttaatcttatagcggaatgatgaagttacactgaagtagctgtctgcctggactgtgatgtctgttttctcattacggtttaccctgttaataaggttttaaacctcaaaacataggatgataattagattttttcctctttccctgtacatgtcattccttcatcccgccccttccgtgtgctctcctctcttctcctctagacaaaacaaatgggcactttgtagggaatgctgggatcgttaccgtgggttatcgttcatgccctagtcattcaacatgcaccactgggtgtaaacagtgttatctagtgtgtcaattggttataatattttaaataaaaaagaaaaagtggtatgaaa

SEQ ID NO: 44 - DNA, 9312 bp, Homo sapiens
ctccaaccattggtgtctgtgtcattactaatagagtcttgtaaacactcgttaatcacggaaggccgccggcctggggctccgcacgccagcctgtggcgggtcttccccgcctctgcagcctagtgggaaggaggtgggaggaaagaaggaagaaagggagggagggaggaggcaggccagagggagggaccgcctcggaggcagaagagccgcgaggagccagcggagcaccgcgggctggggcgcagccacccgccgctcctcgagtcccctcgcccctttcccttcgtgccccccggcagcctccagcgtcggtccccaggcagcatggtgaggtctgctcccggaccctcgccaccatgtacgtgagctacctcctggacaaggacgtgagcatgtaccctagctccgtgcgccactctggcggcctcaacctggcgccgcagaacttcgtcagccccccgcagtacccggactacggcggttaccacgtggcggccgcagctgcagcggcagcgaacttggacagcgcgcagtccccggggccatcctggccggcagcgtatggcgccccactccgggaggactggaatggctacgcgcccggaggcgccgcggccgccgccaacgccgtggctcacggcctcaacggtggctccccggccgcagccatgggctacagcagccccgcagactaccatccgcaccaccacccgcatcaccacccgcaccacccggccgccgcgccttcctgcgcttctgggctgctgcaaacgctcaaccccggccctcctgggcccgccgccaccgctgccgccgagcagctgtctcccggcggccagcggcggaacctgtgcgagtggatgcggaagccggcgcagcagtccctcggcagccaaggtaagcagaggctgcgccccttcggagggtgcttgggaaggcgcgggtcgagccagtggctgctgcgcgtcgcgcgtccagtgcgcacaggggcgtcccgggctgtctgggagctcggcgccaggaggggcacggcccggagacaaattcgggggcctctggcccgtcggggcttctctgacctactgagcctgggagtgaatattctgagtctcaacaccgtgttcaggcgtcctctttccaagagctcctcattcgcaaccccgggacaccttcgggaagctccggggaatgtcggcgtgagcactgctggacgccggcagaatcgcgtcctccggcacttgctgcggcatgcattccttgcgtggctcctggccgccgaggagagagggaggctcgaaccttcttgggctaggtctaggccatttatctccgctctctctttccccatctgagccatctaagaagagaagtgacctgggggggtcggaggatggctaggctgtgtgtgggaccgggtttggccactcgggccaattcaaggtacagcgagcaggcagaccagggagagctgctgtcgctgggaagaaggtgctagccccagctgctaaggcgacgggggcgcgccccgtctctgaacctctgacctgtgaaggggtcatttcaagcaaaagctggaaggctaggggcaagaagcctaggggcaggcgtctgcggagagagcagggagacggggaggaaaccctggtgggaattaagccgccgctccaggtaggggtcatttctcccaaagcttcctttcaagggtgtcagggatgtctgtgagtgtgtgtgtgcaactgaaaaagatcctaggtttgccggactgtggggctcattgactctgggtctgccccttctggtgttcgagtgtgcctagaggtggcaaggaagtgcggtggggagagtcctagttgagtgccccttttaaagtctttccccagccctcagcgcttccgcttttcttgcttcgctccttgatgccccaattgggcaggcacgctggttatgggcactttgcagaagtttatagccaattacaactgtataaatcaaagcgccctttgggggctgtctctgggcatcggtttctgcgtcactgtgcacatgctagggagagtcctggtgggaatgccgccgaccggggagaaggccacagatcagcctcgggtgagcctcagagctttggcttggtcccttctcctagaggaggcgcctttctcctagcaggggctcccagatcctggctcccaaagacccactttctacagcccctgtctggggcgcggttggcgggggtggcgcacgccctaaggaagacctttgcgtgtcccgggagagcggccgcggggtgagggccgggaagggggcgggagggaagccgccagagcccaggccgcggggtcagcagatgagaggccgctgtgaagtcctgcgccgaggtggcaaggccgcagtcggcgccgggtgcccttgtgatgttaatgtggggtggccgcagcccgcgggccggagccgggctcctctgcggagcgtcatctgtcaaggtgtgggggtggagggggggacgcggcctggcttgctttgatatacaccttcccagccctgccattgtctcttttagggcccggaaagagggtggtgactttcgcagtcaataatgaattctgacaagtccctctcatccctcccctccatagccccgctcctaggttcccagggggtgtggggcgcctccaaggcccttggggcatgggtcgaagagcgctcagggtctggtcatcgcgttgcccggcacgtccgggacactgaaggggcagcacccgagcaagggtcgctccgagacacttccaggcgagtctccctcccggggtgttcggctgagggaactgccctgcgcctcagctccggaggtgtcctctgtggctccagccaggctccggtgccaaccccgcctgatactatctgcgtgacccggtctgattctccatttcctcatctgtaaaaaggggcgagtaccaatggcagcctggagtgggtttgaggcggtcacgcgtgtccgagcgtccaccgcggagaaagtcgcgttagttccctttactttcatagcaggcgcggggtcggggccgcagccccattcaaatgcgcctgcagggtcgtgtttatgttaatgcgcctggcggggagggggatgaaagccggggccgccatttgctcagtagtggtaattcaaacagaatgtggttgttattaaggcattgaaagggcttttctttgataagatcgccttgtcctgcattgtttgcggctgtgttggcctttcagcggctcgggggagctccctctgatcaggcctgtatcttcccaggacgcttttgttgtggtttgcaaagggttttacctgaacaaagtcagcctgcggggcattaaacacctccaggcaactcccaggcccttcagatctttctgtgggattgggcactgggcgattgaacctgttcagctgcaagaagacccaaaagtgggacggagccagagagaacagcttctggccagggctctgccaagggctgagccaagacagacctggtggagacgccaggctcgggcctgctccaacattgtggacactatttgtcaaggcccttcagtaaaacaatcaatctgggatttaatatgttgactcaatccaatgagcatagatcactggtcaggataactctggccggatttgcagcaggaataaatggaggatcaaaaaagaaaaagtaccaaacgccaaacctggtctgggcaggtataaagtgtccccagcaggaggggttttctgcctgttccctcggccagagcccagctcagaattccacctgatgggcctggtgtgtctgggggatgattctggcgacttgtcagctcctgagccccgctttccacttgtagtaaagcaaagtagtaacccccacaccccctctacaacatgtgcccacaatgacagctgttttcggggtgggcttccatctctggtaggcctggaaatctggatgcttccaggatcccggccacttcaccctgccccctttcccttggtgtcaaatatatgccagtactgtatttggtttaccgaaagggtggttacattctgctgtcttctgtgtgaatgaggttttcactttccttaatttttaaaaaccacttaataccaaggttagtttagttgcctccactagcctcataccctccccccacaggaccctctggggggtcttgtcagacttggcaggaaccagccaaacccgggccccccagggtggtggaggaagagaaatgtccctgggttagggaggtttgtcattacccatgactgatgggctgccttgcagttctcagccctcacttctccttcctccacagtgaaaaccaggacgaaagacaaatatcgagtggtgtacacggaccaccagcggctggagctggagaaggagtttcactacagtcgctacatcaccatccggaggaaagccgagctagccgccacgctggggctctctgagaggcaggtggggaccgcctagctccctccgggcgggccactgcctggcagaggaccatgagagttagaaaatctggctgcaggggccatctaaatctgtggagagactgaagcaggaggatgcaagcattcgtctttggagtcctttttttttttttttttttttttaaacagagatggggtcttgctttgtggcccaggctggagtgtagtggcacaatcatagctcactgcagccctgacttcctgagctgaagggatcctcctgcctcagtcacctgagtagcttggactacaggctcgagccaccatgactggctaatgtttaaattttttgcagagatggtctcactgtcttacccaggttggtctcaaactccaaatgctcctcctgtcttggactcctaaagtgctgagattaccggtgtgaaccaccatgcctggcctggagtacatgcccccccacccgccaccgtcgaaacgcagtttcactcttgttgtgcaggctgaagtgcaatggcgcggtctcagctcactgcaacctctgcctcccgggttcaagcgattctcctgcttcagcctcccaaatagctgggactacaggcatgtgccaccacgcccggctaattttgtatttttagtagaaatgcggtttctccatgttagtcaggctagtctcgaactcctggcctcaggtgatccacccgcctcggcctcccaaagtgctgagattacaggtgtgagccactgtgcctggccctggagtacttttttaaaaagcctccttctacctttagtcctctttttttgatgttgttgattttttctgtctctctcttttgagggatataagaagtgtgaaaaacagccaagggtattagtttaatccagaattccatttgggtctataaagacatattaaagacctattctctttgtttccagcactgtacctaagaaaataaactgaataaagtactcagtctctcacaaaaactagagggacaagacttggttcatgaacattttatatatatagtctagaaaaacaggccaacttcacagccaggaagccacaaaattaaatctcattttcagctctaaggtgaggaaaattacgttttagtttagccttgaggggccaaaggttgccatttgaagtataccacccagcactggcctccctttgctgtgtagaaagggccttgcagtttcagttttccttggttctgagactttaaacttttgcagtaaatacgtagataaaagttgctttgaaaagaaactcagggagcaaggaaggaggaagactcttccccatgaggctgaattgggcctaagaatggatccagggttgggctgttatggggatgcccgaggaaagcttctagaaggacttggagttctgtagctggagcagaagatgttgatgatactgctgggtactgttcctcttttccctcacatcttcaccacaatgtgcttttctccacctttccatttctaggttaaaatctggtttcagaaccgcagagcaaaggagaggaaaatcaacaagaagaagttgcagcagcaacagcagcagcagccaccacagccgcctccgccgccaccacagcctccccagcctcagccaggtcctctgagaagtgtcccagagcccttgagtccggtgtcttccctgcaagcctcagtgcctggctctgtccctggggttctggggccaactgggggggtgctaaaccccaccgtcacccagtgacccaccgggttctgcagcggcagagcaattccaggctgagccatgaggagcgtggactctgctagactcctcaggagagacccctcccctcccacccacagccatagacctacagacctggctctcagaggaaaaatgggagccaggagtaagacaagtgggatttggggcctcaagaaatatactctcccagatttttactttttcccatctggctttttctgccactgaggagacagaaagcctccgctgggcttcattccggactggcagaagcattgcctggactgaccacaccaaccaggccttcatcctcctccccagctcttctcttcctagatctgcaggctgcacctctggctagagccgaggggagagagggactcaagggaaaggcaagcttgaggccaagatggctgctgcctgctcatggccctcggaggtccagctgggcctcctgcctccgggcaggcaaggtttacactgcggaagccaaaggcagctaagatagaaagctggactgaccaaagactgcagaacccccaggtggcctgcgtcttttttctcttcccttcccagaccaggaaaggcttggctggtgtatgcacagggtgtggtatgagggggtggttattggactccaggcctgaccagggggcccgaacagggacttgtttagagagcctgtcaccagagcttctctgggctgaatgtatgtcagtgctataaatgccagagccaacctggacttcctgtcattttcacaatcttggggctgatgaagaagggggtggggggagtttgtgttgttgttgctgctgtttgggttgttggtctgtgtaacatccaagccagagtttttaaagccttctggatccatggggggagaagtgatatggtgaagggaagtggggagtatttgaacacagttgaattttttctaaaaagaaaaagagataaatgagctttccagatttcagattctgtatttatcttcagattttgtctgcaactattttttattttttaaagaaatgaaatatcttctctgcttgcaagctgatttggaaaattcagagagggagtggagattatctggacagcctcattttaccccagagcatcagaagcctgaaagagcaggttctgagaccttccctgcccccaagcctgagcccagccttggaatgcgtggctctcctgggggtgcctttgggcaaaatgcacatctgaatggccaggtgcttcccagcagtcagaaattatggggggtgggggtgagagggccccctcatagcatctcaccaaatccacatggaggctttttgcaaacagcaggcagttcccttctgcagtgactccctcctaaggacgccccacaacccagctagttaaacgtgagcattaaattttttttaaaaaaaatccccctagtttcccaagacagcatttccatgaatttagtcttctgtaaatcactgggcatttccgtgagccctttctgcctccactctcttctctgtctttgcagtttccttatccccgaccgcgcccccccttccaacccaatcaccccacaaacaagatttctagacccagtataaaatgatccttttagtgacagtttcttgttatctggccgatccactggggaccgggctgcagcctttaaaatttttgatcctggaggccgccgagctgaactttccggcaggacccgggcgaggggggcttagcccttcgtttcgatcttcccaccaacatccgagagcctaatcagcgcgcccacggaggcgccttaagggcagttggggaagatgagcagagccgggaaacagcaagaggtatagaccctctgcagcacctctccaattccgcggcccttccgggtggcgtatacagctccaggattgggaaaggggctccggtggcccggcccgcgggcgcctggcctcgaagccagagggaggagtgcggggcgtggggtcggggggtgccgggcagaggaggaagccgtgtccgggtccgctgggcgaggggtcctgggtcaggggtcctgggtcagggccggtctgagccccggtgccccgcaggtctccccgcgccccggccgcgcccacaggcccgccccctagccgccggggttgctatgcgttgccgtgaaacgcctgtcaataaaccctgtttggacagtggagcaagagcacatgggttgtttgcttagtggttagaggttcaaaagtcgacattgtcccgctgcaagcgattacaagttcttccccttcccggggctcggtccccttgcacgcgggtacggggccagggaagggagctcggctgctctctgagatgcaagcacccggctcgctgctgcgagcgcctggcaagcctcccgggccacggaaaaaggcgcaaaaccaagaccctctccggcaagtgaggccaccgcgcttctaacgccaactgtgtcacccccgaagcaatacctacggaacaagggatgtggcacgagtagggagcgcagcttgaggagtgtagggaggcctgcacaggggcgcctgaggttgagaccggatgacctcgcggctcctgacgcctccagcgcagagcttggggtcccggcctccgaatcccacgcctccaccgcgtccagtcgccggttcaggcgccagagggcgcgcgcgctctgggaagagatggggcttgggctcgtgaacccggaaaggttccagttttcacccagttgggaggtgcaagcgcctctgccgactccggctgagcccaaacccgggcgctgcaagatttttctacgttggtcgtgggcctgttgaaactaagttaaaactaagtcaggcaggagagattcttgggtttgttgaatgtttaagaaaaacaaaattgggggagagggactataccattctaaaagggtcattttgcacacgatgttttctttctaaaaattacagtaatgtgggcacagtattaatatatggtaatactagaaatttaggataaatatgagaataaaacctgtcaatattgtggaacagaggtt

SEQ ID NO: 45 - DNA, 7615 bp, Macaca mulatta
ctccaaccattggtgtctgtgtcattactaatagagtcttgtaaacactcgttaatcacggaaggccgccggcctggggctccgcacgccagcctgtggcgggtcttccccgcctctgcagcctagtgggaaggaggtgggaggaaagaaggaagaaagagagggagggaggaggcaggccagagggagggaccgcctcggaggcagaagcgccgcgaggagccagcagagcaccgcaggctggggcgcagccacccgccgctcctcgagccccctcgcccctttcccttcgtgccccccggcagcctccagcgtccgttcccaggcagcatggtgaggtctgctcccgggccctcgccaccatgtacgtgagctacctcctggacaaggacgtgagcatgtaccctagctccgtacgccactctggcggcctcaacctggcgccgcagaacttcgtcagccccccgcaatacccggactacggcggttatcacgtggcggccgcggctgcagcggcagcgaacttggacagcgcgcagtccccagggccgtcttggccggcagcgtacggcgccccactccgggaggactggaatggctacgcgcctggaggcgccgcggccgccgccaacgccgtggctcacggcctcaacgggggctccccggccgccaccatgggctacagcagccccgctgactaccacccgcaccaccacgcgcatcaccacccgcaccacccggccgccgcgccttcctgcgcttctgggttgctgcaaacgctcaaccccggccctcctgggcccgccgccaccgctgctgccgagcagctgtcccccggcggccagcggcggaacctgtgcgagtggatgcggaagccgacgcagcagtccctcggcagccaaggtaagccgaggctgcgccctgcccgacactgcttgggaaggcgcgggccgagccactggctgctgcgcgtccgcccgtccgttacgcacaggggcgtcccgggctgtctgggagctccgcgccaggaaggacacggtccgggaacaaattcgggggcctctggaccctcggggcttctctgacctacagagcctgggaaggaatattatgagtctcacaacaccgtgttcaggcgtcctcttttcaatagctcctcattcgcaaccccgggacatcttcgggaagctctagggaatgtcggcgtgagcactgctggacgagggcagaatcgcgtgctcccccacttgctgccgcatgcattgcttgcgtggctcctggccgcggaggagagagggaggctcgaaccttcttgggctagatctaggccatttctttccgctctctctttccccatctgagccatctaataagagaattgacctggaggggggtggggggtgtcgggggacggctaggctgtgcgtgggacagtgtttggccattcaggccaattcaaggtagagcgagcagacagaccaggtagagctgctgtcgctgggaagaaggtgctggccccagctgctaaggcgacgggggcgcgccccgtctctgaacctctgacctgtgaaggggtcatttcaagcaaaagctggaggggtaggggcaagaaaccgaggggcagtcgtctgcggagagagcagggagacggggaggaaaccctggtggaaattaagccgctgctccaggtaggggtcattttcccacagcttcctttaaagggcgtcagggatgtctttgagtgtgtgtgtgcatctgaaaaagatcctaggtttgccgcactgtggggctcattgactccgggtctgccccttctggtgttcgagtgtgcctagaggtggcaaggaagtgcggtggggagagtcctagttgagtgccccctttatttcatcaagtctttccacagccctcagcgcttccgcttttcttgcttcgctccttgctgccccaattgggcaggcacgctggttatgggcacttggcagaagtttatagccaattacagctagtataaatcaaagcgccctttgggggctgcctctgggcatcggtttctgcatcactgtgcacatgctagggagagtcctggtgggaatgcggccgtccggggagaaggccacagatcagcctcgggtgggccccagagctttggtttggtcccttctccaagaggaggcgccttcctcctggcaggggctcccagatcctggctcccaaagacccactttctacagcgcatgtctggggagcggttggcggaggtcgcgcacgccctaaggaagacttttgcgtgtcccgggagagtggccgcggggtgagggcctggaagggggcgggagggaagccgccagagcccaggccgcgaggtcagcagatgtgaagtcctgcgccgaggtggcaaggccgcagtcggcgccgggtgcccttgtgatgttaatgtggggtggccgcagcccgctggccggagccaggctcctctgcggagcgtcatctgtcaaggggtggatgggggggacgcggcccggcctgctttgatatacaccttcccggccctgccattgtctcttttagggcccggaaagagggtggtgactttcgcagtcaataatgaattctgacaagtccctctcatcccacccctccacagccccgctcctaggttcccagggggtgtggggcgcgggccgaagagcgcacagggtctggtcatcgcgttgcccagcccgtctgggacactgaaggggcagcacccgagcaagggtcgctccaaggtacttccaggcgagtctccctcctggggtgttcggctgagggaactgccctgagccccagctccgggggtgtcctctgtggctccagtcaggctccggtgccaaccccgcctgatgttgtctgcgtgacctggtctgattctccatttcctcatctgtaaaaaggggcgagtaccaatggcctggagtgggtttgaggcggtcacgcgtgtccgagcgtccaccgcggagaaagtcgcgttagttccccttactttcatagcaggcgcggggtcgggccattcaaatgcgcctgcagggccgtgtttatgttaatacgcctggtggggagggggatgaaagccggggccgccatttgctcagtagtggtaattcaaacagaatgtggttgttattaaggcattgaaagggcttttctttgataagatcgccttgtcctgcattgtttgcggctgtgttcccctttcagcggctccggggagctccctctgatcaggcctgtatcttcccaggacgcttttgttgtggtttgcaaagagttttacctgaacaaagtcagcctgcgggacattaaacacctccaggcaactcccaggcccttcagatctttctgtgggactgggcactgggagattgaacctgttcagctgcaagaagacccaaaagtgggacggagccagagagaacagcttctggccagggctctgccaagggctgagccaagacagacctggtggagacgccaggctcgggcctgctccaacattgtggacactatttgtcaaggcccttcagtaaaacaatcaatctaggatttaatatgttgactcaatccaatgagcatagatcactggtcaggataactctggccaggtttgcagcaggaataaatggagggtcaaaaaagaaaaagtaccaaacgccaaacctggattgggcaggtataaagtgtccctagccggaggggtttgctgcctgttccctctgccagagcccagctcagaattccaccagatgggcctggtgtgtctgggggatgattccggcgacttgtcagctcctgtaccctgctttccacttgtagtaaagcaaagtagtaacccccacacctcctctacaacatgtgcccacaatgacagctgttttcggagtgggcttccatctctgttagacctggaaatctagatgtttccaggatcctggccacttcaccctgccccctttccgttggtgtcaaatatatgccagtactgtatttggtttactgaaagggtggttacattctgttatcttctgtgtgaattaggtttccacttttcttaatttttaaaaaccacttaatactaaggttagtttagttgcctccactagcctcacaccctccccccacaggaccctctggggggtcttgtcagacttggcaggaaccagccaaacccgggccccctggggtggtggaggaagagaaatgtccctgggttagggaggtttgtcattacccatgactgatgggctgccttgcagttctcagccctcacttctccttcctccacagtgaaaaccaggacgaaagacaaataccgagtggtgtacacggaccaccagcggctggagctggagaaggagtttcactacagccgctacatcaccatccggaggaaagccgagctggccgccacgctggggctctctgagaggcaggtggggaccgcctagctccctccgggcgggccactgcctgggagaggaccatgagagttagaaaatctggctgcaggggccatctaaatctgtggagagactgaagcaggaggatgcaagcattcgtctttggagcactttttttttttttttaaatagagatggggtcttgctttgtggcccagactggagtgtagtggtacaatcatagctgactgtagccctgacttcctgagctgaaggaatcctcctgcctcagtcacctaactagcttggactacaggctccagccaccatgactggctaatgtttaaattttttacagagatggtctcaccgtcttacccaggttggtctcaaactccaagtgatcctcctgtcttgacctcctaaagtactgagattacaggtgtgaaccaccatgcctggcctggagtactttttttttccccccaagatgtagttttgctcttgttgcccaggctgaagtgcaatggcgtgatctcggctcactgcaacctctgtctcccaggttcaagcaattctcctgcctcagcctcccaagtagctgggactacaggcatgcaccaccacacccggctaattttgtatttttagtagagatggggtttctccatgttggtcaggctagtctccaattcccggcctcaggcaatccacctgcctcagcctcccaacgtgctgagattacaggtgtgagccactgtgcctagccctggagtacttttttaaaggtccccttctaccttgagtcctctttttttgatgttgttgatttttttctttctctcttttgagggatatagaaagtgtgaaaaaaagccaggggtgttagtttaatccagaattccatttgggtctataaagacatattaaagacctattctctttgtttctagcactgtacctaagaaaataaactaaataaaatactcagtctctcataaaaactagagggacaagacttggttcatgaacattttatttatatcgtctagaaaaacaggccaacttcacagccaggaagccacacaattaaatctcattttcagctctaaggtgaggaaaattacattttagtttagccttgaggggtcaaaggttgccatttgaagtacaccacccagcactggcctccctttgctgtgtagacagggccttgcagtttctgttttccttggttctgagactttacacttgtccagtaaatgcgtagataaaagttgctttgaaagcaaacccagggagcaaggaaggaggaagactcttccccatgaggctgaattggacctgagaacggatccagggctgggctgttatggggacgcccaaagaaagcttctagaaggacttggagttctgtagttggagcggaagatgttgatgatactgctgggtactattcctcttttccctggcatcttcaccaccatgtgcttttctccacctttccatttctaggttaaaatttggtttcagaaccgcagagcaaaggaaaggaaaatcaacaagaagaagttgcagcagcaacagcagcagcagccgccgcagccgcctccgccgccaccacagcctccccagcctcagccaggtcctctgagaagtgtccaggagcccttgagtccggtgtcttccctgcaagcctcagtgcctggctctgtccctggggttctggggccaactgggggggtgctaaaccccactgtcacccagtgacccacaggagtctgcagcagcagagcaattccaggctgagccatgaggagcgtggactccgcaaaactcctcaggagagacccctcccctcccacccacagctgtagacctacaaacctagctctcagaggaaaaatgggagctgggagtaagacaagtgggatttggggcctcaagaaatatactctcccagattttttactttttcccggccggctctctctgccactgaggagacagagagccaccactgggcttcattcaggactggcagaagcattgcctggactgaccacaccaacgaggccttcagcctcctccccagctcttctcatcctagatctgcaggctgcacctctggctagagctgaggggagagagggacttaggggaacagcaagcttgagaccagcctgctcatggccctcggaggtccagctgggcctcctgcctccgggcaggcaaggtttacactgcagaagccaaaaaggcagctaagatagaaagttggactgaccaaagactgcagaacccccaggtggcctgtgtcttttttctcttcccttcccagaccaggaaaggcttggctggtgtatgcacagggtgtggtatgaggggtggttattggactccaggcctgaccagggggcccaaacagggacttgtttagagaacctgtcaccagagcttctctgggctgaatgtatgtcagtgctataaatgccagagccagcctggacttcctgtcattttcgcaatcttggggctgatgaagaagggggttggggggtttgtgttgttgttgctgctgtttgggttgttggtctgtgtaacatccaagccagagttttcaaagccttctggatccaggggggaagaagtgatatggtgaagggaagtggggagtatttgaacacagttgaattttttctaaaaagaaaaagagataaatgagctttccagatttcagattctgtatttatcttcagattttgtctgcaactattttttaaagaaatgaaatatcttctttgcttgcaagctgatttggaaaattcagagagggagtggagattatcaggacaggctcattttaccccagagcatcagaagcctgaaggagcaggttctgagaccttccctgcccccaagcctgagcccagcctaggaatgcatggctctcctgggggtgcctttgggcaaaatgcacatctgaatggccagctgcttcccagcagccagaaattatggggggtgggggtgagagggccccgtcatagcatctcaccaaatccacatggaggctttttgcaaacagcaggcagttcccttctgcagtgactccctcctaaggacaccccacaacccagctagttaaacgtgagcattaaattttttttaaaaaa

SEQ ID NO: 46 - DNA, 6350 bp, Mus musculus
tccgcgagccaacctgcggcgggtcatccccgcctctacagcttactggcaaggaggtgggaggaaagaaggaagagaggggaggaggcaggacggagggagggactgcccgggaggcagaagctctgcaaggagccgacggagcaccgtgggctgaggtgcagccagctacctttatctctagccccctgcgcctcgcgcctctggcagccttcaacgtttgtccccagacagcatggtgaggtctgctctgggtccctcgccaccatgtacgtgagctaccttctggacaaggacgtgagcatgtatcctagctccgtgcgccactccggcggcctgaacctggctccgcagaactttgtcagtcctccgcagtacccggactacggtggttaccacgtggcggccgcggcggctgctacggcgaacttggacagcgctcagtccccagggccatcctggcccaccgcgtacggcgcccctctccgcgaggactggaatggctacgcacccgggggcgctgcggcagccaacgcggtagcccacggtctcaatggtggctccccggccgccgctatgggctacagcagccccgccgaataccacgcgcaccatcacccgcatcatcacccgcaccatccggccgcctcgccgtcctgcgcctccggcttgctgcagacgctcaacctcggccccccggggcccgcagccaccgccgccgccgaacagctgtcccccagcggccagcggcgaaacctgtgcgagtggatgcggaagcccgcgcagcagtccctaggaagccaaggtaagcggtgccggggcgcgccccaggtcccgcgtgcgttggggctgtcgcgggctgtctgccagctcctagccaggacaggagaaggggcaaagggggaaatacaggtggattcatcccaggagtgtatatttgtgtctcgctcccccaggtttgtttagggcagtaccccattggcaacctcgggacgccttcggaagctcccggtagtgtcctaagcactgtcgcccgccgcgagctgaatcgtgcccttgagttggctgcctcccgcattccttacaccgttcctggccgagagggtcgggccgcttggattctctttgccgtgcctactcaacttagctacctgcttttcttcttccatctgaggtacccccccgaaagggccagggagtgtggaggctgcgccaggatcagtttggccattagggtctactgaaggggtcggtgctgctgcgagcacagacgccgcggtgcgcccctggagagaaggcggagccccccagaagcctcggaggaagtgggggaactccagggtccctgactcttccctctctctgccaagcaaagtctctcatagaaatcctctcttagcatcacagcggactcggcttcttaagaaggtttcttcctgacccttcccttctagaatctcgtgtgtctgagagtgttgtgtgttggattcgggagatttttcacgaaagacccgagattgccggtctgtgggactcacaagctctgtttgccctttctgatgtccggatgtgtataggagtgggaaggaagtgagcaaagtgtgacagggagtggtactaagagtccccccttttttgttgttccgtgaagccttctccagctctttgagcttccgcttctctggatttgctccttgttggcacagccaggccacatgcccgggttatggccactttgaggaggtttatagccaattacagccgtataaatcagagcggcacttgggggcctgtcgctggacacttctgcgtcactgcgcacaccccgtcaacatcttggtgggcaatgctgccggagtgaagtctccagattagcctccagtgggctttgacattgtcatttccaggaggacttactcctaaaccggttctccgcataaaccctactttcccaagcctgcctgaaaggtagtgagcggaggatcgccggtaggggtcttagccctccgaaagaacttttgcgttcagggggtgggtggtccgagactagggtcctgggagggggaggagaacctcaggagcccaggccgcggggtcagcagatgagaggtcgctgtgaagtcccgcgccgaggtggcaagaccgctgtcggcgccgggcgcccttgtgatgttaatgtagggaagctgtggcccgcagtgccggagcccgactcttctgcagagcgtcatctgtcaaggggcagaggcgtgtacgccgcccggccggctttgatgtacacctttcagccctgccattgtctcttttagggcccggaaagagggtggtgactttcgcagtcaataatgaattctgacaactccttctcatccctcccctcttccagcccccctccttggttcccagggggtgcggggcgcctgcaagcccttggggagcggaccgcagggctcacggaccatctttgcgttcctcagccagcgcgtggtgctctaagagcagcatccgttctagggcgaggaccgctgtgggaaattgttctgcgcctcgcttcccaggtctgatagttttctttagtactacaagctctttgctattcggtctgcacacttaagatttggttctgtcgtcttctgtggagtggggcactagcgagtgtgttacaggctccagtgagcccgctcccgaccggttggatccctttacttccaaagcaggcgcggggtcggggccgcagcgcccattcaaatgcgcctgcggggctgtgtttatgttaatgctcctggcggggaaggggatgaaagctgaggccgccatttgctcagtagtggtaattcaaacagaatgcggttgttattaaggcattgaaagcgcttttctttgataagatcgccttgtcttgcattgtttgcgactgtgttcccctttcagcggcggggggacctctctctgatccctcctgtatcttcccaggacacttttgtagtggtttgcaaaggtttttacctgaacaaagtcagcctgcggggccttaaacacccctgggcaactcccaccccttagatctccttgttcaactaggcactgagcactaaaatctatctgttttgatgtgagacctctccaactttggacgtggaacagttcctggccagcattctgtccattgaagcatccccgacttaaccgggttgaatagccagactcctgcctgatccagcagccccgcgctatttgtcaaggtccttcagtaaaacaatcaatccaagatttaatatgttgactcaatccaatgatcacaggtcacttggtcaggatagttgcctcgggggataaatgggaaattaaaaaagaaagaatgccccaggccaaacctagctgggcaggtgagacgcgttccaagtagaaggattttcctcctgacaacatggagatagcactcagaattccagggcaggactttgtgtgtggtactggtgactggtggggatctgccagcccatgcatccatctttccactatattgaaacaaaaggtaactacccgcttaccttgacgccacatcccaggtattttcaaagtggcctgctgtttcatttctaacaagtctgaaaatgtggatattgatattcctggggactctggtcactttcccaccgcccttttttctgatcctaaatatactatatttgatttatggaaaggaggggtgctgtgtgagaggtgttcctttcaggttagttgtgcctccaggcttacaccccccttccccaggatcctgtgagtggatattgtcaacctgggtagtagacacccccctccatcagtggatggagagaaatgactcctgggttagggaggtttgtcattaccaatgactgatggattgtagttcttagccaaaacttctccttcctccacagtgaaaaccaggacaaaagacaaataccgggtggtgtacacagaccatcagcggctggagctggagaaggagtttcactttagtcgatacatcaccatcaggaggaaaagtgagctggctgccacacttgggctctccgagaggcaggtgggaatcggctttcctgggtctggttattatggcctggggcaatcttaatgggtagcattagaaagtttggtcgagggagctgttgccttttgagaatccttgagtgtccagttgtttttgccgctctttcaatggatcagagagctgtaagggaaaagccaagtcgaggctacagggtggaactgcacttggacagagaaagagcgattggaaccatggttctcaacctgtgggtcgcgacccctcagcttgccactcaaacacgctgtgctttataatagcagcaaaattatagttatgaaatagcaattaaaataatttgtgattgggggtgtcaccacaacatgaagaactgtcctaaaaagaaaaacaaaggtccagtctacgcatacaaactaaagtctgctcatacaaattaaagaggcaggggctggagaggtgatgcttaagaacacacactcttgcagaggatcggagttctgtttccagcatccacgtcaggtggctcacagtgtcacagtgtcggctaactctgattgcaggggacacccagtgcctctggcttctgtggatatatatgaatgtatacagacatacacatatcaaagatttaaaaatccttgaactttttttttcattaacacaaaagaggccctacttgcacaccaacactttctgtagtctagggaaaagggaaggaacaaacaagagaaattcatagccaggaagttttggacaaagtttcattgtctgtgccaaggtgaagaacatcgcagtaccaatgagctgtgggagcccaagggtgacccacgaggcacactgagctggccaaccatttgtgtagggaatagctttcgtcatggttccgttccctggttctgaggttctgttgctagtaaagggttttttgtttgtttgttttttgttttttgaaagcaacttggggagggggcaggtaagtaaagaggacgaggctggcctggctttgggaacatttcccaaactcagtgaaagaaggacgctcccggggtggcgccatttctctgttcttatcttcttctaccttctattttgtcatctctaggttaaaatttggtttcagaaccgcagagccaaggagaggaaaatcaagaagaagcagcagcagcaacagcagcagcagcaacaacagcctccacagccgccgccacaaccttcccagcctcagccgggtgccctgcggagcgtgcccgagcccttgagtcctgtgacctccttgcaaggctcagtgcctggttctgtccctggggttctggggccagctggaggggttttaaactccactgtcacccagtgacccctcccgtggtctgaagcggcggcggcacagcaatcccaggctgagccatgaggagtatggacgctgcgagaatcctcagaagagattcctctcctcctacccacgaacagcatctactgatggagattgaggacagaagatgagtggaattatggacctcaggggaagacatggtttagattttttttttctttttaacttttcccattccgactcttcctgccagcaacgacaaacgaagtgattcctggggcttcttcgttcatgctctttgccaggactgactaccgacatgaagctatcagcctcttttgccccagctctttgcctctctgtatttctgtgtggagctgaggagagagtgagactggatggggtgggggtagcaatacttgagccaaggtggctgtttcctgctgactgctttctgagaaccagctggccgtcctgcctccgggccagggactattcaaactacaggagccagaggcagctaagatagctggactgaccgaagtctgcagaacctcccccaccaggtggtctgggctttcttctccacaaatcaggaaggggtggtgggttcaggggctgcggtgagagggggttggttagccaacgccaggcccctgcgacaagggcttgtttagaaagcctgtcaccagagctgctgtaggcggaatgtatgtctgtgttgtaaatgccagagccaacctggacttcctgtcccttccctcgtctttggctgaagaagaccggaattgtttgctgctgttcgagtcactgatctgtgtaacgagccaaacaagccttttaaaaagccttcttgatccatgggtagagaagttgtatggtgaagggaagtcgggagggggggaaggggatccgaacacagttgacttttattttgtaaaaagacaaagataaacgaactttaac

SEQ ID NO: 47 - DNA, 2471 bp, Homo sapiens
ggggacgaagggaagctccagcgtgtggccccggcgagtgcggataaaagccgccccgccgggctcgggcttcattctgagccgagcccggtgccaagcgcagctagctcagcaggcggcagcggcggcctgagcttcagggcagccagctccctcccggtctcgccttccctcgcggtcagcatgaaagccttcagtcccgtgaggtccgttaggaaaaacagcctgtcggaccacagcctgggcatctcccggagcaaaacccctgtggacgacccgatgagcctgctatacaacatgaacgactgctactccaagctcaaggagctggtgcccagcatcccccagaacaagaaggtgagcaagatggaaatcctgcagcacgtcatcgactacatcttggacctgcagatcgccctggactcgcatcccactattgtcagcctgcatcaccagagacccgggcagaaccaggcgtccaggacgccgctgaccaccctcaacacggatatcagcatcctgtccttgcaggtaagacctgctccggggtccccgccccgccgccgcacactcccgcggtcgtctgggctgtcactaggagatccgtagcccagacggtgactttcgtatgagctatttaactttattttcttcagaatctgctgtagattgagctgtgcgtgaaattgctagtaagttctgacatgttaatgcgtctgtctttaaatctgaattgttaccataaacgtgtttaatggaacttgctggtctgtggactacaaaaaaaaaaaaaaaaaaaaaaaaaccctttctacttaacattgtcttaacctcgtactctttatcctctttctttccaggcttctgaattcccttctgagttaatgtcaaatgacagcaaagcactgtgtggctgaataagcggtgagtgtttgcttgtgccacccgtgggtaaactgcccctcggtgtgtgtgcgcgcgcgcgcatgtgtttttgcttgtgtatctataaaatgtctgatttggtaaatgcatgcttacttcgcggtgttacccgtactacattgtctcactagacatgaaggagcttgtagctttgggtgctcgagatcacagaacattttcctttaaaaggaaatgatgccaataacttactacgaaggcggccgaggaacgtgtgtattggctttgtagcaaatgtaatgccctggatcttcctacgagtcctctggtactatgaggtactaacctccactgtaattaatcttaccgccacaaattccatagtgatcctccttccctaaaactatagtcctctgggattctctgggctagttgaggattgctaccctgtgccttcaaccctgtgatgtgggatcccagacttccctatctgttaactaaagggctgttttcaatcaaataattgttacgagaagcagactggcgcctgtagcactgctgttggagatccaaataggagattgggttgggaagtttttcccttgagtctctgctattttaatgtttaatttgcgctgtcgaggcgagtgtgtgtgttgcatctggacgccagggtttgcccaatctttgagtgtttggttaaatgttcaaactgtggcttcctcccggcgccagtcgcccgcctctgcccttaggttacattctcttaaacatgcctttctcccccactctttcgcaggtgttcatgatttcttttattctttgcacaacaacaacaacaacaaattcacggaatcttttaagtgctgaacttatttttcaaccatttcacaaggaggacaagttgaatggacctttttaaaaagaaaaaaaaaatggaaggaaaactaagaatgatcatcttcccagggtgttctcttacttggactgtgatattcgttatttatgaaaaagacttttaaatgccctttctgcagttggaaggttttctttatatactattcccaccatggggagcgaaaacgttaaaatcacaaggaattgcccaatctaagcagactttgccttttttcaaaggtggagcgtgaataccagaaggatccagtattcagtcacttaaatgaagtcttttggtcagaaattacctttttgacacaagcctactgaatgctgtgtatatatttatatataaatatatctatttgagtgaaaccttgtgaactctttaattagagttttcttgtatagtggcagagatgtctatttctgcattcaaaagtgtaatgatgtacttattcatgctaaactttttataaaagtttagttgtaaacttaacccttttatacaaaataaatcaagtgtgtttattgaatggtgattgcctgctttatttcagaggaccagtgctttgatttttattatgctatgttataactgaacccaaataaatacaagttcaaatttatgtagactgtataagattataataaaacatgtctgaagtcaa

SEQ ID NO: 48 - DNA, 2092 bp, Pan troglodytes
atcctgcagcacgtcatcgactacatcttggacctgcagatcgccctggactcgcatcccactattgtcagcctgcatcaccagagacccgggcagaaccaggcgtccaggacgccgctgaccaccctcaacacggatatcagcatcctgtccttgcaggtaagacctcctccggggtccccgccccgccgccgcacactcccgcggtcgtctgggctgtcactaggagatccgtagcccagatggtgactttcgcatgagctatttaactttattttcttcagaatctgctgtagattgagctgtgcgtgaaattgctagtaagttctgacatgttaatgcgtctgtctttaaatctgaattgttaccataaacgtgtttaacggaacttgctggtctgtggactacttcaaaaaaaaaaaaaaaaccctttctacttaacattgtcttaacctcgtactctttatcctctttctttccaggcttctgaattcccttctgagttaatgtcaaatgacagcaaagcactgtgtggctgaataagcggtgagtgtttgcttgtgccacccgtgggtaaactgcccctcggtgtgtgtgcgcgcgcgcgcatgtgtttttgcttgtgtatctataaaatgtctgatttggtaaatgcatgcttacttcgcggtgttacccgtactacattgtctcactagacatgaaggagcttgttgctttgggtgctcgagatcacagaacattttcctttaaaaggaaatgatgccaataacttactacgaaggcggccgaggaacgtgtgtattggctttgtagcaaatgtaatgccctggctcttcctacgagtcctctggtactatgaggtactaacctccactgtaattaatcttatcgccacaaattccatagtgatcctccttccctaaaactatagtcctctgggattctctgggctagttgaggattgctaccctgtgccttcaaccctgtgatgtgggatcccagacttccctatctgttaactaaagggctgttttcaatcaaataattgttacaagaagcagactggcgcctgtagcactgctgttggagatccaaataggagattgggttgggaagtttttcccttgagtctcagctattttaatgtttaatttgcgctgtcgaggcgagtgtgtgtgttgcatctggacgccagggtttgcccaatctttgagtgtttggttaaatgttcaaactgtggcttcctcccggcgccagtcgcccgcctctgcccttaggttacattctcttaaacatgcctttctcccccactcttttgcaggtgttcatgatttcttttattctttgcacaacaacaacaacaacaaattcacggaatcttttaagtgctgaacttatttttcaaccatttcacaaggaggacaagttgaatggacctttttaaaaagaaaaaaaaaatggaaggaaaactaagaatgatcatcttcccagggtgttctcttacttggactgtgatattcgttatttatgaaaaagacttttaaatgccctttctgcagttggaaggttttctttatatactattcccaccatggggagcgaaaacgttaaaatcacaaggaattgcccaatctaagcagactttgccttttttcaaaggtggagcgtgaataccagaaggatccagtattcagtcacttaaatgaagtcttttggtcagaaattacctttttgacacaagcctactgaatgctgtgtatatatttatatataaatatatctatttgagtgaaaccttgtgaactctttaattagagttttcttgtatagtggcagagatgtctatttctgcattcaaaagtgtaatgatgtacttattcatgctaaactttttataaaagtttagttgtaaattaacccttttatacaaaataaatcaagtgtgtttattgaatggtgattgcctgctttatttcagaggaccagtgctttgatttttattatgctatgttataactgaacccaaataaatacaagttcaaatttatgtagactgtataagattataataaaacatgtctgaagtcaa

SEQ ID NO: 49 - DNA, 2294 bp, Mus musculus
tcattctgaaccgagcctggtgccgcgcagtcagctcagccccctgtggcggctccctcccggtcttcctcctacgagcagcatgaaagccttcagtccggtgaggtccgttaggaaaaacagcctgtcggaccacagcttgggcatctcccggagcaaaaccccggtggacgacccgatgagtctgctctacaacatgaacgactgctactccaagctcaaggaactggtgcccagcatcccccagaacaagaaggtgaccaagatggaaatcctgcagcacgtcatcgattacatcttggacctgcagatcgccctggactcgcatcccactatcgtcagcctgcatcaccagagacctggacagaaccaggcgtccaggacgccgctgaccaccctgaacacggacatcagcatcctgtccttgcaggtgagactagcttgcaagtacgccactgcccagacgctccgggtctcccgagctgtcactcttaaagcccatcgtagagacaggttcattaactttatttttgaggaaactgtatattgagcgtcatgtgaaatcgctacttataagttctgtgtgggttgcatctggatctgcgctgtagcatgatcctgtttcatgggacttgttggcacttttgtgaaaggaggaggggggctaccttcctttaagattacctaatatcctgccttttatcctctttctccccaggcatctgaattcccttctgagcttatgtcgaatgatagcaaagtactctgtggctaaataaatggtgagtgttgcgggtgcctcctgtgtgcgcgtttcggtaatgtgcttgtgtgtctgttaaatgtttggtttggtaaatgcatgcttacttcactgtgttacgggtgccgcttgacttaccacataggcatgaaggggcttgtagctgtggttgctcaggactacagaacagttgcctttacaaaaacagaaaagaaagaaaaaaaagaaagaaaagaaatgccagtaacttactatgaaggtgtcaggaccaagtgtggctgacttttatgagcccagtggcggtacactgaggtggtaacctcagctgtaattaatcttatcgccacaaattccatagtgattctcttttcccaaaactgtagtcctctgagatttctctggctagctgaagacggctaccccgagccttacccctgtgctctgggatccagatttccatatctgttaactaaagggctgttttcaatcaaataattgttacaagaagcagactggcgcctgtgagcgggctgttagagatccaaataggagactgggtttgggaagttttcccctggagtctccgctattttcatgtttaatttgtgctgctggggccgggtatgtgtgccgcatctggacgccagggtttggttaaatgctcaaactgtggcttcctcggcgccaggctcgcccgcctctgcccttaggttacattctcctaaactgcctttctctcccaatcttttgcaggcatttggggacttttttttttctttttactttctctttttcttttgcacaagaagaagtctacaagatcttttaagacttttgttatcagccatttcaccaggagaacacgttgaatggacctttttaaaaagaaagcggaaggaaaactaaggatgatcgtcttgcccaggtgtcgttctccggcctggactgtgataccgttatttatgagagactttcagtgccctttctacagttggaaggttttctttatatactattcccaccatggggagcgaaaacgttaaaaaaaaaagaaaaaaatcacaaggaattgcccaatgtaagcagactttgccttttcacaaaggtggagcgtgaataccagaaggacccagtattcggttacttaaatgaagtcttcggtcagaaatggcctttttgacacgagcctactgaatgctgtgtatatatttatatataaatatatatatattgagtgaaccttgtggactctttaattagagttttcttgtatagtggcagaaataacctatttctgcattaaaatgtaatgacgtacttatgctaaactttttataaaagtttagttgtaaacttaacccttttatacaaaataaatcaagtgtgtttattgaatgttgattgcttgctttatttcagacaaccagtgctttgattttttttatgctatgttataactgaacccaaataaataccagttcaaatttatgtagactgtattaagattataataaaatgtgtctgacatcaa

SEQ ID NO: 50 - DNA, 130541 bp, Homo sapiens
gatataactccacacccccaaattcaagcatgtaagaagacagcaggtccgcagagaggtgtggtcagggacatttcccctggccgggagcccatggagcactgtcctcagagatgcgcaggttaggctcactgtctaggccaggcccaccttagtcactgtggactggcaatggaagctcttcctggacacacctgccctagccctcaccctggggtggaagagaaatgagcttggcttgcaactcagaccattccacggaggcatcctccccttcctgggctggtggtaagaagtggctacatactgtgggtgtttctgaaggtatcattcccacctggaagcttggcttcaggaaaatggggatgggtgagggacagggatggcataaacaaacagttagcattcctacactcactggatttagagagcatgtggcagattctccaaaaatgcctgttgggtcttgtcttttagtgaggaagccgtcaagtcctctactctcctggggaccaagctggctccaccagcttctgctaagttgcctggcttgaaaggtggaggaagtatcctcctattgttggtcctaggggagcatatggcagggaggggatttgaggacctaagagacactgcttgctgctgcctcatttgtgcaaaaatggctggtgtctggggaggctgcctcaagagagggaagatactaccaagactggattccattaagagtggagattttcacccgacctctggcaagagttgctgtgctgggttagactgcatatatcatgacgagactgctctagtgacccttgagatctgggccttggagtaggatggcataccctgaggacttaggcaggctggggtgggaaagggcgggtggttagtgggaacctgtgtttgtctagatctctgacatactcagtgctttttgtacccagggaaatagaggcatgggggacagagtgggctaggctgtgtgtgaaaatttttcctaattatctgccacctggagcattgcttactgtaggacagcagcctatgacatcggcatccacaaaccagtgcttcctttttccctcccaggaaacccactgggggaagggtgaggacacagaagcctgtgtcccctctgtccaccaggtaaagagtgtgtggagcgtgttgtattggacagttcttgtttgtcatcatttttcttagggaagagctcaaactcagggagggagggagtaggaaaagcagagtggcgggtcatggtggctcatgcctataattccagcactttgggaggccaactcaggcagatcacaagaggcaaggagttctagaccagcctgggcaacatggtgaaactccatctctactaaaaatacaaaaactagccaggtgtgctggtgggtgcctgtagtcccacctactcgggaggctgaggtgagaggatggcttgagcccaggaaacagaggttgcaatgagctgagatcatgccactgcactctagcctgggcgacagagctggaccctgtctcaaaaagaaagaaaagaaaagaaaaacttgtcttttaagatttaggaattgaataagtagaaattcagtgaccacagatggaatgctttgccagatattctctgtgtgaccttgggtaggtcacttcaccacatagagaaatttacaaatttcctttgtcaaatctgatgatggttctaaatggttctctgagtccctcctagccataaggtgctgtgaatgtaatgaatatcaatttaaaggcatttgtcacaaaaacaacgtgagctgctgtcatcttacatcctccacatttactgcatctaatagcttttgtccactttccttttggctgacttgcctacctgggggtactagtactggggtggagggtagtgaaggggtggcttagagctcttgctgagcatggattacaaacagcccctcctctaggtgagcagtaaaataaatcatgatttgttgactgcattttaggactgaagaaagccaagaaccctgcccaccccactccacccctgtacagcctctgttttctggagaagagatgactttggcaaggtcacatggaggagtcaggacccgatcccagagtcctttactgtcccatactgctgcctctccagccagaggcatggagcctaaccctggctttgggaaggaatccatcctccgtgagttggctgagggcagaatgggaaaaatgtgggccccatgcacagtgtgggacctaggcaagtttgtctggagaatcacaggaggagcctgggcctgccaagttggatcatgccactagggtgtcccggcggctggccctcatctctcctcttgcagagtcagaaaggaaatgagaaagaacttggccccagggctgtgtgagaggaggctcaggcagaggaaggctgagaaggcctaggtctctaggagttcattcctgcctggaggacaatcagctagtgcccagagataaggctctggttcaccttcatgcctgaaccttagaggcagagaataatagtaggcaagcattagcctagtgttctaaccaatgcagaccccactttctcctcatttgctcccagtggctttgaatccattgctctgggctgtgatgtggtctttcttttcagaccatgaagaggaccttatttctaccaagtgtgtcttgtttccagttaaaaacggtgcacccacacagagtaaggagtcaaggggccccagacaacccatcactgcctcaccttcttcctgggcagcggcctgtcactcagcaggctgtggcaccccactccaaactcctacaggttaaccattcattcagcaaaatcttcatcaagcaactgttatgtatcaggcaactttagatgctagagattctctggtgaacaaaaagagacatggtccctactcccatggagcttacagtctagtgagggaagggtggaggagggaattatcactcatgccagtacacagacaattgcaaactgtgataaactacccaaagcaaaggaaccacagaagattctggcactatatggaaggtggggccttctaggtggcagatgtaaagactggggcccagagggaaagcagcaggggctgtggagaggaacagagggacctgcaggaagctgtcataggatgccttccttggaggccaaggactggggcctttttcctaattgcaacaacgggacattggatgtgcattttacaaatcgctccctggctgctgtgtgcctggagaatggatttcagcagggcagaaaggatgccgaaaaaccagtcactgaggtcctggtgagagatgatggtcatatagaagccaggctcaagggaagcatccctgcacccctctttctgtctctgatgaagtacctatgtgatttttaaaaatcgggggctgctggggggctactgacagaggagacatcttcatccatctctctgtgagatgccttcctgagccttgcgcccagagaatcccacttgttcctccacttcagcacatatgaaaaatctcagctctgtttcccaacctgcacgagcacatttatccaagtcaaaaatcatctgcgatccttctgcccactctcccagcccctgcccaggcggctggcccctcctggggtttctcacaaccctccctgcctttattcctgaagtgcttgaacattgcctgcagttacactccatttagacattattttgatgataaaattatgtcttcccccctactgctcattgtcttctgcagaatataggagaataaggtggtggtgtctcctgagggcttttccccccttttaaataattctatacctacccccctccccacactcatttgaatcatcaaattgattattatccctgtggctggtgcatctcaaaagatgaaaaacccagaagcagggctggggcatgacttacagctcattttggtacagtggcatcccataatattcgggttcactgagggagcagcggacggggatgcaggtgcgtttgtagctggggattcaggtgtgtatttcaaagtgtgtacttgtgccttggagtggatgtggcgggtaagttgatcattttcaccacgattgtattttcctaagcagacaggaatttatttgctcatgtctgtgtcctgggtacatttcagagagctgccaatgactagagcatcacttcatacattgagagaacgttttatagatgcgcaccctgcatctagccatatgagagtggtgcagaactgactggcccaggtgatgagaactgggaagggaatctgtttctctcctgccttcttgctgtgcctcacctgctggcctgaccctttgcacttttgcgcacacagcgcagggtttgaggctgcctcttctctttggtgcgtgggtggagaaatgtgactcatttttaatttggaaaacagatccattccagaaaggctgagaggtgagtttgctagacctgccagttaaaagatgggataggggtggcccggggggtatgtaagcaataaatctccccccaccccagacccacctggcggttggacattcccccccacccccctttaactgcgagaaggcaggccttagggctctaacacccagtactcctactgctcaggaggtggggacctcgcgcgctgagcgtctcattccatgaagtctctctgtctcaccccctccccccaccccagcttgattctgtcactttaagtccagcccctgagagatagccaataggagccaaactatacatcagtctcccagccttaaagctacagtagggttagtgggctccaagtctcttgtgccccagcctcctccacggcttcgcatcccctctgcccgctctctccggagcgtgcggatgagtggagagctgggctgtgcgcgcacggctctctgcctccctctcccccgccgcggccgcctcctcccactctgcgttctcgcgctcactgtgccctgcccgggctcgcaccttgcccgtgcccttcactcgctcttccgcgtgatttccccgccgtctttctctaccaactgggaatgctaaaacgggactgatggacgtgtccgaactctgcatcccggaccccctcggctaccacaaccagtaggtgccctgcttctcggtctgtctgtccttctgcccgtctggcagtctctgtcctggggatcgcagttccttttctgcacattcttgtgtaaaagtggaagggacttcgggggggcacttgggggacgaaggaggggaaaagccgcacacttctgggtttctttctagggcataaaccctcctctaactttttcccgcacccccttttacaaatccacactttcaggcaagagtggcgctttctcatgcactttctccctttctctctcctctctgatcttgctccggggtgagaaaatatttgagtttttgtggaatggagcaagaagggaggcagaagcccagaacaggtgcagggatgtggttgcaaggatgtcctgtcccgtcagagaaagcctttcccgcgggcgctttgttttattatttccatcctggggaccaaaaatgatcccggcaagagagagaaaatcgaacgtgccgcggcggtttggaaactgcaggcggccagtgccgctctcgcctcgcggtctccgtggggcgccccgagggtgcgcacgtggcgcggcggatccagggcgcccgggggatgcgggcccagcgctgcgtcgtaggcaaagttcgttctcggctttgggggaggctgtgaccagcggaacagaagggcaccatttccctgctccgaggcggctttgcgctcgcggtgccagaacctggggttatccgagcggcgtgggcgcgggcggcagccggcgccgcgagaagcgactctcagaaaccgcgggtctccagccccggggcagcgcgccaagagcgcagagtgggaaagtgaactgatcgcctaagcagcgggtggtcaacccgcgtgtcatgtccgggctctcggggatcccactctatccacctacggtttccctcccgacaccctccacggtcgccgctccacctgctcgggtacctgcccgggtctccccttgggcgctgcgcaccccacggcgcccccggcgggtgtcccggaggcaggttgtgtgcgcgtgcaaagtggtccctcggaaggcttaataataataatacataaaactctaggttcttacggacagctttcctgcttaactttgtgctcgtcttcctcttttttttctgacgcaaactaaattctccaagtcagcgtttctccagttccaccgtgctttcatttgtgtaccactcgctctccccctccccccaagaaccacgactacatctctaaaataaatactctggatcatgtggggtcccaggaagtacctaacccctctcctggctgcatggagcacctccaccacggtgcaccccgcttgagagagagggcagctgtccacagcatggcttgtgttgttgaccagactgttcctgcttctagtttggggattttccccactccaccctggggcagagggccttttagatgccaccagaatgtcggcagaaggcgctggtctgggagaggaatccttaataataatggattccgatttccatcagcttgaaaagtggctttcattccttttaaaggttagattctagctggggtggggatggggtgggagcacctgaggttagtgaggctgtggacagtatttggtgcttgtggagcatttccttacataaaatgatcaagtatgacaaatattggatatttaaattattaaggctccctctctccagaggtgacttctttagttgagcacgaaatacttatgtatttgtccctggctcaagtcatagtcaataaatatgaaaattcgtatgaaggaagtacattctttgattatgcttaccaggaaagcaaggagtgagatggaggctttaacagctgggtaattcatcgagttgacggcagccctgactggagtttgaggagaaatatgggcaaaaaggcaatgtcagggaagcagcagaaggaagtcagggagctgaggtcctgggggtctgggaaaggtttgagatagaaatcatttataaactaagcctgacagaggtttagatccccaaccctttccggtttttttttgcaaagaattagcttgtccctccatggggcacaggaaaagccaaaaatatacctgctgtctccaccgaggaattgagcacccctgtcagatgtcatttctcaaagcccaggacccactgggcagcagcccaggcattgatgagctggcctcttatacatatatgtgccgcctagggagggtctgcatgtgctgtggcgcagaggggcatcatttcaaggacgagcttgtggaggtctggggctggtgtctggggagacatctttctgacctctaccccatggctttgtgacacagctttagagccatgggtagtaaagtaacagagcaggggactggattctttggtttggtagaaggatagtaggacaaagccattcattatagtgccggcatttcccagggaacatacagtaagtgggttcgtgtatgctctgctcactgttttgacccctgtggattggctgacattcccagacttgagaaaacccaagggcacagggactagagttgagggaggaggaactctctggtcctcccttttgcttctaacacatagagagcatttgttaatgctgtagaatcattctcactttcccaggtgagaaatgaacacacacagagagaaacatacgtaccttcctaccttgctctccttcattttcattttcctgtagccaatcctgtaggtgactccattacccattctaatcaatattttatgtacatatataatcacccagagtgggaggcagcgtgctcgcctgtgtgtgcctgtgtacaaatgggtccatgactggaccagctggagacccacggcaaacagtccagagagcaaggggggctatcttccccaccgtccgatgaccactttgctgttgttaaagaaacaaagaacaaattgtcctgaaggtaaaatatgtgggttcacacgtaggaaaaatgccacatggtaattcagagtcagtgacccggagaaaaacaaagggggaaattaatttttaatggtacatttaaaaataaatcagagtgaggacatcagtctcggttttccaagggaggggctctaggaaataaacctttatgtgcctgtcagccttctggaggtgtgcgctgccatggaagaggatgggtgataggaggtgggaggtgttcaggcctgaaggcgatgaactgggaggagacattaggtcaacgctggagggccccggtcccgggtaaggccctttccagctcagtgagatcctgacatcactggaaatttcctcttggagtttgttacttcccccaacccttttcattttagaaacaatcctttattttgctgataatgaggacatatgaaaaagatctgttccaaaaaaaaaaaaaaaaagcacagagaaacaacctggccacaaaacaggaatctttttattctattgatttggagtaatcaataaatattccatttagtctgggagaggaggggcagaggggactttcggggaaagcacttcaaaggaggtggcggtgacagagatttcatgtcacaccctgccttctcagagcacccctggccctagctcgggggcccttataactttgtcctgcgtgtgctccattcatattcctgataactggacattttgccaagtggtttttaaagataatctaaactcattgagaaagtttgtccccttcctcagccctctgctgaatgccttgtttcttttgagcaaagatctgcctacttctgatgggccggaggaaggatgcgtgtgacagagagacattgagggagcatgtacattggggagggcggtggagttggccatgaatgcataggattcagaaggagacagaattcgaagacagtagacaagcaagaaacaggatgcttttggcctgactctgcagcgcccttctctagaacttgtctccccaagtcctttaagcgacttcttaaaaatgattaaaattctttttggttccaaatttaagggaagagatagcagatatttagaccataatgtcctccttcaaagtaaagcccacaccacaccttgactgcctccattctggtgttccccaacacctaccggccatcatcgagtctctgtccatttctttctgaagtgagaccctcgtaatgctcttcctgctgagcaggagctctgcccagaattagcgaggatgccgcacagctcccctgggagcttctgtcgtagagtctggtggctcttgactgaatgttactggggtggggagccccagcttgacttgaatgttcaacctctggggtcctccagtgacactacagcccctagaggtgctgccagtgcagggtctaaggaaggaccccaggaagccaggagagtacaaattaagaatgggctggaactagccaaatctggcccggaatcttcctgaacatcctgcctgtttgcccttgaaggctttcaccgatttctagagataaatcaaagacgtttttagcatgtatgcactggtgacccctgattggtctctgtctctggtgagtttccccttcctcagccccagcagccttagacctctggggacagtcacagacatggtcttccctcagaggagaggcccataggctttgggtggccctgatgtcccctgtcccctggcatgggtggggtgggattatatccttttagccccgtcagctggtatggcttcgtccctgcgcggggaggttgtggtgtttataattgcaaatgtaattagcagaccagctctgggggactgggaggctcaacttctctgcacttcacggtgacccctgtaatggctggcccggcagattaaccctcaccgggccagcctgcctcctgccactggtgaggctgctgaccttctctaataatggcagggctgtcctgggaccagacaccttccgtggaggggttgtcagggcaatgactgggagagatccgtagttgggaggattttttcttccccagggcactgggctagtgacctttgcctcttgagacactgtcaccctgggcagcaggctgtgctgggccatttcttctctcgtgttcctggccatactggaaggatgtgacggaaggactgtgagtgcatgctggtcagttctgtggctctaaagggactcattgtgacttccatctggtgctcctgggctcagcgggcagtagcttgtattcacccatctcatcagcttcttctcagagccagctttggggaggtgactgttcgctggctcctggactctgagcaggtgttccacagagctggactgctttgggtagggagcctggtcataggagagcacaggctcaatttgtttctgagaacagagacctcaccagttaaccatccaacaaaaggacacaaaaacaccagacaagtggggaacatggagctgcacggtcttttccctccctcctatgagtgtacttgtatttgcctctctaaggtgcccttctgtactgatcaggattaatatcatcaagggtcctaacaggacctttctttataagtcattgcttaacagagtgtcaagcccttctgtgctgccaataaagcccctgttgtagaggatgtttctgaacctcgaaacatcaaaagccgtgtccaccccaagagagtttccaccgtgggaaacctgtgtgtgcacatgtgtgaatgtgttccggtgggtagtcccctttaagatggggtgacagtggacaggggtctctgctatttaaacatgttcctgctgactgctataccccttggctgggctgaggtctggctgtgaccacattccagcaggggctgccgtgccttgggattggttcgtccatggtgcaaaggggactgcaggggcacctgctaggtggctgtccctctggtttgcccagaggatttcagtcttaagagcctctctgcaattttctggcctgggtaggggtggggcagaccccagagagggagagaaggaagtcctgcccttctccaggataacagatggccacactcagaggagaatttgggccattctgttccaggttcccgacttccccttctctccctggaaatagccattgacaggttgtggcttaaagagtcaactcttttcttaaatcaaggaaaatcatactggttaatcagcccatgggatgttcactatggagttggactaggtggaaaaaaattattggccaaatgttttaaattcagaattgtctgagtttgagttaaaattgtataaatctaaaacaaaagttttcctggggctcagagatagaattttttcatttcattttgctgtgcttttaaacctatacacattttggtctgaaagtttcttttttaaaaaaaaaatgtctttcctttgttccttaggactttaaaatactctattcaatattgtcattcagcatccccgggactgaaccttttcagggaatggttttctggaaaattttattatatttctcaatgtcatttcattcagaggtcagaaggcagttaaacaaactccaacaagcctttgtttttatcttctgatttcaaatgtgatcaatttttatttaaaatcgtatcagagacctctcctaccaattataggggcagtcagccttgtgcctgaccattggtgtttaccaaaatcctgcatttaaaactgtacgaatgtgaagtgtcaaattgaattcaatcttttctatcaaggaaacgatgagtttaaaaaccccaaataccaaatgtggttttaacttggttcttttatttttaatggcttgaattggcttgagttcataaattagtttttatgttttattctttttgttaattcattttgaaatttttattggttttttttttggcattttcatctggcttatgctttaaaaatgatgcctgataaagggtctttgagaatcattggccttttgatgtgttcttggtttctgaagggcaaagaacaaggaaatacaggtgtaaggaaatgctataggagaggatggaaggggtgaagaagcgtgatcttttagatgagatttctctcgtgttttacaatttagcattttcctttgtcttcattttttcccctctatttttattccagcttgctgtagtttgcccttgtccttttgtccctccttgactgttttggaggaaggagtgtaggtgtgtggtctgcctgagtgtgagtgtgtgtgtgtctgtatggctggctgagctgttcagaggtgctgagcatgattagttgggtaaagtcccaaagcagaatgcctataattggcccccctgttctgattcagccatcaatacctttattcatggccgctggctggctcacgttttggtgaaaaaaacaagaagggtgtagacctgctgtttacagacaaatttcaggtggtctgtttgttatctgaggcgcgtggtgataggggctgcaggtatgggtgaggatatgaagaagcactaaactttatgcaaaaccaatttttaaatccctcccctcatctcaccgcctatgcttggaaccctagtttgggatcttggtgatgcacagtaaatgagctgttgtatgcttttgtttttgtcttcctaatcgatcagcagaaaacatttccttttgatggtgaaacaggacttcagcatgcagagcgcagtatttatcctcttacttttagcttcactctttgtcatttgtctcttgggtttgttgacattgtctacctaagcagtcaagctaacaagctttggcagaaagaacactgcttttacagaaatagtagcaattttaatgtgatggttataataattgtgattacagtaatcacagcttgtacctttttcttcccaaaaagcgcaaagcaattctcgtaaccatttttctcatagtagctggatgagggtgaccgtttcttgctcccaaacataaatatcttcgtgcaaacataaacatgcaaaggctgcaggtttgcgtgtctgaattcacccaggagcaaaaactgcctggtctctgaatacgaacaggcaggtagaggagaatacggtgttaaccacctggcccccctgagaaaagctgggtgctttgcctttgaacgaagatgggagaagtgtttcttgtaagtgatgctgtgccaagtttgaccccactactgccggcttctatgccccgtgccatgctctgcctcccagtttccccttgctccttggttcctctggctgcattctcatgacaggtttgcagaccaaaggcacagagaggacaagggggggttatgacttggcgcatgtgaatatctgggagaagaactgtgtgaagagagaggcaaagtcatctctccacccttgatcgccttcttggccatttggcttctatgaggccgttgtccctgctcctgagtacctcaacctgcactatggaggtgattagagggaggtcatcagggaactgacctctctgaatttccatgtcccttcttgtgatgcttcatggcgactcccagacctgaagcctgctcacctacagaccatgctcatctgtgcgttactttagaatccatcaatgcttctgttatttcctctctcatttccttttttgtatatgtatcgtggaacgaagaagcagctctgcttcacctaatattccagggtcccatagctgtctgtattttttttccatctcaatattcttattcatgttcttactcatagtttcttttcctcaggaaaaaaaaaaaaaaacaaccaaacctcaaagctttggattattaattgattattaactgattttacaaacaaatcattccacccccaaggaatgcaagcaagactctggctgtgctgcttaggttgagatctgctttccccctcaatcggtgagaaattttatatcttcaattcccttgttggaccctgagtaaaaaattaattcatgaataataaaaaccaatcagtcttgttgagtttaagaaggattaggagaaagggtgttttttcttacagagaacatttggaatctgtgtgtcactgtcaccgagtgtttgggggtggcttgagcgatgcctttattcatggcaaatgagctgttgattatcctgagtataacacatcttcctcagttgttaaggccagcttactgctgactgttacggggttcctacccactgctctcccaccatcccgtactccaagccagtgataattcactgaaattaagacagtttcctgtgtaagtggcatataaccaaatagcaactgacctggcctttgcattatgaataagcccatttgttgatgggatggagtccttcttggtttccctcccctttctttctcaggaagtaattgaccagaaatttacatgcttttcccagaactacagaaattagatgtgtagattctcttttcagtttccactaatagtatctacctcccagggttgttttgaagatttagtcagaggacaagcaccaggcatatagtaggtgtgcattaaatgtccagtgttattaattttttgatgttatctttggggcattactttttattcctttgacataatctcacaattatagtcttccctacagtgagactggggtgcttgaactgactactttgtttaatgtgatcaatatggctcgcgtgtcaatatgtaacacaaggggattaaagaaggaattacagtttgggatggagaggatgaataggaaattttcctctgaacgaatccctatattttcagtagggctgtccagtaaaatacaggatacccagttaaatgtgaattttacataaatgtgagtatctttttttgtataagtaaatcctatgcaatgcttgttaaatctggcaaccctatctacccatgactgtttttcttaaaatagtctgataagaaacacattgctcttattttttttctgcttttgaccaagcccgaaagattaattctaggttcggttttttaattttttttttttttttttttgcgacagagtctcactctgtcacccagtctggagtgcagtgacacgatctcggctcactgtaacctctgcctcccgggttcaagcgattctcctgcctcagcctcctgagtagctgggactacaggtgtgtgccaccacacctgggtactaattattttgtatttttagtagagacggggtttcaccatgttggccaggttggtctcaaactcctgacttcaggtgatctgcctgcctctgcctccaaatgaccatctttaacattttaccaatatgaatgtgttaggctggccgtgcccttagatatggcagtgggtaagttccctcgaccagatatattgatagagttacaattaagtaaataaatctgctgaatgaggtctcctaacagcacccagggctactgaattttgccttagggaggaacagggtaagtcaagtctttttgggaacctgtctgtgcctgatgtttccctgacaaacgggttggggtgctggactgccagaacctgagaccccagaaactggaagttacccttgccccaccctggaggccaaagcagcagctctccctacctccccacacaaggacaggaggctgacccttgtgagggtctcccaggaggctgaggggaagcagcccaaatcagtgttaggtggtggatcagggagggttaggactccaaacctgaagcagagctagttgagagcatggatgaaccgggtctcgccaacagggtaccagcggaccccagcttcccctcattcacctctcagaacagcacagtcgcacagccttggtaaacacaaccattgttttaagcctgatgccctcacagccccgggtacggggaatggaagagctctagagccccctacaggcactcactggcactgcaccccatgggtgacagttctgcaacagagccttcccttggtggggtgtatggagaatcccagggggtgagccttcagaagctcaggggtgagctcaggaccctggctttagaaagcagctctggttttcacctttccgagccctgctccatgcaatttagcactgcagctgccttgtagtgtggtattcctcccaagccccaccatgcatgcatgcacacctacacaccacacactcactgcctccgtggcttgcctgacctccagacgggctggaaagtgctcaggtctgattcagtttgaggaatgacctccagctgctgaatatgcagaagccgtgcagccagcaccattttcagagccagatactggtgttcagatgctcttctccaagccacctaattctctggggaatcattttaggatttgatgtaagaaaagtgtctgaggggggataggagagctaaatataaagtgtaaggccagagatgggcgattgtaatagtaatagttgtagtaattgacatttattgagcatttactgtgtgtcaggctttgtcctaagaatatttcatgtatgaaatcatcacttcctcacaacaatcctaggaagtaggtattattatcatcccccatttcacaggtaaagaaactgaggtacagagacgttaagtcatttgcccaaggtcacacagctgacaaagctgggatttgcacagaggctgtctgggtgtgtgcctgcactcctcaccccgatgttatgtgtcgctcattgcatctagaatttcagctttctttcattctttttttttttttttttttttgagatggagtctcactctgtggcccaggctggagtgcagtggcgcaatctcggctcactgcgcgctctgcctcccaggttcacgccgttctcctgcctcggcctcccaagtagctgggactataggcgcctgccaccatgcctggctaattttttgtatttttagtagagaaggggcttcactgttcatcctgttagccaggatggttctgatctcctgacctcgtgatccatctgcctcagcctcccaaagtgctgggattacaggcgtgagccactgcacccggcctagaatttcagctttctaactcctgccttcagaacaccttgtgtagatctaacacttgggcaaagtttaaggtggtggtggagggggaaaagaccaagacccatgtcttggttctgaaaaaaataaggtggaagaattgctgcacagagtcagacctctcatcccccaggtcagcttccatccttgtcctcggcacaggagaaagctgtaggaaggaacttttggtcttcctgacatcatcgtccaagggcccatgcccagcctctggaggccactcagtggtttgaccccctccatgcctctcctagagtctatcataaacatattttgaagccgacttccctcttctcagcttgcattttctcctgttccttgccttcccatcattctcttatcgcccattctccaacagctcccaagtctgagtctcagtgccctaccttggtgcccgtcttggattcccgcaggcaccacacagcagcacgtgcaaaatcaaagacagcatcacactctaaacctgcttatcctcatgtctctttaggcaggcaccccccaccaagccaagatatggagcgtatcttcagttcttccctcctgctcttcattgttgagtcccctcctacatctggaaaacttttacctatgtatacacctcagatctagtcattcttgtattgcttcccccaaccctggtctgcttagcaaacttctatttatcctttaaaaccctgctcaggtatccccctctgtgtggaggcatccctgacttctccctgggggaattagtctttctccttgcagctgttctctgtctcatgcccctgactggtttacaatctgttggatttgaatatttgcttattttttctcctagatcatgaggtcctagagtccaaggtcatctctgtgtccccagtgacacagagtgggtgtttaataaatgttggttgagctaacctgaggggattggaagtagttaaaggggagcccttgggggaaaagaggcagaaagaagggcctgggaagaggtaaccaggagagcactggttctgccacatttttgccctggttgagccatggaggcagctctggcttggggagcattatatccttctgggaggcaatgcagtgttggggttaagagggaaaaccctagctccagactaactgaattgaaatcctggtcccaatggtgtgctggaaccagctcaaaccagctcaggagagctcactgttaaatattcagcagttttgtgggctgatggtcaaacacaatcattattaaaaattaaatggtataaacttataattaaatacattgtattaaaaacaaaggtaatagataccactcctcacttcctcatatcttagtacatttcactttacgttcttgccatcaatttacacctaatgtatggtggaaaaaccatgcgatgctgagctgctgcctgtctcttcccaagcctgcattccatgatgacacactggtagtttgagaacagccatgatgggagtatttacaccacggaaattggcaaatgctacagatccgccgtcccccagctggccattaaacatttattaccacaccactgcactggctccgtcacatcccagctctgtgaccccagataaatgactcaatctctctgtatctcagattcctcttctgctgtgatcttccacgttagattgctgtaaagattaaaagttgataaacatggctgagtgcggtggctcacgcctgtaatcccagcactttgggaggctgaggtgggcagatcatttgaggtcagcagtttgagaccagcctggccaacatggtgaaaccccatctctattaaaaatacaaaaatcagccaggcgtggtggtgggcacctgtaatcccacctccttgggaggctgaggcaggaggatcacttgaacccaggaggtggagattgcaatgagccaagattgcgccactgcactccagcctggaaaataaagcaagactcagtctcaaaaaaacaaaaacaaacaaacaaaaaaagataaatataaggtacttatagcagaaactagtacacagtaggtgctcaataaatattagttctttttagtatttcttctcattgctccagtgatgcccctatccaaattctacggaaacagatgacgtgccaggtagaggaatgtaagttttatttctagagcataaggttcatgtcctttccctacaggacccctgtgcgtagggtttaacttgaggagctaagtgcgggaagtaaaaaccatgaattttccaaggggaaaggcgctgatggagaggtatgctgaagcctccaggccatgagaggattgtgccccaggccctttgaggaaatgaggccacagcagcacatggttgaacaggtgaggcaggcacaggtgaggtcaggagaggaatgaagcagatgccaagaacagccaagctgcagcatgaagggaggctctgtgtgtggctgcagcggggccccaggaccttgcgaggaggcagctgccctctctggaaatgctgggctgtgcggtcatgcccatgaaagcaagggctcctctggctttggaagtggagaaaatattcctggccaatcccgagttggatcacacagttgaggttacattggctgcattgtggtttcttgggatgctacaggaaagcgggaaggtaagatttggtctgcagcctccaggacagcagaggccaggaaagagcaagagtgcgtttgggcttttctagactcctccgtggcaggtttcctgggtcccagccaacccaggcccctggaatgaggattcacacttaatctctctgttacctggaaattgcttcaggttcagacctttgccatcaggaggggcagttcagtgactcagatacacacagttcccagcccagcccttttccgatggcaagtgcactacaagcccacagaccgctggcaatgcgtacatctgcatgctgtacaggccagaagctgcagctcattgctggggtctgcttctgttctttgaatccctggtctgtagacaaatgccctttggagcggccttgccgaggagaaggcagcgttgagagtgaagcccttccttcccacctcactatgggagtctttcactttaccctgagctcctcaagggcccatctggttctgattcgtctgcagcacagagtcagtcatggaggagccttcagtaaatgtgaggtagaagtttagatacattttgagaaaatttgtgctttggggtgcaccactagtgggttacctgttcagttgtacaggttgttcactgtccaagagtgcctggttgaggaggtgggtggggtctgaacttagtttttctaattcacaacaagccacacatagctggggcatgggggtgagtatccaaggggttgagggcctagaggggcctgaggaaccaccttgccaggctccaactcattcattgggagcaacttcctgtctaacctgtgtctggattctctgaagaactctgtgtttctttctgctggcaacatccctgcagcctgcatttagagccggatagctcttcgaaggctttctgttctgtgtaactgcagtacttagcgggtcccccatggctctcagcaggccccggggcagggaggggcctccaggcgctgccctggctgctgatatttcaagatgccagtggaagcagagacactgcggccctgtgttcccagagtcaaggtgcagggtggcgtgtgggtatgagtaagccagcagccctggcaggcaggggcatatccgagaaacagtgtcacagggttcctgggctctaagggcctctgtgagtagatttttgggagtgctagaatttatcaacttggaggggaaggaagctgctgttttagcatttgatgcctttaatctttacagtaatacctacgtagggagtcctgtcccccgtttacagaggtccagaggagctgagtgactgcccaaggtggcgcagtggatccacttgaagagccaggatgcatgtccaagtctgtctgcctgaaacagctcagaattccaggggcccagaaaacccactgtttctatcacagatctctgtcttgccaggcccaccctcctgatgttttccccaacacattaatgtggtctcaggcagaactactcagctgaccctgggctcaggaaaggggagcgcagaccctgagacaggcatgtggctcgggggctgccaccagggcctcatcccagtatggctgtggagagggtcaggacatctggaagagccagtgttgggatctgttcatgctgtgccaagagaagtgcttccatttgccaagaaagaatgaggaagagggaagggcaggcccacctccttgctgctccctgggtcagtagccctgggtggccactggccttcacagagaagagccacttgggggtggtccacatgtgtgagctggaacccagggcctgtggccagccctgggagggcctctgtgcgggcatgtggggcagggaggcactggaggccagtttcctgtgcaaagcctttggggcatagcggatctggggcatagcagagaaggaggcctgctttggtctgtaaggtgctgtagccaggatctaacacacctggacttgggtttgtgggtttatctcccttgtgtattctttgaccacccagctccatgcctggccagcagagttctcgcaggagaccctgtaggcttgttgtgaggccatagttggaaacctgatgggccctccctagagacctattgcctggagaagtgctccctccgtagctccagtagacgcccctacttgcagtcttgcccaccaccttgctctcaacactcctctccatgccctgcagcctcctaagactttcctctgtgccagctacttttgcatggcaacaatagtaataaaaatagttacatatggtcaggcaatggatctgttttttggtctataagtgtattttatgttaaaaattttacattttatgacttcaagactttgcatgaaatacctttactgcaaagaagaaaacattacctgggatcagagcagtcacagaacacagaggcccctggcagtcaggagagaggtcccctggtcggtgcccaggtggagagtgtggccaggtgccggcaactgcaagtgtttccaagcaggtgcccatgtccagcagatgcctgcaagacttgaatcagaggcactgttctgagggcggaaggacctggggtccccaggctggccgaggcaagggactccacggctgctgtcttctcagtaagaacaccttggattcttttttttgagacagagtctcgttctgtcacccaggctggagtgcagtggcacgagctcagcacactgcaaacttcacctcccaggttcaagcgaatctcctgcctcagcctcccaagtagctgggattacaggcatgcaccaacatgcctggctaattttttttttttttttttttgtatttttagtagagtttcaccacactggccaggctggtctgacctcaggtgatctaccctcctcagcctcccaaaatgctggtattacaggcgtgagccaccgtgcccagcctagaacactttggattctaattttagtacttccagctcctggccatgtggatgagatcagagattgtgcctgtgtcaggtagacttggccactccaggcaaaaccagcttctctttgatgctgggctcttttcttttcccccatccttctttctttctagccctgtttccctgcctctgtcgttctaggccagtttccctctatttttctctttgctgatgctcacgacaatagtaatatttgctaacatcttctgactgcccactatgagccaggcgctgtgcaaagtgcatcttgtggctactcatatgttttgcctccttccctctttctgggccttttgtactgaagattcacctggtatcccttgagcacctcatgtggctggtactctcctccccaaagaggatgcagccttgtgggggctgggagggagcctcatttgctccagcgccctcattttacagaagagaaaactgagggcttgagctgatgagggccttggctacagttctgcagcttgggtgcagaaggaaagccagggcttggcctcttgacctttacccagagctgtcttgcatcttgtggatgcaaattgtttgctgtcagctgcgttgagggcctctttgaccttggggttctgagtacctaaatggtgagcctcgggccaggcagtgcagatcagtgatgtcactgtgccagtgtcactgcatacccacctcaggctgggcagggcgaggagactgcaggagccacgcagagccagaggatggctggacggactgacatgaaccattcccatgtaagaaaattaaaagataaaaataattttgatagagggaaaactggtaggagggaagatgagctggccgtctgggcgaggtggcctccttcacaggttttgctgccatcatctccctatgtgggcccacttctctccccgggccatccctgtaggctcttctttgcccttggtgacctcagtaggagctctccgtttccgacagtcagcccctcgcccagtgggaggaggagatagagaggtaagagctacctgagaattaagccatgtgcactatctggctcatgctggtcttcccggggcctcattccatggctggcatagaaatatgaatgcatcgtcctgctgtcaggcagcatcccagctactccagcctgtgtccaaggtcagtacctaactggccatccctgctccgaggtcacttgagggtctggcaatattaccatggatctgaacaccactggctccccgggggctgcagcggggcgtgtggaggaaggagtccctccggactcacggcccacactagaagaacataaaggaatagacagcccctgtgtggtgcagcagagcaagcaggacctttgatgtcagacaggtatgaattcagctgacaactcaactctcccttggtgtgtaccctggggcaagtcacctaacctccctgtgcacgctggcctcatctgaaaagtgggaataagaatccttctcttatagggttgcagaagaatttaataaaataatgcttgcaaaatgcttttatgcagggtactgtcagcctcacaaaccagagatgccccaagcattctctgtaaacacggctatgaccattcaaaagaaaattataaattcattttaaagtattatttaattaggagttattatatatttttccacctaataaagactaaaagtaccaagattatgatacttggtacttggggtggggggcggggttgagaaatgctttggcattaaaaagaggccttcagccgggcatggtggctgacgcctgtaatctcagcactttgggaagctgaggcaagtggaccacaaggccaagagttcgatacaattctggccaacatggtgaaagcccgtctttactaaaaatacaaaaactagctgggcatggtggtgcgtgcctgtagtcccagctactcgggaggctgaggcaggagaatcgcttgatcccaggaggcagaggttgcagtgaaccgagatcacgccactgcactccaacctggtgacagagtgagactccgtatcaaacaaaaacaaaaacaaaaacaaaaacaaaaaacaaaaaaacagccttcacaggttcatgtggactgagataaaaatacaggcaacatagagttgagtaaaaataaaaatcaagtagctggacagtggatagagtaaaatcacatgtatggctttttaagctctaaatgctgggtatatgcttttgaaacttggggaaagagatattaaaaaaaactgtcctttgagttagctgtagggaatgggcttaagaatcctggtattgggagagatttttacctttaactttgactcttttgattgtatgtacatattctataatgaaaacaattttaatgtgtaagttaagggaaccaagtgtgagcaaacaagccagcaaactaataaacctttctaagaaaaacattgaaatacaaaggatccttatgaaaacttggaagtcagctctctggacacacagtcctctagaaaccaggttctgtccctgctccaggtccctgcccacctgctcccctggtcccctgcagtgcacatgctaccaagcctgtgcctctgcctgcagcaggacaaacccagacagaggcttagcccggaggctcaacttccggaggctcaactcccggagccagcgctggcggtagatgcagcagccaggctcggcctgggttggcaagggttggcctcaccactagattctctctccacttcacgcctcatggagccaggccgagggagtcgctggaggatcgtgactacccgagtgggtggttgctcacctgcccaggaagccattaatcttgtgtctctgcggcctctcctcccacgccagccgcccgggcacggactgactcgggaaaggacatgaaaggggccctgggcttcattccatggtggaccatgaccctggaaaataccatctggcttttctgtgtgtcttctgacaccaattcccctagtcgggacacatcaaagagagtgcgcctggtgacatttctcattgttattcctttggcagggccttcggattcaggtcacagatagacttgcacctccagaggctgcctgtggggcctgagccccccatcttacagatgcctcaggagggggcttgtagaggtgacccaggaccccctagcggccaagaccccagtcaacggcacccagcaggccagtcccccagggccagtctgggcagcagaacctcctggagtgaccgctctgactttccttctctgccctctgatgctacccacgcaaaacagccaaagcgccaggtaccccatccagggtgtcagtaatgtgtggagtttgaccttaccctgggaatcccagcttcagtcacagagtcatattttctttacggaggctgggcttgctggctttaaagtaattccaaaatagatttattggacaaaatttgggcaaaaattgagacaaaataatttggggcaggccaggcatggtggctcgtgcttctaatcccagcactttgagaggccaaggcaggaggattgtttgagaccaggagttcgagaccagcctgggcaatgtagcgagaccttgtctctatttttcaaaaagaataaaacatttaaaagaataataatttggggcaaaaagggggcttctgaataacctcgaggtttgatactcagaaatgcactacctcctgagcagaaagtcgcctgtggcaggaggtatgtgcatgcaaagttgacctgtttggaaggttatagaagatacaacagcagccaggggcttgcactatctgttgcacactttccccttttgaataaacccctttgtttcatatcagtggggaacagaggatgggcacatgcagggcctcattggatattctctcacttttttatgtctagccttttaaacatggggcagtgcctcctacgccagcttgtgctttgttggaaaattggttcaatagccctgctagctggcatgcattgaagtatttcctatatgccaggcacagtgtatcgtgcattacccagttagtacttttgaatttcacaactgtcctgcaaagtaggcacttgcattttcctcatattccagatgaggaaataggagctcagagaggttgagtagcacccccaaagtcacagatctaacacaaggcaaagctggcatttaaacatagacccacctccaaagtccagtgtgctggacacacctgcagaagacaaatagttcccccatatttcaatctctctctctgttggaaactgagtccgctttttgttattgcttcccccatcagagttcaaaggcagctaggaaatggggtggtctctgctttgctgcttaccaccttgtcacctttcatttgtatttccctagagtagggaggcagtgccctttcttggcagggtgcagtgggtggaaggagggtagggctgtgggggaaggggtcagaggagaggattgcctctctctaggtagtcaagggggcatacgtatggggtaagaggctggttggcattgggcattgcattcggggtcaaccattccagttcccagatacacatgctgatagaatccttgtgacaaccctgtgaggtagaagctcttctgctcctccttttacaagtgttgaaactgaggctgtgtgccttgctcaggttgctgagctagcacacagtggagtctgactccagcctaggtctgcctgcctcctaagtcccaactcaccaccaccatcctgcatttgattcggttcagcctctctgtctgctgaggggactgtaggaagtgacagaaaggatgcagttgcataggtgggttaggggttttttaaatcctcattttcctgatggagaccctgagacccaagtgtcttgctgaactcagtacactggggactgaaattaccacctgtcccctggctgcagcctgccttttttgcagatgggtccaaacagcagatgtggatggtctgggagggaaggttcctgtggctgtgtgatgagggagacgggggtggcttgctggccagccgtgtgttttaaccagcgcgtatatatctttatttaaaggagtcctatgcttttgacaatccatcaggaagctccctgtgacggagtccaaggggttccctggtattgctctgtgatctttagacaagccacttagcctctgaacctctatgttctcatctgcctgatgaggataagagaatcccaactccctgaatcaatgctaggctaggtgaaatcaaacagccaacacaggttggatgtgcactccaggaggcttcctagcaatgtccccgccgctcattcctcctcgttatgccctcagagcccacatcatcccctttgaatatgctcgctgatggcaagtctccttccattccgggtggatttaatgtttaatgcagccaaggtcatttggaggcaagtctagggaattagctgggtgacagagctgagcaaagagatttttgattacaaagaaagtgaggatgtgactctatttctcagataatctgggctgaaaggcagctcccaagaggaactccaaaaatgctttgacgaaagccagcatcactgggaattgggaagagatgcccagggtgaccatgaggaaggggacagcgctcactagggtgtataaataccggttggtcacaattggtctcctgacttcacagtcacaccctgctgctcctgaccagatgctgccgtttcaaggagcaaactcggtgggaggtcatataggtgtccagtggaactggggtaattgtggccgtctcaggtcaggctcagtccctgatccatgcggaataaataatggcccagcaagatgcctatacctttctcatcttaccagccaaacctgcaaattacccaacagaacccatgctgctttggctgggagggccgaatgagccagagcttgcaagagtctagctgggggcagaagggaggaaggatacacaccccctcctgctcctggtacctcatctgctcttgagaattagcctggcagtgggagcccttcaactgggtacttcgtgtactgccgtcctttgacattttccttctgggaaaacttctagagaagccattctgggaaaggtagagatttagaagttttgaataagaaaatagcaagctgagaacataatctggggagaaagagcacagggcagagaactctgaatagtggcagatggacttccatctgaagaccgttgcagatttgaacaaaatgagggaaatgacaagagccggaagccttccaaaaggaaccgcttccattgaagtctgtccctgattctcaggttagagtcttcctcatttgggatgtgaaaatggtttttcttttataatgtgatgcttgtactaggttgccttttcccacgttttatgttctcacttgacaaatagcgtcaactttgtattggtcccagtttgggtggtggtgaacgggagtgggaattatcttgtgtggttggaagatgggaaccactggcctagaacccagaaactggaaactagctgtcctcaagctgggccttaagtctctgtagggaacctggggacagaaagtgaagacacacgaacaactgtttatatccgccatcctccaacgggcaggctcctatgggtggggctccatttagcccaggaattctcctcttcccattggtgctctgctcttctgctctgtgcagagggcagctggttctaaggtccagagatataagatttcttcgctggtttaagcagcaccgagagtgtggtcctctcgctctccctgattgtgctctgagctctggcctcttgcagggagttgccagacacatgtgtgagaagaagggctccttttgccgttttaccccgggtgtgatcacagctccggcccaggccactactgagccctacactgtccaatattcatatgggagggttgagacgagaaaaggcactaaacatcctgtgtcataggaaaagggaacaaaagaggaagcctcgaaacagactgggagttgtcattcatgaaagagtgagccttccaaatcccccacgctggctggtctttacagcctggaagacttcagattaaagagaccatgatgaatggggaccgtgaggatagattacttcagggaacacctcagtgtcacccagctgatggtggccccaatttctgggcagtgggtggggagtggaggcctccagccctcttcgattctgaccttcagctgcagcattccttgagcattcgtggaactttagtactgcaagatactctcaggggaaacagcttcctggggagttcgccaaagaaacagaaccaatacgatgtatagtcatgtgccacataatgacatttcagttaatgatgggctgcatatatgatggggtctcataagattataacactgcattttttacaccttttctttgtatagatatacacataccattgtattacaattacctacagtatttagtacagtaacatgctgtacaggtttatagcctaggagcaataggctttaccatacagcctaggggtgtagtaggctatgccatctaggcttgtgcaagtacactctatgatgttcacacaatgatgacatctcctaacaatgcatttcattattaagcaatggatgactgtgtgtgtatatatcctttatttatgtatataaagagatttattataaggaattagcttacatgattatggaagccgacaagtcccaaaatctgcagggtaagtcagcaagctggagacccaggagagctgacagtgtaattctagtccaaaggcaggcagacttgggacccaggaagagccaatatttcagtctgagtccaaaggcgggagaaggctgatgtcccaatttgaaggccattgggcaggaaggattttatttctcttgggagagggtcagtctttttgttttattcaggcctctagctgattggatgattgcacagggcaacctgctttacttaatttgctgatttcaatgctaatctcatccaaaaacaccctcatggaaatacccagaataatatttggccaaatatctggagactccatggcccggtcaagttgacactcaaaattaaccatcatagcagtcacatgagtttgggagattcttgtaaaccatggccctgtcttcggccttccagggcattttagtgtagtaaaggttctgagaatgcagtcaagaaacctatttgacttgttcactcaagtgttttccttatttatttggccatggtactttgtggggactggggaggagggaaggagggaagggccatgatgcctgttgaatcccatgactctgggaactatccattgggaaacaccaccctggagatgtaacattagaaagacactgctgtgccagctgcaagaaagcggtctgtccatgactggggctgtggtgcattttgaggcttccaggcactgtcatggtcaagctgcatcccaaagtgaaaggactcaagagagaactttctgggaattctttctttcttttcttttctttttttgaaatgcgggtctcgctatgttgcccaggctggcctcgaactcctggcctcaagctaccctcctgcctcagcctcctaagtagctgggactacaggcatgacatcccactcagctctgggaattctttctttttctttctttttttctttttcctggagacagggtcttgctctgtcacctaggctggagggctggagtccagtgatgtggccacaggcatacaccatcacacctggctaacttttgtgttttttgtagagacagggtctccccatattggccaggcagctttcaaactcctgggctcaagcaatcttcctgccttggcttcccaaagtgctggaattacaggtgtaagccaccacacccagccagaatttgtaattcagctgcacttagagggtgtttacttggtactggctgagtgctaagtgctttgtatgcatgatctcatttaatcttttcaaccactttttgcattaggaactagtgtctcattttacagataaagaaatacgcacagagttgtgtgactttctcacaagtgggaaatcaggatttgaacctagtcctgtctgactctagaacaatgcccttaaccactctaccctgattcccactgtgtggctgggaaatctataggcaaaaacaaaacagaggcctcaccaggcatgtggtttgaaatcaaacagtttatctgaaagtccttaactgataggatgccttttgatggcaaaagggaaaatgaagagatgagggaatgggaggaagtataatactgttagggaagacagactttgcatgagggtaagatgtggtcatgtcgaagagggaaaggcagagcatagctcagggtgttctgagccatcatctgccttgttggtgacagagagaccctgctcagctctacatttccttgctgcacgaggccccggtgccctcagaggtggtccctgagagtgccagagaggtggaggtggtgacaggtggtaagaccctgctgagcaggaccatctttttttttttgagacagagtttcactcttgttgcccaggctggagtgcaatggcacaatctcagttcactgcaacctccgcctcctgggttcaaacgattctcctgcctcagcctcctgggattacaggcaccctccaccacgcccggctaatttttgtagttttagtagagatggggtttcaccacgttggccaggctggtcccgaactcctgacttcaggtgatccacccacctcggcctcccaaagtgctgggattacaggcgtgagccaccatgcccggctgggagcaggaccttcttgtgctccaatcattggtgtgacttggacaagtctacatactctcaaatatctggtgtgctttctgtctatctgctgtgcaaacaaggttgttgcatcctatttttgcattagggtgttccagaaaggaagagtctcatgtgtatgtgtgtgtgtgtgcgcgcgtgcgtgtgtcttcagcaaccagtactcaccagggacctagccataggagtgcccacaaacagtgtgtctgcatatgtgtgtgtagatacataccacacataaatgtattcctgtatcacaaagtacttttaaattctttatatatattatttatataatattatataatataattaattatctgtctctcccaccagaataaaagtttcctgaggtcaaggacttccttttccctgccaaaatggtgtccagaactttgaggtatctaataaatattgtgaatgaatgaatggccagaccatgggctgtgatctcttagctaatgtcctagaatttacaccttcagcagagccccttgggaaatggcagtcagcgttgcagccaccttcacctcttcctccaccgtctcctcttcctttattgtttctgcctccttttctccctccccttcccagtgcttagaatcgtctctggcaacagctccagcccagccttttgaaaatacacttaatgatggttttgactttttttctaaaagcaacaaaatcatttggaaccaagaagattagctgtttttttggccactgaggtccttaactcagagatgataaatagggcacggtaatcagatcagtattttgttgtgggcagtaaactatctctaatggtcattccccttatagaggagggctcagtatgaaagaacagggacagagagacccaggaagcccctcagaaggggacagacccagctggatgttgacattctggttgcatcgttttctaaagcaatttcctgagtttttgccctcctgtgtgtatttacatagacacgaactttaagcctgacacctcagaagctgtttgggaaggatgggctcgcagattttgtttttgtctttgtttgtttgattgttttttagatagggcctctctctgtcactgaggctggagtgcagtggcgtgatcagagctcactgcagacttgaaactcctcggctgaggcaatcctcccacctcagcctcccaagtagctgggactacaggcacacaccactgcaccactaccactacacccggctaattttttttttgtagagacaggttcttgctgtgttggccaggctggtctcaaactcctgccctctagcaatacgcctgcttcggcctcccaaactgctggggttacaggtgtgagccactgtgcccatctggttcccagaactgaagaaggcctggaacctagagggcagatgaaccgataatgggagtgtttccttgtaagttgccttgggaagtagtgtgggtggtttatcttgggcatttaagtccatgagcatgatcagaagaggtagaatgcttccagggggcttgttggtgagacctcaggaaaatggacaaaggaaaagacagaaggaaaatggacaaagctcgggatttgcacatggcctgctgtagccaaactacccttaggatttagcccttctccctgccaagcctctctgaggtcgcgccactgcactccagcctggcaacagagcgagactctgtctcaaaaaaaaaaaggtgtggtggcatgcacctgtagtcttagctactaggaaggctgaggcaagagtcacttgagccaaggaatatgaggctcaggagtttcaggttacagtgagctatgattgtgccgcgtcactccagcctgggtgacagagtgagaccctgtctcagaaaaagggaaagaaaatctaacctataaattattttctaacataatgaaatgtttacgaatataccattaatgaagcaagttgacattaggttgtgctttgtggacatttaattacacatttaaacattttgatcttgcatttttccttttcatatttggggattaaaaatgtatttgcatatttcaagcatgttgaaggtctttggaaaaactcaaaggccagaagctctgtgcctacagggctgagtggacaaaccgcccctgctccggccctaagaaattacagagtaaggaagaggcaagggaggacactggagaaaaatgaagcattgactggagatgtctctgagggtctctgagggtgggaggtggggttggggctgggagttagggcttggttctcaatggttttctgatatctagttcatttaatccccattgcctggggagctcttcccctaactctccagatacccattagctcccttcctctcttcattaaagattctactcaaatgtcacattggttaaaacagtgccccggctgggtgcagtggctcacacctgtaatcccagcactttgggagactgaggcaggtggatcacgaggtcaggagttagagaccagcctagacaacatagtgaaaccccgtctctactaaaaatacaaaaaactagccaggtatgatggcaggcacctgtaatcccagctacttgggaggctgaagcaggagaattgcttgaacccagaggcagaggttgcggtgagccaagatcatgccattgcactccagcctgggcaacaagagcaagacttcgtcaaaaaacaaacaaacaaacaaacaaaaaaccagtgccccatccttgcccatccttgtctaacacaagatgtagtgctaagaagccattaatgccatgtggacaaataaacagactaattgggtagggagagtcctctgttattgattagtctgtttacttgtgcgtgctctgtcttgatccgcctcctgcgggcagggaatgtgttgtattcaccagtgtctggcacctaaaggctccacaataaatgcgtggttgttggcacaatgaatgaacaaatgaataaatgaatcttggccctccctgcctccagtggctgttgggagaatcaggtgagagaaaatgcagtcttcaaaggataagctgatgtgccgtcggccccaggagtcacagcacattttctctttctaggagtccttaaaatgcaggcagaagctcatcctcagaaattctgagtcagtcggttgggggcagagaccagcgatctgaatttaacaaactctttgggtgatactgatgctgctggtcatcagcctatgctgggaggagactttgctgacaactagctgtcactttttagtcattttgctgagcgggacacaaatgtagagccacaatgcaatgtgaccctagagcccatggttccagagtcgggggttgcccctctccatgtttgagggccgaagagcctgcatcgagcagagccaccaggctaaatcctctgaccttgactttggtttagggaccagagtctggtatctaagtgcgatcttactctagctttcccatctgttctgtttaggccagaggtgatccagtgatttgggagctgcaggtcacacaggctgctcagagggtaagttgggtccagtcgggccagcagggccacatggccgattcacactcagtccaaaaccctcgtggctgagcattgatgcagaccatgctgtcttgtgggagtggtctgggtgcctctaggagggcagaaataccacattactgcctggtgaccttggaaagggggacagaggtgctggcactgggatgctgagcagccaaagccagtgagacccacgtggagggaggcagctagcttgcttgcttcctgaaagccagacagagcctctcagcctaatttgcttgtgccaggcagcctgtgaattcttatagccaaaccacctggtgggtgactgttgacacgggactgccgggtcctggcagcccagccctagcacagacaccaggcagcacacagacctcaggtcacataggcactggccagtctttgaggacacagtgtctggctccagttatttctacctgcagtacagtctcggggccctgagtcaacaggcgggtttgagaggacttcaggtcttggccccaaaaaagtgcacatgaccaggttcacggtcacctcaggctatctggccccactcattgattcatgcttatgttcattctacagaaattattcagcaccttctacgaagacacaaagaaggaaaggagttcccatctgtccttaaagaacttaactgttaaatgatgtcccaggctgggctcagtggctcacgcctgtaatcccaacatcttgggaggccgaggcaaaagggtcacttgagcccaggagtttgagaccagcctaagcaacatggcaagactctgtctctacaaaaaatttttaaaaattaaccaggtgcaggtgcatgggggtgcatgcctgtggtcccagctcctccggaggctaaggtggtggggcgattgcttgagcctgggaggtcaaggctgcagtgaaccaagatcacaccactgcactccagcctgggtgacagagtgagaccctgtctcaaaaaaaaaaaaaaaaaaaaaaaaaaagataagcactacatagagcagtgggcagcccccaaatgcatagagctggcatgcagcaggcactcagtaaatcttggttgaatgagcaaggtgctggaggagctaggaggagagagtgagaaactggccagggaaagctcctgcatgaaggaaaaggaaaaggcattctacatgaaaggtgtgaatgttacaaaatatatgaggagtaatgtggccatgtggagaagtaagagctcacttccattgagcgcttcatttcaaccaggcattgttctgaacatattacacatatcatctctttaacctttgagatagggcctattgttgtcactcccattttataattgcacagcctgaggcccagagaggctgagcttaaggccatgcaggtagtgagtggcagagtcaggtgttaatccactcaccaatgggcacttaacccaacctgagcctccacttctccatctgtaaaatgggaacgcccaggcttcccctgacagtttcttggacagattaagaaagctgtgcatgagtgcacatggaatgtctgtgaaaaagttacaagattcacagaaaacttgctaacaatggttacctttggggaggctgcctagaggaccaaggattagagaaagtatgtatcagtttttggatctctttttgggcctccagcgggtgaaagttaaaatgacaagcagcctaaatgggaaggagttggagggtgggttaagtttgaaaggagaaagagcagttgaggctggagaaaggatgttatttgactgtagcgaacactctgcctgcaccccccagtccctctctctttgaggggaaggatgccgtggcgacggtcttcctccttaatatagtatgtacattttatctctgcagacttcttgcagacttggtttaaagatctcagctcaataccattagtgtatatctgcagagggccctttgtaaaattgattagaaagtgggcttttgcatgtggggtgggggcgggggtgggacctaatcggatttgagcatgagatggtatctaattccctgcatctagcaactggcttggggacctccctgggagccagggcccccctaatttggtttgcaaatacattagccaaacaagctgagggggctcctttggggagagggtttttgggggatggggatgggagatggtgggaaggctgaggaaatgaagaagggaagggttttctgtgcaggtcctggagtataaaccgtacatgcgattgccaaggctgtgcatgtctcatggttttaccccattcgggagaatgaagcaaacttctaagaggaccaggctgggcctggtggctcagtcctgtaatgccagcactttgagaggctgaggggggtggatcacctgaggtcaggagtttgagaccaccctggccaacatggtgaaactccgtctctactaaaaatacaaaaactagccaggcatggtggcacacgcctgtattcccagctactcaggaggctgaggcaggagaatcacttgaatccaagaggtggaggttgcagtgagctgagttcatgccactgcactccagcctgggcgacagagcaagacaggtctcaaaacaaacaaacaaacaaacaaagacttggtgtattgcttaccatttttgagccattatatatacattttgtttcattttttcagtcttttaaaaaaaagtaatacattcacatgtgtaacaaaaatgtcaaacactatgagagtgcaggcagtgactggtagggtatttttcctcccctaatccttggtcccctagacagaatccctaaaagtagccacagttaccaagttttctgtgaaccttacaatattttcaaaaattgtccatgtgcactcatacacagctttcttaatccctccaagaaacctgcagaggaaacttggtgttcccattttacagatggagaatggaggcacaggttggttaagtgcccactggtgaagggccaggatccaaattgtgaatgatctggtggtctggctttatatcctggggtctttctgtgaaatcatatgctctcttatgtgcctttcccagaaagagagggggctgttcagagctataaacacagcaaatatttgagtttttacttctccaactcttttcttcttatttttttttatttttttattttttgagacagagtctctctctgtcacccagactggagggcagtggtgcaatctcagctcactgcaacctcccccttctgggttcaagtgattcttgtgcctcagcctcccgagtagctgagattacaggcaagtgccaccaagcccggctaatttttgtatttttcgcagagacggggttttgccttgttgaccagtctggtcttgaactcctgatctcaggtgatctgcctgcttcagcctcccaaagtgctgggattacaggcaagagccaccgcgcctggcccattcatttcttcttgggtccatccatatgctatcgttttgtccacttatacccaagcatcctaaaaacaggatgcaaggctgggcatggtggctcacgcctgtaatcaatcccagcactatggaaggccaaggcaggcagatcacctgaggtcaggagttcaagaccagcctgatcaacatggtgaaaccccatctctactaaaaatacaaaaattagccgggcatggtggcgggcacctgtaatcccagctactcgggaggccgaggcaggagaatcacttgaatctgggagaaagaggatgcagtgagctgagattgcgccaccgaactccagcctggacaacaaagcaagactccatcttccaaaaaaaaaacaggaggtgaacttgcaagggcatctttactacggtctccttcagttcagtacccctttatgagagtgaggggtggagtgtgttgagtgaatcctcgcctgctttatctggatcttgagttctgcccacttcctactagacactgtgtgtgttgcaggaaggaggatgctggtggcagcacgtgctgcaaattgtgtggcagcatccagcttcataacagataatcacagtatcaacctcggagggttctttggagggtggaataataccatggcatggtacctggtacatggtaatctctcaataaatattagtgattagtagtatcactagctagagaagctttcgtacattgctcatctgctctgtgcaatttgcctcaactataagaatagtattattctgttatcatcacactattatttaatatttaatatttttaaacaatctgtgtaataagctggtatcattttaaatacaattagcatagtgtcaggtatacaaaagatgctcaataaatatgatttcccattttattcccgtctctttaccagttttaaatcaagatcttgattcttctttatccttgttgtgaatctaatttctgtaaagtgagtccatttgtattcccactcacatttattgagaacctgctgtttacctggcattctgctctgtgctgcggggcacacaaagaagaacagacctcggactccgccctcacaggacgaaaaatcaaatcaggaagactgagaacagaggcatcaattgcagcccaagctgttcgcagggtttggggcatgctcctggggtacaggaatagatggagtggcttcatgttcttcagtacctcagtttccccttctgaggagtggaggtagttccctttcttgtttcttggtatttggaagatgtggaacaacctggctgatgtggtttcagtcttgtgggaaccagtgggctgagcccctttctttacccctctacctctccctcaccaccaagtaccctatacctctctcccaccctaccctggctggaagctgctcctccactgggctgtcgacctgggagcctccatcctcctcctccttgcaaaccacaccttttcaccagatcgtcatgccaaccccatcctcccccaacaaagaaggttttgaagggaccagaatacctcagctttggatgctgtactataaaatccagaattatataactgctggattatggagtgattattagctttgctgaaagattttccatttacataaggattagctgcggggttcctttaaatagctggctttgctaatgcatttgtattgcaaagaaaggtgggtgggggaaataaggacaggattgtgaagcagaaggcccgagttgcagtggctcaggcctctaatccaaatgactcaggaggccggggcaggaggatcacttgaacccaggagttcaacaccagtctgggcaacatagggagaccctatctctacaataaattaaattaaattaactagggatggtggcttgtgcctttagaaaaataaagaaaagaaggctcgagttctaagccagctgagtaactggtcattttacctcttgaagccttgggtttctttgatgaggaaagtgagcggtgaccaccctacccagacccagcattgcaggagaggactgtgcaggcagtttgcaaagagctgggcgcaggcagtcaggtgaggcaaagctgcaccgcagtgctgttggtgtgatgagcctgcccctcaaagggtgatgtcgaaacccctggtgttgaatcttctagctggcctctgcccacctgtccatgctggtctcctgacagacccccacctggcttcttcctgtgccccggccccggccacacacctgtgtcccggacttcccacaccaactccagttccttggctgtatactgctgttccctatctctgtgacttgcacatactggtcccagtgcccagaatgccattccccaccctcttcccttcttggcctggcaaacacctacttgtccttcaagacgtaggctaaacttctcctccaggaagccttccctgactaccttacactaaggagggttagacactcctctgcactcgcaggtcccatgaatgtgtgtgtgaccctatcgtattgctttgagatccttcattgtccagtgactttatggtcattgatcacttatttgtatctgccatgagctactgagcttaggggcagggtccctgttgtgtttgactcagtagatgtgtagtaaatgaaataagtaagcgaatagtaacaacttctcatgtgcagcaggtgtttcatccccagccacatgcagcagaggcggcccccgcaccgtcccccaccccgtaccatcctcacccctgcaccatccccacccctgcaccgtcccccgcccctgcaccgtcccctgcccctgcaccgtctcccgcccctgcaccgtccgccgcccctgcaccatccctcgcccctgcaccgtccccgcccctgcaccgtccgccgcccctgcaccgtccgccgcccctgcaccgtccccgcccctgcaccgtcccctgcccctgcacggtccccgcccctgcaccgtccgccgcccctgcaccatccctcgcccctgcaccgtccccgcccctgcaccgtctcccgcccctgcaccgtctcccgcccctgcaccgtcccccccgcccctgcaacgtccccccgcccctgcagcgtccccccgcccctgcatactgcatgccctgaagcacaaaaaccctggtgttagaccacaggggttcaaataaatcctggctccaccccagctgtgaccttaaccaaattattttgctcccgagtttcttcatctataaaacaagatcataatagttctgaccccttagggttgctgtgaataggaagtgagttaatctgtgttcggtacttagagcagtgcctgggcgcagtaccttctgcgtctgatggcggttttcatttcggagggccctgagttgtgcccctgtggttcctccccagctcagtcccctgtgttgctgagcttgcagtctctgcctctttactttcttcgcttgctctagtgacctgtctcagatccccactcccccaaccagtcagcacagaaataatcaaattttacttgattattagtcattactttctgctgctgtttttgtttgttccttaaaaaaaaaaaaaaaaaaaaaaaaactattctagatttaattgagttgattgattagcacaatcgctgattggaaggagatactctgtaaccctctcctcctccggtgccttttcccagagaggcaccaggtggactgcccgtggcctggaggtgcagtggcttgtggtggctgtgtgggctgggagcctggtcctcccaggcctagtgacctgaggcaagtccccggccctctcagggcctcatctgtaagaaggggattgaagtaaatgagcctctgaatcccctcacttttaaattctatgaaaactctacacctgagtgcccccagccttggtttgtgagtcgcccatccattcaatatcacagctacctctgggccagcacttctcagggtgctgtggggacccagacgtgagcaagtcaagagccctgccctctaggagctagtggggtggggttggggactggcaagacgctaactccagcatttttaacttagtgtgttccaagctcagtggagtttcagaggggaatgcctaattcgaacagttgtagaggggtgacatttggattcagtccaagacaaaataccttgtacaaactttaggggtgtggagagtgaactttatagaagccacctctatgtgctgagtacagtggtaagcacttaaattgttttaaaactttttatatcaaatagagataggatggccgggcacagtggctcactcctgcaatcccagcactttgggaggccgagacgggcagatcacgaggtcaggagtttgagaccagcctggccaacgtggtaaaaccctgtctctactaaaaatacaaaaattagccaggcgtggtggtttgcacctgtaatcccagctactcaggaggctgagacagaagaatcacttgaacccggaaggtggagtttacagtgagctgagatcatgctactgcactccagactgggcgaaagagtgagactctatctcaaaaatcaataaaaaattagtaaataaatagagatgggggtctcactgtattgcccaggctggtctcaaactcttgggctcaaatggtgctcctgtttcagcctcccaaagtgccgggattacaggcatgagccactgcgcctgataagcactttcttttcattttctttttaatccccacagcaacactctaagtaaaaggatatgatatcacttttatagacaaaacacccaaagctcagagaggataagtggcttgcctacagtcaacagcaagcgagggagaagtagactttgaatgatgtcaaaccttatcctctttacacagtttcataccatattacagtattaaataatttgaaggtaaaataatcagctaatttcccaaatgtcacttctatgtccattttggaacatgatcttccatacataccctttttacattacataattagagtgatgtaccattttccctttttttttttttttttttgagacatggtcttggctctgtcacacaggctagagtgcagtggtgtgatcatagctcactgcaacctcttggctcctgggatcaagggatcctcctgcctcagccctccaagtagctgggctataggcgcccaccaccacacccagctaattttgtatttttgtagagatgggtttttgccatgttggccaagctggtctcaaactccagttcagactgcctttgtctcccaaagtgctgggattacaggcatgaacctgcgccccgcctctatttttttacttatagcattttttccccccgtctctgcttttttgttcttttctctttttttgagatggagtgtcactcttgtcgcccgggctagagtgcaatggcgtgatcgtggttcactgcaacctccaccttctgggttcaagcaattctcctgccccagcctcctgagtagctaggattacagatacccaccaccacacctggctaattttgtatttttagtagagatggtgtttcaccatgttggccaggctggtctcgaactcctgacctcaggtgatccacccgcctcggcctcccaaagtgctgggatttcaggtgtgagccactattcctggcccatctctgggttttgttcattgactcatatatttaccgagcacctactatgtgtcttgattctgagataaaacaattagtccaagaccctgccttcagggaacttaaccttaggtggacagatgataaacggagaagcaataaaacaaataatagaatgtcagatattaagaatggctgtgaagaaagtaaagcaggataagatgtagagtatatgaaattagccgggcatggtggcgggcacctgtaatcccagctgctcaggaggctgagacaggagaatcgcttgaacccagaaggcggaggctgcagtgagctgagatcatgccacaacaatccaagctggccaatagagtgagactccatctcaaaaacaaaaaaagaaagaaagaaaaagatgtagagtatcgataggggtcagggtgtcttccctgaaacgtgacatctcagcagagacctgactaatgatgaggtgagctgtgtgggtatctgggtactccaggtagggggagcagtcagtgcaaaggccctgggatggtgatgaccttggcacacttggggaagagcaggagaccagtgtgggtggaatgtgggaaggtgggatgtgaagttggaaaggtggctggggtcaggtcacaggctttgcaggccatggaagagactggcttttgttcctagtgtgtttctctggtgtcttctagttcccattattccacaattcaacccagtggatgtggtgttattaatcaacatcaatgttgtttcctgcagcgtctgtgtgtgcctgtgtgcgtgcatatgtgtgtgtttgcagcgaacacgcatttcaagcatatttcaagcatgtgacttttgactatgttggggtaattctgtagcagcgaaataactggttggaagtgtttgctcatctttttggctcttgacaggtaaaactatagtgtgacttctggtgacaagagctgaaggcatggcaggcagtggatctgtggtgcaaaggtgcagaggcagaaagaacaagccttcccagaggcccgaggcatcacacaggtagtccctggccataagggaggagccactggagaagcaggtgcctcgtgaggacaggtgggcggtgggccaagtgagcgcctcctctctcctccaagaggcagagccaggtggggcttttacatacttttttttttttttttttttttttggtgggggatggagtctggctctgtcacccaggctggagtgcagagacacaatcttggcccactgcaacctctgcctcccaggttcaagtgattctcctgcctcagcttcctgattagctgggattacagacgcccgccaccatgcgtggctaatttttgtatttttagtaagacagggtttcaccatgtttgtcaggctggtcttgaacccctgacctcaggtgatccacccacctcaacctcccaaagtgctgagattacaggcgtgagccactgcgcctgacctttttccacttttgaaaaagctttttaatgaaattgttttttggctttacagaaaaattgccaagatagtgcagaggactcctgtataacccttatctggttttcacttttgttagcttcctatgttaccatgatagatttgtcacaactaagaaacttaccttggtacattactatgaactaacctccatactttattgagatttcatttatttttccattgatgtcctttttctcttccaggatcccatgcagaatcccacactgcatttaattgtcatgtctgtttagtctccccttgtctgtgacagtttctcagactttccataattttcataaccttgacagtttttgtttgattgtttgtttgcttgttttgagatggagtcttgctctgttgcccaggctggagtgcagtggagcgatctcggctcactataacctcccacctcctgggttcaagtgattctcgtgcctcagcctccctagtagctaggattacgggtgcctgccaccatgcctggctaatttttctatttttagtagaaacagtgttttgccatgttggccaggctggtctcaaactcctggcctcaagtgatccgcccaccttggcctccaaactaactgctggaattacaggtgtgagccaccgcatccagcctaaccttgagagtttttagaagtgctggccaggtactttgcttttccatttttcaactatctatttttatctggaatcatgatgttgagagcctgtaaacttttttttttttttgagacgaggtttcactctgtcaccctgcctggagtgcgatggcacgatctcggctcactacaaccttcgcctctcaggttcaaacgattctcctgtgtcagcctcctgagtagctgggactatgggcatgtgccactgtgcctggctaatttttacatttttagtagagatggggtttcgccatgttggccaggctgatctcgaactcctgacctcaggtgatcttcctgcctcggtctcccaaactgctgggattacaggagtgagccaccgcacacggctgagagtctgcaaaatgttgagatcgagcttcgaactcaggaatcaagggtgggggacacggtgctgggttcagtcctggccttgccccctacccactaagtgacattgaacaaggaaatcttccatgcttcattcttatcctgggggtgagaatattcacccccgagcctcatgagggttagctgggataagacatggaaattctcatgaacttggggttccttctcagtttcattgctgggtaagcccctggtgagactgattaccctgaagacattcacttcctctcacaggagctggggctgtgaaatgccagagtgaggatggcggggaggttgtgacaacttggcaggaagcactttgaaggtcgtattctatattgatcctcacaataactccatgagttatggtagtaaaatgggttactgtaggctcatagaaggtcaagaacctgctgaaggtcatggaggaaagaagggcaaagtcaagacttgcacatgggccatgagaccctgtgccccttccagtttaggctggcctgagctgcccggcagagggggcaggcagctctggggtggatgtgggcaggaaagcccagagccctggatcctgggatggagagggtctgtctcatgggtcaggaggactggggttcggctaggggtctgactcacggggcaagaggctagagttatggattctcagtctttacacaccatattggtctcaggccattgcattacagtgagtgtttcattttgtaatgtagactttttttctctaggtaatttcatttttaacccttgagttacctgtgaaaccagcatgagcaaatgagcaaaaggctcatgactagcgggcagcttcccaggtaaatctcaggaccaatggtccagcttcctgccagagagccaactgtcttacctcctgtttcatgtatcttcaggcccccccagcagatggtgagggctctctgctttccaggaagggacaaagaatgactgaagccagacagggcaagtggctgtctctaggacacacagcttcagagcagacaccatatcagttagtcactgggctctttctaccaaacataataagaactcagaagacactcgtgctatttattatattttaaaacttgaaatgtaaactacaaagttgcagttccgacattaatgggagagttgggaggccacagttctaagtgcatgagctaataggtcttctcctacagggtgtgagtgtgtgtgtgtgtgtgtgtgtgtgtgtgtgtgtgtttgtgtatgagagagagagagagagacagagagcaacacatttaggtcagtgcactgtgaggaacaaagtaattttggcactttggccaaatggccaaaaattaccttcaattcaaccaaaacacacagaggttggagggatggacggtccttttcaaaaaggggtcccctggaaccggtggccaccatgccctttgtatcaggggttcccatttcatccacctcaaagtttctaaattcagagcttgcagaccaccctcacacaccccacctgtgcacatggatgacatggccctgctgattcctctggctctaaatgatacctcttctgcctgtcccctgcagtgaggtgtgcccaggtattcagacccctgcagtgtctcactgagcaccctaagcactcacccgtcaccctctggttccttggggcccggtgctggccttggaacactggtcccagtactcaggcagtccaggaaatagtctgtttggcctgccagctgtcagcagccttgcccctcctcccagcctggatccagccggaggaggacagagcccgtttctcttctgcccacctttaaaggctaggctggccaggatagggaagaagtagccctgtctggagtcacccctccagagatgtgtaaccccagagtggttaaaatcccatacattggcatcaggatggcttagagggcaaatctttgcctttccatgtgcatggaaggtgtggggcccacctgacaatgtctggtgcctcgattgattttcccatgtataaattaggatgaaaaatccagagttattttgaggagtaaataagcttatatatgtaaagcgctttgcacatagcaagtgcttaaaaagaaaggaaatgtagtattgttattcggttatataatatagcagcatttgtgtctctttttcttccaaagagcttgcacatctgtttactccatgtacccttacaacaaccaagtggagtagggcagtttttcttggatccagtttactgatgcagcagctaagatgcagtgaagtgtaatgacatgcccaaggccactccacaaagcagcaggggcactgaggtccctggagggcacaggctaggttaggtgtgtcccagtctggctcacctgcagccggaattcctgcctgccacagctgcccctccagtccccctgtcactctcctccctcccctccctgagaactgctgtcttccacaaggacccctcactacccagggagggagggtgtggttgggcgctggtagggggtggctctacctcttcagccagtggcagggctctgccattgccagcagcatcttgcaggatgaaggttgcatcagtgagcagtaattgaaatgcaaaataacattttgatcgagccagcaggctgtttatttatcagatcaatagtcaaaatgccccgtctggagaagctagtgtgataagtgacagtcttgccaagggcagtcctggtggctacagtcccctccctcaaaggcctggattagaaagccaaggagcctgggagtgacccctacctctgcttctcccttacagaatgtgggcacgcacacgcacagcccttgccacatttccttctttttttttttttttttttttttgagatggagtctcactctgttgccaggctggagtacagtggcgcaatctcagctcactgcaacctccgcctcccgggttcaagcgattctcctgcctcagcctcccaagtagctgggactacaggcacgtgccaccacacccagctaattttttttgtattttagtagagacaaggtttcaccatgttggccaggatggtctcgatctcctgacctcatgatctgcctgcctcggcctcccaaagtgctgggattacaggcatgagccaccacacccggccgacatttccttcttatactcagtttacagaggagatgactgagaactatgtgggtagggaccacccttgctgtggctgccaggacctgtacccaagattgctgagataacagcacatattttcgagcacttacaatgtacaggtgcccaatgcttcacattattgggtcatttactcctcagaataattctgtgaggtacgtatgtctatattacccattttgcagatgaggaaaccaagtcctagagaggtcaggcaacagttgcacagcgagtcagtgacaggccgggattccgacacaggcgagctgggcccagagccctcatgcccaggccctgtcagttccctctctcaagggcagggggccgtgaaacatttttgtttacacagtggggttctggctctgaagtcaagcaacccctttccagccccacttcccacagtttctttacgaattacattgattttgtgttaaaatttagtttttagcattttgaaagcagatgtctcaatgagttgctctcagactagcctctctaagttgccaacccaacacattaagtagcttggggtacttacaaaaaagcaaccaaaatcagaaaataagaaaaatgcatatatctttcataacctttttttttttttttttttttgagagagtctcactctgtcacccaggctggagtatagtggctcaatctcggctcactgcatcctctgcctcccgcgctcaagaaattctcacacctcagcctcctgagtagctgggattacagatgtgtgccaccacacctggctaatttttgtatttttagtagagacagggtttcaccatgttggccaggctggtctcgaacttctgacctcaagtgatctgctcactttggcttcccaaattgctgagattacaggcgtgagccaccgcgccatcctttcatagactctttaaaccaggatgatcagaattcgatcgaaactgatggcaaggtggatcctttaagaacttttgtgggctccactggaccccaggggctctgtgggttctgctcctggggcgctggtggactcctcttctcggaccttgatcctgtcctgtgactcagaccggtgactgtcacatcctgagggagtgcaggcctctggaaactgtaatggttgtttgactggggtcctcagatcccacctaaccctccttactcattcaacaaatatttattctgcacctactgtgtgtctattctagacactggagtaggacaggaaagaaaacagaaagcctctgccatcatatacggggagcaaagaccctgaggtgggagcgtgattggtgtagtcaagaaccagccaggaggccagtgtggctgggatggagtgacctggggggagagtgggcaggagatagcatgacagaggttggggggcagatcctgaggccttctgagctgtggaaaggactcctgcttcactggagcccctggctgtcttcagcagaggaatgttgtgacttacaccccttcatgatgtaactcatgacagcactttctggctgtgtggtccctgccgagatatttagcgcctctgggcctcagtttgctcctctgcaaaatgagggaaatgatagtacttcaactagttgttgcaaggaatcagtgatttactaaccattgtcccgagcatagagcaagccctccatatgtgagcactgttgttgttacagagatcagaacagggttctcagctggctacagtggccagtctccatctgtccacctgagttaagatgcctctttgtcatctgcccaggctgcccatttgcacaaagactgaaaaattgagtcaggatgagccctaagcttcctatgtgggttctgctcctggggcgctggctgatcccctttcttggaccctgatcctgtcctggtgtgcacaaggctatgtagaaagggccatggccatgaccagggagtggatagaagtgtcgtccccttcgttgtgtgggcctgcacactgtcctttgggaatgcacagggggcagcagtgaggctcagtcacatgtgtgatcagagtggaggtcagcaacataagccaagcaccttaaacgctgattccatcctgggttgtataagcagaagtatagtgtctaggatgagggaggtgtcagtactgctctgctctgcactgggcagagctcacctggagagctgtgctcagttctaatgctcttttttgtttgtttgtttgtttgagatagagtgtcactctgttgcccagactggagtgcagtggcacaatcttggctcactgcaacctccacctcccaggttcaagtgattctcctgcctctgcctctgaagtagctgggattacaggcatgcaccaccacgcccggctaatttttatatttttagtagagatggggtttcaccatcttggccaggctggtctcaaactcctgacctcaagcgatctgcccgcctcagcctccctgaggctcacacctgtaaatcccattataggtgtgagccactgcgcctggcctgatgctcttctttaagaagagaagacagagcagatgggttattctcagaagtgcaggggatgttgaccctggtgaggagaggggaggatccacagggagcaggagctgccttccgcagtctggagggctatctcatggaagggcttagacttgttctgtaggtcatgaggggtggggttgtataaactgtaactggaagctcagagggaagaaatacttttacttttcacaaaaaaaccttttatttttatttttatttttagcattctgagcaagatgtaaatatttgcctcctgaactagggatctccctatcactggggtctttataaggcaggtagccacatggctgggattcagggaaagggactcaagcatcgaatgggggtgggttggatgccctttgaggtcctggcctgcctgagcgcccctggctgtgtgggggttctgcctgcccctccctcctcacctccttcctccccctcctcctcccttccagcaacagatttccctgctgtccctccaacatagagctttccctgtgcggcccctccctcttttcttcaggtatctgcttaaatgtcacttcctcagagaagccctctctggcagctctatctggacactcccctgacccaccacgctgtgtcctccctgctggttttttgtttgttttttgagacagggtctcactctgttgcccaggctggagtgcagtggtgtgatctctgcaacctccgcctcagctcactgcaacctctaccacctgggttcaagtgattctcctacctcagcctcctgagtagctgggattacaggtgcccaccaccacgcccagctaattttgggagcctcagcctcccaaagtgctgggattacaggtgtgagccaccacacccagccctccctgctgtttctcatagcactcaccactaactgcattgatactatttggctgtttacttatcatgttaggggggatgacacttgtcattatttcatacaatcccagtgcttcagttgcttaacacggcagaagcaggtcttgcccagaggacattttggtgagggcgtttggcaggtggcctttcacaaggtgttcaggggcccaggctcctgctaatttgtggctctgctatcccccagggtcttggagccccctggcctgaagatgggggaagagagaggaataggagacaggaggggagggagtggagtggggaaggagggcaggagtctgtgggagatttttatgggccagataagggagtggcttatattactttgcccacatcccattggccaagacccagtcatatggccatagccaactgccagggtgactgggaaatgtagtcctcctggtgtctagcaagaaaattaattaacttttggtgaactcctagcagtctcagctacacttatttatcacatgtcattgaatttatgacatcatctattgcaagggacaccatgatttctggaaccactaattaaattaaactaagacatgccattgatttcaggtgaattctgattgccaagatggtaaaatgtggaaaaatggtacagctcggagtcaatgaactatggtattgtctctccttgaggacagggacccattcaccttgctcaccaacatattcccagagctgcaagagtgtcaagcatgcagtagatattcagagaacaatagttgaggccaggcacactggatcacacctgtaatcccagcaatttgggaggctgaagtgggaggattttctaagcccaggagttcaagaccagtctgggcaacatggggagaccatgtcgctacaaaaaaacaaacaaacaaaaaaattgtttaaagacaatggtagttgaatgagtgacagtgtgtgagctactcttttgtttaagtgcgagaagcccccttgagtaaactacagtgtcagggaatcaggccatgctcgttcacctgaacagagatgctgcaggggcatgggaggaattgccaacagtaactggggcttctaggactctctgcctcaaccgttccttctctctgctgccagcttcgatattcttctctctcactgcacatgggagggaagaatgaccttgctcagctcttgagctgtccatcttactgcctctgtccctggagaggcagccctgacaccaaaaatctaatgggagagactcactggcccagcttggatcaggagcacaccctgggtcaataagctgagccaggaaggcagatataggatgtctctaagaatatggcaatttctgcaggagctgtgtgtgtgtgtgtgtgtgtgtgtatgtgtgtgtacgtgtacatgcatgtgcacagaaagacaggcaatgtatgttggggtcagacgtccttcacaggagagaagctagtgcttggcagtcagttctagcagtgcctgaatatgggacccctttgcctgaaaagggactgtgtcagtgaaagtaacaggcatgcaaatacataatgaaatgggtgggtgggaagatgcatggatggatgaatgacagaaggagagagggagcaagacagtcttacttgctttagcattaaacattttaaagaatctaaatggaagctgtctcctcattaccaaatagggatgctaaaaacaactcttaatatttattaagtacttcctgtatgccaggcattgttctaagctcttttctgcattaactcactaattcccaagaccatcttgtgagatgaatactacgatgaatactataattcacatccccattttacagatgacaaaactgaagcatctagaggttaaataaccccattcataaggggcagagctaggattcaaacccaaacagtccagctctaaccacaaagctctctggcccagcgccatggctactatgaggattaaagccatctggaggctactgagtgtgttcaatgacagtaattgggttatatatatgtttgagatggagttttgatcctgttgcccaggctggagtgcaatggcgcaatcttggctcaccacaacctctgcctcctgggttcaagtgattctccttcctcagcctctggagtagccaggattacaggcatgcaccaccatgcctggctaattttgtatttttcgtagagacggggtttctccatgttggtcaggctggtctcgaactcccgacctcaggtgatccgcccaccttggcctcccaaagcgctgggattacaggtgtgagccactgcacccagccatgaggtaggatatttatgccacatcactgcttgatatagagtgaaaataaaaacagatttaagaaaagttaagctaaatttacagatgtcagaactccaatagctactgaaaagaaggatactagaggtgagtttgggggcatattctgaattttcgatgtccttccctcaaacacacccctttgtggtggtcagagcccagagctggccaaggctaggtggactaaagtgagagctaccaggtaccattgggccctgcataaggacacttgactgagaggacccaagggagggctgaagtttcaaaaagccagcagtggccactctccgtgagcctgagctcatgtgtgctgggcttggccagtgaactgggatctcccagctgtcccagggcagccactctgcctccaattgtctcttcctgccttggtagagcctctctcttctcattgtgatgcctgcagcctggaaaatcatggataaaaagccctgattgaaaggcactaattacccattattattttccatgccgtaatttgtgcggaatgagatttcaatcagttgtcggggatcagcctggttttgactaatctttctaacgacaagatgcttaattacagatttttgcctgagctccagagcgtgcagagggaggcaactctcgctgaagccaccatgctcttgggtcatcctgcagccctgggtcccagagggcccccaaggggagaaagagaaagaaatcattaggaaaatattcccaaggaggccaaataaaatggcaccaccacagagacggggctgtgttagcaacatggacatagagggtattggggggctgctttctaagtcaactcatcctccagaacaggtcaccacttgctgtgtctctattgcccccatcagccccagcctcccccaaagcagcctggcattctagttagtaagtttgagcaagtcattagtttcttagggctgttttattatctgaaagtcaccagggtagtcagaaaaatctctgagaacttatgattcagtgactccagctgtgctgaagtgtgtgtccagaaaagtgttacctattgttgaaagctgaaagatacacatacccaagattcaatcacacaggagtgattaaaaaaaacaccatctattaataaaataggcagttcaggccgggcgcagtggctcatgcctgtaatcccagcactttgggaggccaagacgggtggatcacctgaggttgggagttccagaccagcctgaccaacatggagaaaccccgtctctactaaaaatacaaaattaactgggtgtggtggctcatgcctgtaatcccagctactcaggaggctgaggcaagagaatcgcttgaacccgggaggtagtggttgtggtgagccgagatagtgccattgcactccagcctgggcaacaagagtaaaactctgtctcaaaaaaataataaaaataaaaataaaataaaataggcagttcagattactcagagggaaggtcaatttgaattgatgaaaaatctgagtttaagttttatgtgtgtgtgtgtgtgtgtgtgtaattaatggatctcagtgcacagaattggattcttcattatcgctggttcgtaacacttaaccattggcctacttgccccttccttccttccttcctgcctgccttcctgccttcctgccttcctgtctgcctcccttccttcctttcttccttccctaccctccctcccatgtaataagtgcccatgaatccatattcaacaggaaaactggaaccttgacagtaattcgcatctagccacatggtcctccccatcctaccctcctgttaggggcattctgcaatctttaatactattttaaaggaaatttagttacagtatagtagttctaggtgcctgaggggctgatttgtgactcataaagccttgctggagggtctgaggatctgctttaatggatagctcttgatggcccctggttagcaaattaattattgaaatgtacataagaatctctcaagtgttcagaaaccatttttcttctgtggagtggattcccatgtcagttttgtttatcctcttaatttgcccagccagcttctttccctcctggtctatggcaagttccttgaagaatcatcctcaattctaggtctgggggccttggatgagggaaggggtttgctgggtttaaccacaggcctgcccactgctggactttctcagaagaatcacagcctcaggcaacatccactgagtgcctgcttgtcacctgcgctgttctaagcattgtgccttcattggctcttgctcaactctgtgaaggaggtgctgtgattgagcccattttacagatgaggaccctgaggtccagagaggatgacctgattactcaaagccagcagcaattagggatagaactggcacgtctgctaccagcatgcaggcttgtagccattaagtggcccagctgcttgttccagttcttaaatgcatggccccagcagggatgaggctctgggggccgtccttcagcctgacccagattcttgggtgtggtgggtagattctaccccatagaggaaagcaagctggacgcttatcaggccagtccattcctctgcctgctgccctctgaccagcagcaggccacctagtgtgggaaagatccttgagattccagcgtaaaaaacagtgagaggccgggcctgatggctcatgcctgtaatcccacattttggaaggccgaggagggcaaattacccaaggtcaggagttcgataccagcctacccaacatggtgaaacccgtctttactaaaaatacaaaaattagccaggcatgggggcacacgcctgtagttccagctactcaggaggctgaggcaggagaatcacttaaagctgagaggtggaggttgcagtgagccagatggagctactgcactccagcctggatgacagaacaagactccatctcaaacaaaacaaaaacaaaacaaaacaccgatgatgatctcttgttgataccctgaaatctgtcttcctctagaagtctaaggcaaaatagttcagcaatttgagtttcattcagaacttttgagattcccctgctctctgcattaggaaaatcttcaacctgctttgtaatccagcagagcaatgtccagccaaggcaggaagagccccccagcaagctcggtgtcccctggggatcaggctgcgaagggaacagggtcccacgctggctactgagaaggcccagggcagagatgagttggggcacgagggaggccacgtttaatcagatgggggtgaaattgaggccagggcagcgcttgctaagctccagttaggagatgaatcaaagggaaaatgatgccccaaggggcttcgaccactgactactgccctttcaaaggctgcttggatgggcgtctgttccctccccatgaagagtcaatagttatcgatccagtggggaactgggtcccagccaaccacagatgatggacttgacactccccgctcctccccagaacacaagggtcagctgcctcctgcctcatcctgcagcagctactcctcctagacaccggcttggccaccaccccatggccacctgtgaaatctgaagtgccagtctcaggcctagacgccgtctcccaaccttccagctttcttgcttcttcctcctgctggacctcagcctcagcctcccggagaccaccattgccgcctctccattttctcccaatcccgtcctttctgacatcactcccttgtccaccctcttccctcatacttctaagtcagtggttctcagcagttttgctcccagggagacatttggcaatgtctgtaggttttggctcacatacttgggggcagggtgctacgggcattgagtgggtagaggccgggggtgctcctgagcatccagcagtgctgggacagccccatcacatggaatcactcagccccagatgttagtagtgccgaggatggaagcctaggtctcagctgctggagatggggcccgcttgcattgttgcaccagcatcatgagttaagaggcctggagaacctttgcgtcccagatttctgctcccactttgtcccacagttactattgcaaacttccctccttctcctagtcctcctgccctccggcccttgccttcactccctgtccctcctacttcacagagtcactgcaggctgagtggaggtggtgtgggtgggtttggggggtaaagagggcctcactcaatgcccccctctgccacctacaaacttctcatctgtacagccaaccttccctctcactcttactgaataagctatttctctctctcttttttttttttttttttttctgagacggtgtctcgccctgtcacccaggctggagtgcagtggcacagtctcagctcactgcaacctccgcctcccgggttcaagtgattctcctgcttcagcctcccagtagctaggactacaggcgcatgccaccatacccagctaatttttgtatttgtagtagagatgggtttttgccatgttgaccaggctggtcttgaactcctggcctcaagtcatctgcccaccttagcctcccaaagtgctgagattacaggcatgagctaccacacccggctggattccttgcaaactcttacaagatcctctcatgatggcatcacttcttccagtaggaccccacccttaagaatcacacccttaagaatcaacacccttaagaatcacagctgcaccaccaaaaccaaaccaaacctccctgtagatttcttgggccctgcctgtagagacgcttcttcaaaatatgacgtcagtgggatcaggtctaggaagccacctgttcaccaagcccctcagctgcctccgatgaagattgaagtacagtttgcaaaaagctgacacgtattttgtgtcttcagcctttaagtgttgattttgccctctaccactaatatttaacatcgggtagccatatgattcatgatctacttcagggagagaagtgggggcggtgatggtaatgacactggaccagcagtaggaccgagattgctcagggccaactgggaggtatcgatacctaatttttaaatgtcttaaattccttacattctcaacacgcccccttctcatcaaagaagctgacaattagtactgacaacagtaacaaaacattccttccccacgtcacagcctccaagtccaggagggcatgctttgtttacaaggtagctggtgctgcctgaatgtgttcatgaaggcacccctgctccgcccagtcctctacccttcacggccaattttcctgaaagaattgtctgcattcactactttcagccattgcaatgaggcttctgtccccatcatgcagtaacctggctgtggtgaatgtccccagacacttcctgactgctaagtgtagggatacttgccccttctcactctcactccacctgaccttataggatggaatctgctgcccaccgcccttctagatggctctgctcatccaatttccatgacatgctctattttttccttttcccacacctctggttacatcttctctgtcttcttggacttctttccctctgtcctgcctttacattttttttttttttttttgagacggggtctctgtcacccaggctggagtgcagtggcacaatctcggctcactgcagcctctgcttcctgtgttcaagcaattcgcctacctcagcctccccagtagctgggattacaggcatgtgccaccatgcctggcgtgagccactgcacctggcctgcctttaaatttttcattcgaatgaatgaacacatgaggtcctgggggataaggacagatggagggagtgggcaggtctcccagagggtctggcctctccagcaactttcttccccctgcctggtgcatcaggaaccaggcagcccagagagcactgtgcctctctccccctctgcttccagagagttctctattctgacactttataggttaagaaataacagcgaagctgggggtggtggcccatcctgtaatcctagcactttgggaggtaaaggcgggggatcacttgaggtcaggaatttaaaaccagtctggctagcatagcgaacccctgtctctaccaaaaaaaaacagaatacaaaaattagccaggcgtggagtcacgcgcctgtaatcccagcctctcgggaggctgaggcaagaaaatcgcttcaaaccaagaggcagaggttgcagtgagccaagatcgcacacctgcactccagcctgggcgacagagccagactctgtctcaaaaaaaaaaaagaaaagaaaaaagaaaaagaaaaagagcagtgacaggattccagggtttggaactctgggtggcagtcagacattgtctgcattttgggggattggaaagatgaggtccctgcctggagcagctcttgcccaggcctggtagcagagaggcagagtgctgtgaagcaaggaacgtggacctgcagtcaggttcggactgcagcttctcccaggactcaagtgaatgggataggctctgagctccggccttttccttctcccaggactcaagtgaatgggacaggctctgagctccagccttttccttctccgaggactcaagtgaatgggacaggctctgagctccagccttttccttctgtaaggtggggataggagggcagagcggacaggctgtgaggattaaataagatggcacggaagaaggtgtctcacatgcagctggggcctgatgggcagccgctagtatcgcccagcctctgagaggggaagctgggcagctcctgagagtgaggaaaacatgcagaagagcctggaaggaatttcaacccagaaaagaagctgtggccctctgggggtcttcatatagtgtgaaaatatgaagaatgagagaatgaatgaagcaagaccagaggcaccgcagcagtgcccccatcagcatggcacccgcggggccctttctggcactctgtgcacttgtgttggcttagtgtctgttgttcctatgaaagtatgagcgtcttgagatcgtgagctgtgcctgtcgtgttcccattatctggccagcacttggcacatagtaggtgcaaaaaatacacattgacagttcctagaaaaggcatgctgaggaggccaaaataatagttatggaaatgaggcggggtgtggtggctcacgcctgtaatcccagcactttgggaggccaaggcaggcggatcacctgaagtcaggagttcgagaccagcctggccaacagggtgaaacccccatctctactaaaaatacaaaaattagtcagtcgtggtggcgggagcctgtaattccagcttctcaggaggttgaggcaggagaatcacttgaacccaggaagcagaggttgcagtgagccgagatcacgccattgcattctaggctgggtgacacagtgagactccgtctcaaaaacaaaaaacaaaacaaaacaaaaacatggaaatgagaaagctggaggactaaaattactagatcctcctgagttgggactcaggctctaaattaatagcgggcttcctgtaccaaccctgatagttaataacgggcttcccgcaccaaccctgatagagttaatagcgggtttccctcaccaaccctgatagaggccagcatcttctttgcttccctctcagccctgagggtcttcatccagggcctggaggtggggcccagacactgcaggatgcaggatgctttgcacccttctgaatcaaggaggggagcggaagaggaaaccaaggcttggggagcaaaccgccgcctgctctggtgtccttcagggttgtccagccatgagacgggtgcagggaggcagttgggaaaactgtggcctgccctctcctgggaggggctgggagctttccatttactttccttggggcaaatgcctcttatccatcaaggcacagatctgaaacaggtgacacagagtacttggtcactacatcatcgctgctgtaattactgtttatgtcaagtgtatctcctgagatctctggagccctctgcagcctggggaaggtttgggctgaagacccctgggatctgggagctgtgttgctcagcagggtttttcacagtgccctagggtcttcctgtgaaaagcaaaacctaaagcagccatcaggaaagcaggaggggattaaaagttaggatgtggtcagctctattctgcctgcctcgtggaagggtgcctgaggagcaaggtgcgcccctgttggctcatcacatgcccctgcagctgatggcctgccaggctgatggtctttcctggggactccactggtggttgggaagaaggtgtgtggcagtgcccagggagatgatcacagagatgtagaagggcctggaggagattctcaaccaggggactggggcttataggagagtgtctccgaggactcagggacattccacaggaaacagaagagacccaggagtctctgtcttcacacactgcattttgggagttggtgaacttctggagagtaggagctttatgttatcttttatctttgtgtctgtagctcccagcttctggtctatgggaaagtgagttccttgactccagccatagtcaatggcagcccctcaggaggggctaattaattaattaatcaatttttgagacagagtcttgctctgtctcccgggctagagtgcagtagcccgatctcggctcactgcaacttctgcctcttaagttcaagtgattctcgtgcttcagcctcccgagtagctgggactacaggccggcgccaccatgcccggataatttttgtattttttgtagagacgggctttcaccatgttggccaggctggtcttgaactcctgacctcacgtgatccacccacctcagcctcccaaagttctgggattacaggcatgagccaccacgcccagccaggagggcttaatttgtattaatcattaatgagaccagggacagtggaggcctctcccaatcataaggttgcacagacacattttgtggcattgctatttggccatgggttgcaagatgcaagtgggctctgtgggtgtgataagagggagagacagaccctccctgccacccaagagtcgtctttccattggcaggctgtcctatgacctccctatcctttgctcctctgcaagatctttccctttttcctttcacctgctccaggcataagcatgagcctcctctctacctccatagggggaggctcagggagtgaggcagcctgtcaaggacagggacagatcaacaccacccaggccaccctcagacccaatcctggctggaatgtgacccacagctgggtttccctgaacacacaccttaatctcccaggtgtgagctcagctgtctttcttgtccatgttgagagaagaacaagtcctctcccttcatcctgggagctgggatacgggaggggaacacccttgcccgccttctcctccaccagcatggccggggtggaggggcttggtttacaggaaacattctgttatcccacacagtgatcttgccatactggtaattcacctggactttgtgggtgggtggggaggctcagtgggtagaaatagctgggggatgctcagggttggggttagaatgctccctcaagctttccagtggagacatgtctcttgggggacaggcaggctgggtagaagctggctactcggggtctaggaagggaaatgagagagggagggtttgggagccaccttccagacatgccttctggtaccaagcctggaccagtggcaaaacccaaagggcagccaatctggctggtacctttgccacaggattccttcttgaatcagccaaataacctgttgcctctggttccgatcttagtgaaggtaggggtcccagggaagctccaagccaggtcactgtacttagtctctgggccaaagctgtactgccaagactgttacattgtagccattggctgggtgcagtggctcacacctgtaatcccaacagtttgggaggccgaggcgggtggatcacctaaggtcaggagattgagaccagactggtcaatatggtgaaatcctatgtctctattaaaaatacaaaaattagctgtgcatgacggcgggtgcctgtaatcccagctacttcggaggctgaggcaggagaatcgcttgaacccaggaggtggaggttgcagtaagccgagattgggccattgcactccagcctaggcgacggagcgagactccatctcaaaaaaaaaaaaaaacttgtagcctttgtgtattattgttatgcaggaaggttggccaaacattttggctgactagtttccatcttgtgtcaccctcaaactagaaatttgcaaagcactagggtgcctaatctgaagattttttgtttgtttttgagataaggtgttgctctaccacccatgctggaacgtaggggtgcgatcatagctcactacagccttaaactcctgggctcaagcaatcctccctcctcagctcctgagtagctgggactacaggcatacaccatcatgccaggctaattttttttttttttaacagatggggtctccctatgttgcccaggctggtctcaaactcctggcttcaagcgatgatcctccccgctcagcctctcaaagtgctgggatttacaggtgtgagccaccacacctggtccgctgaagtttattgatcaaaataaagtttctttgaggcctccgaaggttttggaggtaatgccagaaacttgctcccggctgcgccgaggggagaccagctgaccttctccaccgttgttttatcgcaccaaagccttagcatagagcccttcccagccaccctacctgcggggctggacccgcccaccacacccacagcaccttgctggggctgacttcccgatttgtgtccacaggctgctgaacaggatgtcctcggacgacaggcacctgggctccagctgcggctccttcatcaagactgagccgtccagcccgtcctcgggcatcgatgccctcagccaccacagccccagtggctcgtccgacgccagcggcggctttggcctggccctgggcacccacgccaacggtctggactcgccacccatgtttgcaggcgccgggctgggaggcaccccatgccgcaagagctacgaggactgtgccagcggcatcatggaggactcggccatcaagtgcgagtacatgctcaacgccatccccaagcgcctgtgcctcgtgtgcggggacattgcctctggctaccactacggcgtggcctcctgcgaggcttgcaaggccttcttcaagaggactatccaaggtgcgtggtgggcctcaaggagcctgggcgcagggttgggggtggcagccgtgcctgcgggtctggcagaagccctaggaattcccagagactgccaattctgggcgctgttggagcggtacttctgtggggcgccttttcccttgctcagggcttctcattctggcactggacagctgcaagactgttgttgagatgacacgcgttccccaccccctcagctcccccatgcacagccccagaaaaccaaaagaaaatccacaggaatgccaaaccctgggtgcttctcactggtatggagtacactgtcaaatgtgtgtccctcaaaaagtttattttgtgcgggggaaaaatataatttgccctgcaattccagacttacgggacatagaaagcgtccctcaccttgtttttgtcttacttatacaagtaaaacgccagatgtggtgactcatgcctgtaatcccagcactttgggaggccaaggccagaggataggtcaagccaggagttgagaccagcctggacaacacagtaagaccccatcattattattattatttttaaattaatgcatggtggcacacacctctagtcccagctacttgggatgctgaggctgcagtgacctgtgatggcaccactgccttccagcctggaagacagagcaagaccctgtctcaaaataataataataatatatgagtattttctcactgtagaagactcagacctgttggaatcaggacaggagctcatcctgtctggatcccagtttaacctatttttaagaccgaccttccttcattccttccttccttcctttcttcctcccttcctctctctctctctcaacccatcctgtctggatcccagtttgacctatcttttaagacctgtattttctttccttccttccttccttccttcctttctctctctcactctctttctttttctttctctctctctttctctctctctctctctttcgatgagagtctcgggccaggcacactggcttaagtctgtaatcccagcactttgggaggccaaggtgggccttgaggtcaggagttcaagactagcctggccaacatggtgaaacccccgtctctactaaaaataccaaacaaacaaacaaaaaatcagccgggtgtagtgtcaaatgcctgtaatctcagctactagggaggctgagacaggagaatcgcttgaacccgggaggtggaggttgcagtgagccaagattgggccgctgcactcaggcctgggcgacagagtgagactccatctcaaaaagagagagagataagggtcttgctatgttgcccaggctggagtgcagtggctattcataggcacaattattgcacactgcagccttgaactcctgggctcaagccatcctaccatctcagcttctcaagtagctagaacgacagtcgctgccaccacacccataagctttttatcaatacatttgcatatcacctgagtcacattccaatggccatggtggtggcaccctctttctgtgggtactagagtcaatcactctgacaaaaggcgtgcaagaaccctggtgggtcgctctgtaaagtcaccacgaggtgaattggggagaataaattggggagaatggtgggcctgcccccacagggctgttatcaaattcatggcagagagagaccactgggaccactggtgcacatcaccacacccagttaattttatttttaatagagatggagtctcaccatgtagcccaggctggtctcgaacacctgggctcaaatgatccacttgggcccactttggcctcccaaagtgctgggattacaggcctgagccaccgtgcctcgccgatagctgtgactgttaattgcgtcaggccctgggtagagcactttcattcagttagtcaagtatctgttgagcacctacaaagcaccaagccaggctgtaggtgctggtgataggatagacaaaatctctactcatgcaggtcactgcgatgagctggtgccatccaactggcacagaaactgcagaccagacaggagaacacccaggaaccacccatcctgcccctgcatcagatccctttccagggccctgcctcactgtccccagaatgtacctaccccattcatttcccttttagaagaggcaggctaagcttccccgggatgattctgtttattcaacaaatatttatgtgtttaagtttcttcagatggcaatctatttatgaaaccaattgaagacattaagattggatatatttccacttccacatatgagttgagatggtgtggtgcattggctaaccatcagggctcctggtcagagagttccatcgtccccttatagctgcaccttggacatgctccctgtttctctctgtgcttcagttacttcatctaaaaagtgagatatcagctgggcgtggtggctcacgcctgtaatcccagcatttcaggaagccgaggagggtggattgcctgagctcaggagttggagaccagcctggccaacatggtgaaaccctgtctctactaaaaatacaagaattatccaggcatggtggcaggtgcctgtaatcccagctgcttgggaggctgaggcaggagaatcccttaaacccaggaggcagagggtgcagtgagccgagatggcaccactgcattccagcctgggcaacagagcaagatcccgtctcaaaaaaaaataataaaactttaaaaaataaaaataaaaagtgagatattgttcctaccttatagagctgttaagaagcttacgtgagttaatatatataaagcacttagaatattgcctagcacctagtaagtgccaaacaaatgtttgtaattattattttaactttaacaatgtgatttaagacatattattatgaaaacaacggacacatttatcttatagaataagcttttgtaatctacatatatttaaataaaacaataattgttttgatctaacaggactcagattattttagctattttagttataaatttcttttttcttttcttttttttcttttttttttttttttgagacagagtctcactctgtcacccaggctggagtgcagtggcatgatcttggctcaccgcaacctccacctcctgggttcaagtgattctcctgcctcagcctcccaagtagctgggattacaggtgctggccacaacacctggctaattttttgtatttttagtagagatgtggtttcaccatgttggctaggctggtctcaaactcctgacctcaagtgatccacccgcctcagcctcccaaagtgctgggattacaggcatgagccaccgcgcccggtcataaagtgatttatttcttaaatgagcccttttaaaaaaataaacatgataaaaaaaattctagcagtgcaaaacagtagagcacgttttcctgaaaccccagacctcagttttcttaactatcccagaaggacccctttaccatctttgtcaagcaaatattttttgagcatcgtctttatcaggcactgtgctggcctccaggacataaaaatgaatgcaccctggtctctgcccgctttatacaccctgagtctgagtctgggggaaggccctgggatctctgtatttgaaaagcactgcatggtgatgctgtctcttgcctcagccaagaatgagaacctccagtatgatggtttttacacaaatcatcagatatttgacaaacacaaaatgtttaagtcaactgaagttaccaagataacaacatttttctttctaaattggaaggttgtcttggagaggttgccattattttagactctttgaggtcagtttttgaagaattgcttgttagaagacagtcacattttcttctcaccatgttgttcttagatgggctggagagttttgaatcacattttttgaaagcagaggttaatgtgtgtaaactcagaaatcctactgcatgcttgacagaggcccaggtgtctgcgaatgttctcagcaagtcaggagtccacatgaaagattcgtaaatagtcttaattatttgctaccgcgaataggataatgatctcttcgtagaagtcaaaagacaaacagcagcatttgtgcagttggaactgaactgctgcagcctcttctctttccacaaggagagtttcaagttcgtaaccagaaagaggtttatattcaggacagggaaaagtaaactcaaggctgacagattgctgtggttattttattaactctttggttttgttctaacaaagatttaggttttgttgttgtttttttttttgagacagagtctcgctctgttgcccaggctggagtgcagtgatctcactgcaacctccacctcccagctcagcttcccaagaagctgggattacaagcctgtgccaccacacccgactaatttttgtatttttagtagagacggggtttcgtcatgttggccaggctggtctcgaattcctgacctcaagtgatcctcccaccttggcctcccaaagtgctgggattataggcgtgagccaccatacccagccagattttgttgtttctaaacgtagcaactgtagaacatctggaaaactaggaaaagtacagacaggagaaaaatgacctagaattggacaaccacagagacaaactcagaactcagtgagcattctttgagtccctctctgagtaaggtgcagagggggagcaggagagaaagggacgtggttctttccctaagaagctggaatctgttgtgggtttttttttgttttgtttttgtagagatgaggccttgctatgttgcccaggctggtcccaaactcctggcctcaagcaattctcttgcctcagcctctcagagtgcttaggattagagggaggagccactgcgcctggcccaggtagctgcaatctactgcttagtgcccatgagtctacaggcgtagcactgtgctccaaaccaggacatagtctcctaagcacctaatattcaggtcattttttttaagttctattgtgtggacagagggcttaagtcatggaatgagccattcacgagtgcctgtaaatgcttggaaagctctgaaaattgggccaggtgtggtggctcctgcctgtaatggtagcactttgggaggctgaggcaggaggatcccttgaagccaggagttccagcccagcccagcttgtgtaacaaagcgagaccctcatctctacaataaattttttaaaaattagctgggtatggtggctcgtgcctgtaatccctgcttcttgggaggctgaagtgggaggattgcttgagcccaggagtttggaggctgcagtgagctatgatcctgccactatactccagcctgggcaacagagctggagtttctttaaaaaaaaaaaaaagcggccgggtgcgatggctcacacctgtaatcccagcactttgggaggccaaggcaggtggattacctaagatcaggtgttcaggaccagcctggccaacaggatcaaaccccgtctctactaaaaaatacaaaaattagctgggtgtggtggcgcatgcctgtaatcccagctactcgagaggctgagacaggagaattgcttgaacccgggaggcagaggttgcagtgagatcttgccattgcactccagcctgggcaacaaaagcaaaactccgtctcaaaaaaaaaaaaaaaaaaagaaagaaagaaagaaagaaaagaaaagctctgaaaatcatgttaatcgtgttacctcacaccctgcctcttccttagatcacttccttctgcgcaatccaatggttgtactaatatgggaagaaattttgcagaaacaaagatgtcatgatagatttagggagaaagactaagaccgagtcattccttctccaccaatcttttttttttttttttttgagacagagtctcgctctgtcacccaggctggagttcagtggagcgatcctggctcacttcaacctcggcctcccaggcttaagcaattctcctgccacagcctcccaagatagctgggattacaggcgtgtaccaccacacccggctaatttttgtattttcagtagagacagggtttcaccatgttggccaggctggtctccaactcttgatctcaagtgatccacccacctcagcctcccaaagtgttggaattacaggcgtgagccactgcgtccaatccaccaatctttattgagccctcactatgtgcttggctggtagtacaatggcgggggagggaagagggggaagatgggcaaactacggcctgtaagccagccacccttggttgtataaatcaagttttgttggaatacagccacacctatttgtttgtatattgtctatggctgcttgagcgttacaacagcagagctgagtagttgcaatagtgacggcctgatccacaaaacctgaaacactcctctgcactacattgaactaggcagattcagtctcctggctctcagagacctataatcaactcctagtagtgcatgttagtgtttattccaaccctgcccaattctatgctatgaaagggaggtttttttctgttgttcgttttttttttttgttttgtttttgtttttgtcgctgggggctgtgatgacactcactgagaatagatgagctcatagacagatgaaggcaccttcctgaaggaacagaatggctccaagtcagaagagatagacctcaacctgattgcatttactcgcatatctaaagaaaaaaaaatgccaattaacaaggattggctagccctggaggcatagaaaaaacagacatacttaggcaaagccaccactcctaggaaaagggagtcttagcctagggacagcctgatgtgattaaacattccgtttatctgattaatatctttctggttaggatctagttcccctgcaggtcttctgcaaggagtgaatttgcaggtcaggcagacagatcaatttctccttgtatgtgtgctctctttgcatggcatccctgagcttatacatcaggttcctgaatttaggcaagaggagtgcctctgagagatggagccactttctgtggctggaaaagtcagctgcttctgggacttagggctgagtgacactgactccaccgtaatgaaaacctttgtaataaccttgaccctgtcaccctgtgtctctctcagcaatgactctgcctcctgttttattgagaaactagaactccctcagcttcctgccgccaaaccgatgcactctcttccatgttcgcagctgcttccgttcactgattccgcagctatttcttgcaactcactcactgctggaagagatgtctcctaccccaggctcagctcttctctggctttgaatcctacctccttccctcctcctgagaccctctcggctattacctcctctcctttgtcttcccttgctcattttctaaagtctccttccttccttccttccttccttccttccttccttccttccttccttccttccttctttccattaacattcaactatctctagtatctccaatcttgtaaaatatatatctcctctaccttcagcttcctggttcttcctctcttcctcctctcagttcttgacccagcttctgcgcccagcatcttccttctcatatccatggcttcagttgtctctgaaatcaggatgaatgctaattccataggtcttgctgtcatcctcttccccaagctccattcctttcacacctaatgaacatttccacttggatgccccagaagcaccccagttgcacgaagtcttaaacagaagcggttttccttccatcaccatttctccttgtgttcccaatacagtgcctgcatcagccctccatgttcaagccagacacctgggtcttacctttaactctgcttcctgtcccagcgcccacccccctaccaccccgaactaacatcccagtggccaagtcttgttcattctccctccttcagatcacttgacccagcagcttgtcttccttcccctgcttcagctcaggccaccgctgactcccaccgcttcctacctgttctccctgctgccaggctcggccgttcccagcctgaacacacatctgaccatgtctcccttctttcttgtggggagaatcaaagctccagaacatggccaaggacgccctctgggattgccccacgtctcatgccactctcttttgcatgctgtggtcaccctgattgctctgttttctagttaccagattttattccatgctttcaatttctagactttgcatatactcttctctctgttgcacctactcccaacctctactcccagcttgtgtcccttaggtctccagttagtaggcatttcctccaggaaggcttctctgattctctcctctcattcctcctggatgccctgcaaaggttcgcccatcacgccacccttctcccactgtatggttattgccattttttttgtctgataccccaagaagagtacaagctcctaaggcacagggttacatttacttacctttttttttttttttttgagaccgagtctccctcttgttgcccaggctggagtgcagtgacgcaatctcggctcactgcaacctccgcctcccaggtccaagtgattcttctgcctcaacctcccaaatagctgggattacaggcacgcaccaccatgcctggctaattttgtatttttttttttttagtagagacggggtttcaccatgttggccagactgctctcgaactcctggtctcaaatgatctgccagcctcgtcctcccaaagtgctgggattacagacgtgagccaccgcgcccagcccacatttacttcgattttcacttaaccccatgtcctctcacagtacctggcatgtagaaggttctcagtgtgtccaaatgcaatgcaatccccaaacaaagtgatctcccatttcccagggaggacaaactgaagaagttgggccagtttgcatatgtgtaaactttaagggatctaggtaaaatagtcagatgtctgcttataacaatatattatttagttacgcttgtatattttaaattaccttatggaaaacaatatattatttttgaaaagttgtttttctacacatattttgtgaaggaagtcttatcaaatgaatctttgatacaaatgtctttgttttccttctctagagttttttgagtcatttaacagtgtttcagtgtgctgccttcatttccatcagttaattgaaattttatgagaatgtatgcgctgctatccctaaagtttttttattttaagccataagtatacgtcctacaccataaggggagttctttttttatttgtgttgacttatgatcaggatatccacaatgtatcaggtacatactgcttttgacacccaacacttgtaagattattttcctgggaataactaaatttgtgttaaatttctttactcccaggccaggcatggtggctcatgcctgtaattccagcactttgggaggccgaggcgggtggatcacttgaggccaggagttgaagaccagctggccaacatggcgaaaccccatctctactaaaaacacaaaacttagcttggcatggtggcacatgcctgtaatcccagctacttgggaggctgaggtacaagaattgtttgaacccgggaggcggaagttgcagtgagccaagatcacacactgcactccagcctgggtgacggagcaagactcagtctcaaaaaaaaaaagaaaaaaaagtttgtttttatttactccctttgtagtgattcactcaggcaaggagcattgattgcggtcttcttaggaccatgtgtcttcccaaattttagattgttgttcagtacaaagtgattgacttaatagcacctctgatgtgagaacttgtaaagactcaaatcataagcaattttctctctttttttctttcctttttttttttttttttggtccttgggacagggtcttgctctgttgcccaggctcagtgcagagacatgatcatggcttactgtagcctcaaactcctgggcttctgcctcagccttctgaggagctggaattacaggcatgcaccaccatgcccggctaatttattttttaaaaaaattgtaaagcggagtctctctatgttgcctacactggtcttgaattcctgggctcaagcattcctatggcccccaccctagtgggcttgcattgtagggggaaagctgacaataaatatgataaataatgaagcatggtgacagactgagacaggtgttatgaaggagaaaaaacaatgatgagaccagagagtgactgagaaagggggggggtctcatttagaaggaggattagggaaggttgtgctaataaggtgacttttaaaggaagctgaagctcatcaaggaatcctgggaccagcgttccaggcagaggaaaaagccagtgtgtttcaggacagcaggagggccaacatggctagtgtcagtgagcaaaggcaaagtggaaggggctggagaggatgggcaaagtctaggggccatggtgaggggtgcacttggatttttttccaggtagagtagcagccgttgactaacatgtgatacatggccatgaggggctgtacggttaggtaaagccagtctgcactcctccttgagttcccagggtagatggccaactttgcacaggccactgggagtcttttgagcaattcctgggtctctaacttaaaacaagaaggaacaagtaagaaagaggcctggcacagtgcttcctccattcacctggggcccagatgcaggcttggaagaaaactcccctaggagaggggaagggggatgattgatgggttattccaccttgggtcgcctccaggtcttttgtcctggagaatgcagctggcggatctggatcctggatcccgggaggcacaagacaggggtgcagagacaagagcaggagagggcaggagtcaggagctaggtgctggtcccggcccagtcactagccaactggctgaccttgggcaagcaaggactgagttcctctggcctcagtttcctcatctctacaagaagagtccattaaacccacaaaatgttagctatctgtagggcactggcaaatgacagaacaaatcacaattcctctttttggagacacagccaggatgccagtcagaatgtggtcagcctgtgacttaggtgacacatagagtccagagaaggtttataccttctggagggcagggagggcttcctggaagaagggacactttctcagaagtggaaggtaaacatgcttggcagcaagagaggagggggctcagtggtggatgatgggctgggaaaacagcatggcactggagtgcaccaggcttcacaggtcatggtaaggaacagttaagtaaggagtcatatttaagatttgagggctatttaaccaggcttagaatctcagcttcacgatttcttagttgtatcaccttgggcaagtgacttagttttcctgagccttaatgtccgtatcagtaaaatgttaatagttcctgcccctacagtgttattgcaaaaatgaaatgagacatgcatgtgagggtgtaactaagtgcctggcacatgaaataaatagtatttgttttgttagttgtgcttggcaatgggaagtcattgaaggcttctgagcagggaattaatcagatctcctttcagcaagataattcaggcaacaataggaacgatgatgtggaagcaggagaggctaggggctgggagcccagtgaggaagcaattttattttatttttattttatttatttatttttgagacagagtcttgctatgttgcccaggctggagtgcagtggtgcaatctcggttcactgcagattctcctgggttcaagcgattcttctgcctcagcctgcccagcagctgggattacaggtgtgggccaccatgcccagctaatttttttttttttttttttttttagtaaagacagggtttcactgtgttggccaggctgatcttgaactcctgacctcgtgaccctcctgccttggcctcctaaagtgccaaagtgcagggattacaggcgtctgccactgcgcccagcaggaagcaatttttttttttcccccaagatggagtctcactctgtcacccaggctggagtgcaatgtcatggtcttgggtcactgcaacctccgcctgggttcaagtgattctcctgcctcagcctcccgagtagctgggactacaggtgcatgccaccacacctggctaatttttgtattttaagtagaaagggggtttcactctgttggccaggctggtcttaaattcctgacctcatgagccacctgccttggcctcccgaagtgctgggattacaggtgtgagccattacatccggccacaggaagcaattttaacagtgcagttagggccgtccaaaccaagatcagggcaaaagggctagaaggagaagttaggcttgaggaactttcaaaagtggattcaggctgggcacagtagctcacacttgtaatcccagcactatgggaggcagaggcgggtagattacttgaggtcaggagtttgagaccagcctgaccaacatgatgaaaccccgtctatactaaaaatacaaaaattagccaggcgtggtggctataatcccagctacttgggaggctgaggctggagaatcgctggaacctgggaggcagaggttgtagtgagccgagatcaggccattgcactccagcctgggcaacagagtgagactctgtctccaaaaaaaaaaacaaaacaaaaacaaaacaaaacaaaaaaaaaggtggattcattattaaaaggatagtgactggattgtggatgctaagggaaggaggactcttagatttctaatttaggctactagggagatggcaaggccattagggggaaaacataaatacccagaaggaacaatttcgtcagctgggagagtcagggtgggaaggagcatgagataatggataaagttttggacatattgagtttgatcagttcacagagaccctggagagtttggaattacagcccagaagcaaaatcttgagtggggttttaagtctaaggagagcctctaagactgtggttctcaaagtgtggccctcaggccagcagcaaaggctacacctgggagcttgttagaaatgcaaattttgggccccaccccagacctactgaatctgagactggggggcaaggcccagcaatctgatttagcctttcaggtgagcttcattcaagctcaaatttgagaactggtgttcgagagaaagctctttagaaggagaagggttgagggaccctgcggaacagaaggagcataggaggggccttgaaaggagattgaggagtgccatatttcatcagttctaagatgcacattttctccaagtaacatctctgaattgggctgcctgtcacagttaccattgaccaggtgacagccgttccctggttgtcactgcactcaaacgcacctcaaaagttgcagagtaggggccagtggcctgagacaacagtgaacactttcttaacaaagcccttgatagtagagaggatgactctgtgaaaaaaacatgaaaacaatgactgatcaaaaatgattcagaagagtttgagatgttttagcaatattttaaccaatctgtttttctcgtattttctcttatgtatgtgtaagaaggctacgggatcaaatcaaatctgaaaaaaagctcttttttttttttttttttgagactgggtctcgctctgtcacccaggctgaagtgcagtggcacaatctctgctcactgccgcctcagcctcccttcaacctccctgggctcaagtgatcctcccaccttgagcctccaaagtagctggtaccacaggggcatgccaccacactcggctaattttttgtatttttggtagagatggggtttcaccatgttgtccaggctggtcttgaacacctgggctcaagtgatccactggccgtggcctcccaaagtgcctggattacaggtgtgagcctaatcggtggattcttttttctttcttgactgatgggtaaaataatggtacatcttaccactgaaagcatcttagttcattacaaaccaggcgactaaaaaaacaaaagaaagcaagtactccagagttgattaaatacacatagaaatagtcagagatgttgcaagagtccctgcagagagaagggagatgaaatctaacaaaatagcctgttttaagagggtggcaatgggtgtctgctgcttcaggaaggaccaggaggagaaagaccaagaggagacaattgcatttggtagctgaaaggtcactgttgtggaattctaggattctctgggtgggggctcttgctttcaattcgtttgcattcattatctattcaacagatattaatcgatttccaggattgagatactgtacttgagatacagaaatgaaaaacataataatctccattcccaaaaagcacacagttcagaagggaggcccacaggtacacctgtgattatgaaacactaaggtagctgctttgagtgtggggatggggtggtggcgagaaacatgcgagcctatctggggcagaagggaagaaagtgtcaccaaggaggccatgtgagagctgtggctccaaggatgtggaggagctggccaggaggaccaaatgaggagtttcaggtagagggaggtatgggagggccgggggctccatgagatccatgaactattatacttactgacagttcagatctgctggagcctacaaactggaggcctcagtgagaggggattagggtggacaatttggaaatggtcagatcataaaaggcctggtaggctttgccctggagtttagattttgttctctgctctgggtggcaagagttggagaatttcttaaatttatactttaaatttatttctaattcttttcaaaataaggtatacaaatagtttaaagagtataaaagaaacataacttttaggccaggcacagtggctcatgcctataatcccagcaatttgggaggccaaggcaggcagatcaccaggagttcaagaccagcctggccaacatggtgaggagtttgagaccagcctggccaacacggtgaggagtttgagaccagcctggccaacatggtgaaaccccgtctctactaaaaatacaaaaattagccaggtgtggtggcgggtgcctgtaatcccagctacttgggaggctgaggcaggagaattgcttgaacctgggaggcggaggctgcagtgagccaagattatgccactgtcctccagcctgggcgacagagcaagactttgtctcaaaaaaaatatatatatatgttttataatgaaggatcacagtcactggccctacccattctcctcccactctaattcagagttaaccatttaaaaaaaactctcttctatcatttagtaatattgtgatcttatagctatatttgctgacagcaagttttaccttctttcttgacttgctgttatggaagatgagttagctccaattacacaacccatcccaacacacacacacgatcatcccgctgtcccaatatggtaatatcacaaaattttctattttgcctgttgccatttccttcttgacatgtccttgacttttctcatgggttgtattccctgttttctggatcctacctcttcctctttttagttctttccttctttgggaaagcatgtagttcatgggcgtccttaaaaggtataggagaggtaaaatcggcaataccttgtatatgtggaaatgcctctattccatcctccaaccttcacattagattcatgtcttggcttggtacagaattctagttgaaaataattattctcagctgggtgcagtggttcatgcctggaatcccagcactttgggaagctgaggcgggtggatcacctgaagtcaggagttcgagaccagcctgaccaacctggagaactcctgtctctactaaaaatacaaaaattagctgggcttggtggtgcacgcctgtaatcccagctactcaggaggctgagtaggagaatcgcttgaacccgtgaggcggaggttgcagtgagccaagatcacaccactgcactccagcctgggcaacaagagcgaaactcgcacacacacacacacacacacacacacacacacacacacaaaagaaagaaaagaaaagaattgtccatcaggatttggacaccattgctgctttgtcttgtagctcctgctgctgctatatcttgagtcttcaatgcctgacactttctgaggttctgcagtgtggctagcttatttcttatctggatcccttgctttagctacctaggtttctactttcctcattctctgagacagttcccactcccatcctgccagttattggatttttgggatgacgcatagacaggtgtgctccatgtgccatgatgggccagagaacccataaacttgtctgggaaagttattaactgacctccagggggcagtgtggaggatagattggaaagggaaatggagacaggctagtgcaggaccatggtcgcaaggggtgatgagtgtggaactaggactgttgcagaagggagggagggagcaggtatcaggaagtaggatgaaaaggatcttaggggtagatatggaaaaatccaggaggccccttcatttctgacaggttgcaggtggctagtcgtccctttgatgagacaagggatacagtaagaggaacaggctggatgaggatgggttcagtttgagaaaggtgagggcccaggggacctccaggtagacacatcagcaggcagatagctataagggcatgagcactggctgcagatcattgccaatttcgtgatagtggaagccagtggcatgaatgagatcatccagctcatgggtgagggggaggatcgggagagcagagggccctgggcaacgcagagatgaaagggatggtccctgtctccagaggtgtgtaaataagggagtggaactgagtgaccatcaccccagccctttcacaccagctgaatagagtggtaccatttgagctctgtcattagccagcagcctctgagcccacaggtccccgagagctatttgtccgagcttagcaacccccttcctgagcctgtggcagggctgccctgctctctgcagctgttcatgaacagctgatggggatgaccctgggatttccttctctccgggaagcacaggatcaaagagagctgatggtggtggttacccctctgccttaaggtcacggagaagtccaggtcaggttctaccagtgcctgcctccttcccacaggcaccggcagcatccactctgaggtctagggaccggaggcagaccttaatgttctcaaatatcacagttggtggctagcctcggatccaacacctagaaaagacttatcctggaatcctttggttgtatctaccctgtaagacaatcttgtccaacctgtggcccaggatggctttgaatgcggcccaacacaaattcataaactttcttgtagcaggatgagtttttttttttttttctcatcagttatcgttagtatattttatgcatggcccaagacaattcttcttcaatgtggcccagggaagccaaaagattggacactcctactgtaagatctgcctgaatataaaaataagcagagcagccgtggtggcctgtttgccagtgcctgcacttcactaagacctttgtatgctttctgtcactgaatctagggaacttttattttttatgtatttatttttgagacggaatcttgctctgtcacccaggctggagtgcagtggcatgatctctgcaacctctgccttctgggtttaagcgattctcctgcctcagccttccgaatagctaagattacagatgcccaccaccatgcctggctaatttttttatattgttggtagagacggggtttcaccatgttggccacactggtctcaaactcctgacctcaagtgatcctactgcctcggccacccaaagtgatgggattagaagtgtgagccactgcgcctggcctgaatctggggaacttttagataagaactttatgagatgggggctgtacccattttacagattaggaaactgaggctcagagaagttaggtgatgtgcccaaagtggagtctgcacctgtctatactgaatacactcccaggttagaacctggaatttatgctaaccattggccatgtccctgtcctgagagaactcatccccaaaactgccacacctcagctgcacgtgtgtgtgctgccaatgtcctatccctgttcctacacgctcctaggcccgcctcaagagaccacaggaattctgatgaattaatctcatcactttatcgaggaggcacttaaaaaaattacaaagcaaggccgccagcctggctttgctggcagctagccgctggggccataaaataaattgaaaggaaccaaaataaacaaataattaggtctctctctctgacacacacacacacacacacacacacacacacacacacacacacaaacacacacacatgcatgcaggccaacccctaaagggtgaagagcctggttggggacttgctgttagcacttggtcctcttgtcctgggagagcaccagttccagctctgcacacacacttcctgactccttgctctgagcagcagcctgtggccttatccttcctcaaaaagtgacaggttggctgagcagctgagagcaaagcatgggaaaagtgaagagtgtgcaaagggtgtcccaggcagctggaggtgtgaagcccatggagagccctgtgagctcctggcacagtggctcagagcaggctggagctgacgggctgggtcccagtccttactgtcccataccctggattctgttcaccctctccttttttttttttttttttttttgagacagagtctcgctctgtcacccaggctggagtgcagtggcgcgatctcggctcactgctccctctggctcctgggttcaagcaatccttctgcctcagcctcccgactagctgggactacaggtgtgcaccaccacacctggctaagttttgtatttttagtagagacagggtttcaccatgttggccaggctggtcttgaactcctgacctcagatgatctgactgcctgggcctcccaaagtgctgggattacaggcgtgagccaccacacccagcccctctatcttacagatgagaaaaatctgtttacctccggggttgctgggaacatgaaatccttgggatctgtaaagcagagctgtggctgctccctgacaagcattcgccagtgtgagctccccgtgtgtgcgcattgagcggctgggtgtcccaggcagtgggactagagaggagctggagtaggtggaggaggcagacagatacaacacaggggacattaatgggttatcagcagggagaaggagcgcctccccatgtgggacctggagaaacagagggtggagggagcatagagagtctgttctaagctgcaaagcaaaggcctggcgacctaggagaccatggagttccagaaagtgatagttatgcagagcgaatggagggaatcagcacgctgaggctgcagagagagggtgggcctgggtgggaacgggccaaatcctccagcgccttctaagccaagataaaagcttgaatgaattagctttcatatgtgtttttctcctttctgtttgtcttttgaattttaccgggcttacatgaatattgaaattattccccaagaaaccacccaagccagaatgctctaagaaatagggctagacaaaagcaggtaggggtacacagaatcttcatcccttccccttcccatcgccttccatcctccagcacagagcatgacctccagctccctccctgcaagaaatgggatggggagaaaggtggtgcctgctggacttgagacagggagagagagggagagggggagagagggagatggggagagagggagggaggatagctagccttcacctgtagatctctgaggtgctccggaaatagttttcttcaccagtaaaaagggatgagaatactctctgagcctttgtgagtactcaatacagttaggcacattgagtaattttgctacctcaaagcactttgttaatggtagaacatggttcatgcttgtttccagaaaatccaatagaaaaggtttccatccatatcccatgtggggaggtggtgacacagggaagcccaaggccacccttctcccctactacccaccaggcgacctcagccgctgggtcagcaccaggcacctgtcctcagtggggcagcacttccaatttccccatcctccttgtgagatacagggtgggacaggagatctgtgtggccttgggtaacctgcttcagctcccagagcctcagtttcttggtctatgaaatgggacactgatgtgccttcagaggctgttgtgaggactgagggagctgtgcagactatgcacacagtaggtgcacaataaatcttagctgctattcctctgaagtgggtagggtttggtgtggaggattcagataggcaagcctccagctcctccctgctccctcaggaggtggggctggaacgagagatgtgttctagttgagagattctgttctggaaaaccctggctcaggctgacctcaagcactttgggacaggagtcgaagagacacaataccaaaacagtactgtgatgtgctgttcttcatttgtacgttccagttacatttttttttgagacggagttttgctcttgtcacccaggctggagtgcaatggcgcaatctcggctcactgcaacctccgcctcatgggttcaagtgattctcctgcctcagccttccgagtagctgtgattataggtgcccacccctatgcccaactaatttttttttgtatttttagtagagacagggtttcaccgtattggccaggctggtctcgaactccatacctcaggtgatccacctacctctgcctcccaaagtgctggattacaggcatgagccactgcgcccggccactccaattgcatttctttacctcccccacctgctctccccccatcgtctttccctccattaccaggcacattgtaggtgctcaatgcgtattcgttaataagagtcagcaggtcagatgcctgtattagaaaggcagtcacagcctctcctgactggactgtcaaccctcccaggaagagcgctggaaggtcagttcaacctaaataagacctctgtgttcacactgcatagaaacacttggaaaactcatctgtaaaatgggaatagtattagtacttattttctctttcatggaattgctattgggaggggagggactctgtagatcagtcattcactgcattctacctgcctgtctctatattgcgggggctgtgctaagtgctgctggacactggggagcagcccaaggtcttggcttcgtggggcctacagcttaaaagagcatgggttgggtttatggtagccattcttttgttttgttttgttttgttttgttttgttttgttttgttttgtttgagacagagtctcggtctgtcacccatgctggagtgaagtggcgtgatctcggctcactgcaacctctacctcccgggttcaagcaattctcctatctcagcctcccgagtagctgggattacaggcacatgccaccacacctggctaatttttttgtatttttagtagagacggcatttcaccatattggtcaggctggtctcgaactcctgacctcaggtgatccaccaacctcggcttcccaaagtgctgggattacaggcatgagccactgtacccggcctggtagccattcttataacccatgaaaggagtggcctgaaaaatttatcacagattccctccgctgaatgaactctgctcataaaatgaccccctcgcattgaatagtgtttaaagcagttgtccatatgtggtcttggttaattcttcatttagtagattatctcactgttttgaagatgaagaaatttcaacttggtcagaggaaagtatatcctcaaggttagcaaagccaggtggcctgggcccctccagtgggatgcagaacccgggccttgatcctggtggacgcagagtttccaggaggcttttcccacatgttggggtcccaggctggaggctggaggagcctgtggtggtggtggtggtggtggtggtagtggtggtctgcactaatgttctggtcagcatagggggcgttctcctcctggagtaaaaggccagcttagtgagttttgatgtccctgcccagaagtggcttcaacactgtgggtggccatcctctggagagtgtttccccaagtagctgcctggtccacccagacctgccacctggagtctccatatggaagagttcaaaatgttctgacaagcacctcagagcacctgctttgagaacactaggggggagtggcagctctggcaaattaaaatccccatccagccagccctgcgctggcaggtgggggccctgggcggccagcacccggcaaccctctctgtgtctggttgcagggaacattgagtacagctgcccggccaccaacgagtgcgagatcaccaaacggaggcgcaagtcctgccaggcctgccgcttcatgaaatgcctcaaagtggggatgctgaaggaaggtaagagaccccaccgagtcggggttcactgtgaggctctgcttgctggggagtttttgtcccctgtgagacacccacaagctgtggacctgtgtcccagggtgagacccagtctgagcgcccatctcctcccacaccctgccagcctgccacggcgcccgcatggctctcctcctttagggaggtgggaattggaatttcttcattaaggatccttccgaacccctgaccccacttgggccccagtgggcctggcactctgggaaggccctcctttaggggcaaatcccacgtctaccctaggaggggtaggcttaagaggctgttatatcacctagcaccctcaagggcttgggggtgaaaaggacagacacattaagtccgggaatgataaataatgttcccttcacctgtgaagaatggcatttgttttctggtgggtggacaggacatggctcttgccttgggaatgctgctcccttccttgttccctctcttcccatcctctcccttccctctcctttctctccctgcgtcctctgtctctagagctgtgctgtctaatatggcaaccaccagccacacgtggctcccgagtgctggtccaaacagaggtgtgctgagtgtacaacacatgcctgctttagaggacttaataggaccataaaaggcagtgtaaagtctggtggtgatccttttaaaaatgtgattgcatgcagaaaggctaatcttctggacatgttaaataaaacatattgtgaaattagcatcacatgcttctttgttttttttttttttttttggagacggagtcttgctctgtcacccaggctggagtgcagtggcgcaatctcggctcactgcaagctctgcctcctgggttcacgccattctcatgcctcagcctcccgagtagctgggactacaggcgcccgccacctcgcccggctaatttttttgtatttttagtagagacggggtttcacggtgttagccaggatggtctcgatttcctgacctcgtgatctgcccgtctcagcctcccaaagtgctgggattacaggtgtaagccaccgcacccggcctctttttatctattcgttaatgtgactactagaaaatttgaaatgacacgtagctctcattgggacaactgctccaggtctcctcttcctcactttctctactgatttgctcctttttttatattaaaatattattgatagaggcaaggtcttgccatgttgctcaggttggtctccaactcctgggctcaggcagtcctcccacctcagcctcctaaagtgctgggattacaggcatgagccactatgcccagccgatgttttcagtttgaggaaccttgttcagtaccattttggggatgggtcgtgagtgtatgtgtttccctgcttctccagcttccaaggggagccagtgaaaattcttagagatcaacttttaagctccgggcctggaatccttctagaagtgggaggaaacaggaaaagaggtgtgtgggggtgatcagaaggggctacagagagaacgaagggacaggtttggaatccagacccttcctggagggggaaggctaggagtgggcttctggaagcccagcccagccttgggagccccagggcactcctgctaccccctctcccagggccctctgaagataagggcccagacctaagacgctttgtcaatacaacttggaccatcatgtgctatagaaattggaccttccacttccgtttaccatttccaggtcccccacttcacctcagctcagcccagcacctgtatccataaaacagaagctcttgaagcaggccctcggcggcctttgtgtcgacatggcacactggcttttaaaatgctcctcattcggggcttcatttaacccctttgtgatggagtggaccactcagctcttagacaggccagctgcttcgttaggggctcaaccgaaaaaacagtctcctttccagattaaaaatgggctacatcgagcccgcagaaaggctgtctgttggttcatttttgactctatataattttggtcttgctcctggataggatgacccaaactagtggctgaactgggtcccctgactcctatgttgggccctttctgctccttcagagcctcctggtattcacagatgggaaaattgaggcaaaaggcccatagaagcatgcctgagtgctggtctcttgactttctctccgtgtggtgctgggaatctgagggtttctaagctttggagactcattcattcctcttaagcccaagagacagagctgcttgacctgttgttctcacatacagagctggatgtgagaacagcaggtcaagcagggggccaggggccacttggtcacagcgtgcagcctccctgcctacttgacagtatccgcggcacttagagcagccagaagcctcattgttttcaatatagccctgaattttacaggtgacaaaatggagccctacaggggctggggtgagatgactcctaccctcagtcacacattcatctgaggggagctgggcccagaggctggaactttccttgccctgttcagtgcctgctccccatggcacagcacagggatgggggaggtcgagagggaacctcccactcaattcctggaccatcttgtaacactgagcagagtctctttaggggctatgcagtgctgggaagagagaagggcactttctagtggcttcccagaaagcaggagatggtgaaggggtgcactgatggcagggagggaggtggtgaggcccacaattgaccggtggccactcagacatccagactggcacttgtcagagaaacgaggtggacactgtgtgtcccaggatgatggtatcgggggtgctgggaggacaggggcatgagacccctgctgcctcaagtggggaggatgttcaggggaagcctcagtgttgacacccctgccccgctgcaaatatagccctttggttgatggtctttacccagggtggcagctggggcctcccaggcagacatgctcggctcgaaaaggccctttaaggagttctgcctgaaggaggaagggacagccactagaacgctccctcccccactccccgccagtgctggcaggtccagatccaagagcggggagatgacacaaaggctcctgagtacggacaaagcagggagccacgtttagtttctgtcccctgcagggccttggagagatcctgggatctgaagctccgtggggaccgacccccttgggaggagcatcctccttcaacagcctgggcccctgccaggtgggggctcttggcagctgcctggcttggcttttgtttgggtgtccctcctggctctgcaggcaaggcccaggccccccaagaccagcgtgggctcatcgcccacctcagactctgacgggactctaaaaggcaaacttcaccttccccagggctgctctccgctttagggtcccatagtgggcctctgttgcttggggggctttgggggtccaggggcttggggagggctgcagacggagagatgtgggtgcctccgccctctctgctcccctcgcctgcacgtctgaacaccaccctcccgccctcatccagccacattctccttgtgttttatgatttttcctttcttaggtaaaataatcagagatcgtttcccagtttgggggcccagcaacagccacagaagaaatcagacttggggcttcctctggctctccctctctcttaagactgtggccagctcagggatctaagcttttcagattcctcacgtggctggggacagatcctatggccacgtccctgtgactttctccctggaacatccagagcagaccatggaaaacaggagctgtccaaaggcctatcttgctttaagcaaatctagtacataaaaatctgtattttcagagaaaaggtaatttttctcttttaaaaactgaacacaaaatctgggttaggagttgatggcctgtgttctgcccctggttattaggtatttttgcccgtgtaattttttttttttcttttgagaaagacaaaaaaaagcctcactctgtcgccaggctggagtgcagtggcgcgatctaggctcaccacaccctccacctcccgggttcaagcaattctcctgcttcagtctcctgggtagctgagactacaagtgtgcaacaccacgcccagctaatttttgtatttttagtagagatggggtttcaccatgttggccaggatggtctcagtctcaaccttgtgatctgcccgcctcagcctcccaaagtgctgggattacaggcgtgagccactgcccccagctgctgtttaatattattactcacgcccacctgcttccatttcttcactgtaaaacggggatgttgatacctgctttccttcaccaggtcaaagtggggacctgggacagatgggacagctcctcttggcagaatccactatgggattgctttgcaatgtcagctcccttgatgcgttaaaatactccagtgttggattcaggctgggtgcggtggctcatgcctgtaatcccagcacttggggaggccaaggtgggcagatcacctgaggtcaggagttcgagaccagcctggccaacatggtaaaatgccttctctactaaaaatacaaaaattagctgggcgtggtggcacgcgcatgtaatcccagctactctggaaactgaggcaggagcattgcttgaacccaggaggcagaggttgcagtgagctgagattgtgtcactgcattccagcctgggcgacagtgcaagcctctgtctcaaaaaaaaaaaaaaaaaaaaaattctagtgtttgattcaaagacaacctcatttacactcagcttttcatcagtctgccccttgtgtttggggaggcagactggtgtctggccaccctgattttcttcctagatttgttggtgggaatcttaaaagacggccttgtcttgggctggtccccactgtgggttctagaatcaggatgggcagctcccctggtagtcagcctttgcagcctggctagggtgtggactgactctggaaaaccactagctgcatttcctaaggggctccccgaggcctcagtacagctctgggatatcagcaattctctctagacagcctgtccccgccaacttcacctcctcctcacctcacctccctcacgcgaccggcctcccaagcccgctccatttctcccccactcagcccctgcctgcctttccccaagtgttttctaaaagatatttgatttcagtgaaagctgggccgacatccatgcaatatgctctcacttgctttgtgcttgttgggaaggtggagggctcctccggggattctgggtaattgtgttagtggccagctcatgtcaggaaattaaaaggaggccctgatcaggttcccactgcatgggatttaatggccttgtatttatagagtattctgcctctagcccatgccagaaatatcactttttttctggccctgtgaatgaagaaagagcaagagagatgacttgcctttaaaaattctttttcttttccaaaatatattagtgttttgaaacaaaccaactctttaccactttatagaatggtattgagctacagcctgagaatgccaatgtgtgttgcatccctttcgagccactttacattctacacacactgccccccccccaacaccaccaccccccaaacacgcacacacacacatacctgacagctcacaggatcttcccaggcaccctgaagcctttgggccactcagccacaatgacctctggttggagaagtgttgattgaatgaagacgaaggagatgatcttgtctgtgctaaatcgttcttactgttccctgcaggcttttggataacggtacggtggtcacgtaggcctggttaaacctcatcttcaccacttatcgactccttgggccagttacttaaacccctgtaagcctccctttcctcctccataaaatgggaatcataatagtgcctatcttcatcttgctcccaatcttcagggaaagctcctagagttatactgtgaagtctgattgttgattggagatagatattcttcatgtacaaaatggatattcttctgtgatccagaggcaattttgaatctcctgtagcctcactccctactcttgtaatcttgcttcacattttcatgaaaaaatagaaagtcaaatgggacacatcttaccctcctaccattgaatccacaaacctaccagtttgtgcacctgttttctgccttcttcttggtagaatagaggtattcccaatcctgacaaacgctggtccccctcctgcccttctgtgctctgaatcgctctcttctttaccaaggacttcattcctttatttatttttttttctgagatggagtctcgctctgttgccctggctggactgcagtggtgccatctctgttcactgcaacctctgcctcccaggttcaagcgattctcctgcctcaacttcccaagtagctgagattataggcatgcgccaccatgcccagctaagtttttgtatttttagtagagacagggtttcaccatgttggtcaggctgttcgtgaactcctgacctcaaatgatctgcccgcctcagcctccccaagtgctgggattgcaggagtgagctaccatgcccaaccccttaccaaggacttcattcctatagtatcttctctgcttccagcatcatcgaattctctctcactactggatcatttcattagcacacaagtacacttctgttctcccattatgaagacaaaattaaatttattttttaacttttaaaaaatgttaaaaaaattttttttcacattaaaaaaagagacaggctggtctcaaactcttgggctcaagcaatcaacccaccttagcccctcaaaatgctgggatgacaggggtgggtcaccacgcccagccaaaaacaaaattaaatttaaaaaaatccacaactatattttgtcccttcatctccatctagatattgctacctgatcccactgtctttctcaacaaaacctcctaaaggaattgacagcacttgctatgttcattttcttgtcccattcacccctttctttaaaaaaacttctttaaaaagtaaacattgaatagatccagaaatacacttataatatagtacattaggtaaagactaggctgtgttttttgttgttttttttttttttctttttttttttttttttttttgagacagagtcttgctctgtcacccaggctggagtgcaatggcacaatcttggctcactgcaacccctgcctcccaggttcaagagattctcctgcctcagcctcctgagtagctgctattacaggcatgcatcaccacgcctggttaattttttgtaattttagtagagatggggtttcaccatgttggcccaggctagtcttgaactcctgacctcaggtgatccacctgccttggcctcccaaagtgttgggattataggcatgagctactgctccaggccacgctaggcttctaaaagaaggagactccctttttccctccacaaaccaaaccaaaccccaaaaccacccagaagcctaagcaggatagcagtttcattcccgctcatttcttacataacagtcagaaggtcacaggcaatcccagactggctggcagctctgccaagcttagcatgtggcttgcccttgtggaccccagttcttcccatctcacagacatctagaaggaggaaaagctccatgtgaagggctggaccctaagtagcacacatctgttcttcccactcacagcccagggccacacttttctgccagggagtcttggaattgtagccattatctgggacgctgtgtacccagctaaaacgttgttggtatggaaaaagggaatgacatattttcaaatacaagtattgtttttttgtggggattttgttattgttgctgtttttaaagagacaaggtattgctctgtggcccaggctggagtgcagtgacatgatcatagctcactgtaacctcaaactattgggctcaagagatcctccccacctcagcctcctaagtagctggtctacaggcatgtgccaacatgtggggctaatttaaaaaattttttttgtagagacaaaggtcttgcttatattgcccaggctggtctcgaacccctggcataaagcaaccctcctgcttcagcctcccaaattcttccctagatattttagacctgaatatctaaccacactattggcattgccacttgtgtcctttatgagacatcacagattaaacatgtctagagaggaactctaggtttgaaccattcctccttctattgcttccagtctttcccatctcaggaatggtgatgctagtcacctattgctcaaaagaaacctggaggtcatccttgactcctcccaggtcaatgtccaaaatgtatttcagattctcctacttttcttcatctccatggtcatgaccctggtccaaggaagcattgttttttcctggaccactgtggcagtttcctaactggacttctgattccactcttagtcctgtttaatccccctagcagtgatcttgttaaagcactggtaagattctgtcattttgctttacatcactcagtggctctccatagcacttaaaatacaatccaaacactttgctttggtcttcaagaccttgcatggtctacccactccctacctcttcagtatcatctcataccattcctttcctgtctgttcactcctacccactctgctccagcctccctggcttatttttgaccctcaagcatgacaaactgtttcccatcttaggactttcagggccttccctctgcctggaatcctctccccaaagctggctccttcttatccttccgacctcaagttaaatgttatcttctcagaaaggcctccctatccactctattacttgctgtcatatccccttgtatgcttcttcattgaacttctttcagtctgacattatcttatttatttatttatttgcagacgtgtttgcactggctgcctctaacacagttgttcttaattcaggctccaggatggcaagttgcctttagttgcactcagctggagtgcatgattgaaaggcttcttaggcagtgtctgggatcagcaggtaagagtgccatgattgattagcaatgtctgccacagactaagaaatggaaggcaggggcacaggtgataagtctttgccatgcctgatctggtcaactgagtttcagcgatttgaccaaggccagacagctagttaatgacagagctgggtggaatctagtctccttggctatgtggaattccttctaagaagcctattcgaacctcacggttgatgccttggccagtagtgaagcctgtagccctttctcaaaggggaaaaaagaaaggaacggaaagggaagctgggctgaaataacttctctgtgtcaggcgtacagttttggagacttcttggcagttgggaatgcaggcgtaacacagttttgtcaaaatgcccttggggacatggtggcatggtaagaagtgtctagaggagcccagcatgatagcagacactcctttaataggcagaattctgagagctcatcactcactaacacttatccaccacagtgcccggagcccacagagcagctggcaaaagccctggaatattaggtgtcatgtatgtctgtttagctacaaggctctctctcttagcttttaggaagtcaggtgtgaggcactctgcctttacggtgtgtcactggggtaagaggcagcccaaatgagccattgtgtctgaggcagcaaggcaagcttgcctgtcacccagaaacccgcacaggacaggtggctgaaggaagtccagtgtatacaagggttgtggctgagagttcagggcattgcactgggctggaatgcccatcagcatgcccacacaacttccagaacctcaggggctcatgatacccacatcaccttctgggtggttttctcctcctcctggagatgggtcagctatagtttggtagaacctacaggcagggagttcacccccaagtttcctgggaagaacactggccacataaaagtattgaaaaaacgggtttagcacagtgctccccagacctggcacataattagaattagtagaggagctttggaaaaatactcattcctcgacatctccctagacctactgactcagagcctctaaatgagtaagtcctcaaagtctgtgccgttcaaaggcttcctagggcattctgaggttatatgggactggcgtcacaagtttagggcaaagaagataggacttggagatctgaaaatcaaggttcaaaatttccctgtgacgtttcttggatgtgtgatcctgaacgagtcgcctgacctttctgagcttcagatcttgcatggaactaatcataatcatgtatattcttcctcctcaacattgttgggcagcttaaatgagatacgggtatgaaatagatttgtaaaccatgaagctgcttatttcgttaataaaccagggatgttgaatttggtgatgggggaaagttctggataaggggaagagaagggtgttggtcatgaaaaccttgcaatgccagtggggatcttgacctcagacctggatagtagctgatgggagggcagaggcctttccctcgcctgccctgtctgaacctttcctgttggaagagaaatatgatgtgggaagcgcctgggacaggcttagggccaggtgcagggccacgctttgcagagctttagccggctatttttagtgcccgggtgtaaaagaaagaagcttaaagtggccccgctgcggctgaccctgcacactcggctatttttacttccgaaagactgggatcttgtccagcttaggcagggaagatgagaagaaaggagggaggtggagggaagaaggaattattttacttccattaagaaaaatgtcagaaacctgatcttatcaagtcagcaagtgggtatccaatcccggatgtgtaaggtgccggctgtggacgctgtgacgtgcctgcagtggattggagaggccagcagagggggagccccgctcccctcctctcaaggagtttctgtcccagagtggccccgaagcttctttgctattttttgtgccctgagctgggaagtgggcttggcccccacaggcacgaggggcaccagcctggtgacgaggccggtggaggtgggagcagttatgactgcagccaagggtggaacctctgttctcaagttggacaaaggcagccatcagacccactggcatattccagagagtcccagtgttggggctgtgtgccctgggcacaatatttaacctctctgaaccttaatttcttcagggattttgtttaatacatctgactgacagtagttacaactgtggggatgtgtttctctcttccatgaggaaggcagttcaagccagactctatgaccttcaacaggcagatgaaaggcaagaagttactactgagtgcctactgtgtaccaagcactctgttacgtttcaatattttatgttgttaattccactaacctgagaaaggatacatatttttaaaaaattttaacagctttattgaaatatagttcacccatttaaagtatacagtttgatagcgttttgtattcctatatttgtaaattgtggcaaaatatacgtcaagtacaacttggcattttagaaattaagtgtacaattcagtgacatcaaacacattcacaatattatgcaatcaccggccatgtactgtggctcatgcctgtaatcccagtatttcgggaggctgaagagggtggattgcttaagctcaggagtttgagactagcctggccaacatggtgaaaccctatctctacaaaatatacaaaaattagccaggtgtggtggcatgtacccataatcccggctattcaggaggccgaggcaggaggatcacttgagtccaggatcgtgccactgcactctagcctgggtgacaaactgcgaccctgtctcaaacaaaacaaaacaaaacaaaacaaaacaaaacaaaccattatgtaatcaccatcagaccaggagttcaagtccagcctgggcaacatagtgagatcccccatctaccaaaaaaaaaaagaaaggagggggccaggcacagtggttcatacctgtaatcccagcactttgggaggctgaggcagaaggatcgcttgaggtcaggagttcgagaccagcctgggcaacatagtgagacccccatctttgcaaaaaaatttttaaaaaattatctgggtgtcatggcatgtgcctatggtcccagctacgtgggaggctgaggtggaaagatctcttgaggctgggaggtcaaggatgcagagagccagcctggcctatagagtgagaccctgtctcttaaaaaaaaatggggtgtggtggtgtacacttgtagtcccagctcctggagaggctgaggcaggaggatcactggagcccagtagtttgaggttgcagcgagctgtgatggactcactgcactgcagcctgggcaacagaggaagaccttgcctcgaaaaaaaaaaaaaagaaagaaagaaaaagtggaatcacataatatttgtcctttggtgtccttttggtttattttccttagcgtagtgtttttaaagtgcattcatgttatagcatatatcagaactttattcctttctatgactaagtaacatttcatgtatataccacatttgcttctccactcatctatccacggacacttgggttgtttccaccttttggccattgtgattatgctgcagtgaacattgtcctacaggcgtctgttcaaattccttctttttattttttaaaaatttgcttcttttccccacactacacagatgtatgttcagatttctcttttcagtttttttgggggtgtatacctaagagtgggattgctgaatcatatggtaattctgtctagctttttgaggaaccatcaaactatgttctacatggttacaccattttacttttccagcagcattgttttttaagtttttaattaaacttcttattttgagataattgcagattcacatgcagttgtaagaaataatacagagagatgccatgcatcgcttacccagtttcccctaatggtaacatcttaaaaaactacagtacaatatcacaaccaggatattgacattgatacagtcaattgacattgatatggtcaagatgcagaaaatctttaagagtgaagtgggtttttttttttattaattttttttttagatggagtctcactctgttgcccaggctggagtgaaatggtgtgatctcaactcaagatctccgtctgcacagggtcatgtattccagggattatcaatttttttctattcatggagcactcagaaatattaaaattttgacctgtacacattaagggattaaacggtgttaatggtggttaaaacaaaggatctgtatttattgcagtatttggaaatatgtgacactttacatttgagcattattaatgcttttttgcattcagaaaattatcaataagatgataaaatctaataatcctagacagtaattgtaagttaattagtattttaatgtgtttcctgagtctacttttagatattttactaatgtaaggacacaaacaataaggcaactctcatttcaagttcaagtcttcttgtttatttccagttagtgtttgtaagtcttaagcatcctaattttaaaagtaattgcccattgtatcagtcagtgaaaattgctttctgctgcaagttacggagaacctgatagctagcagcgtaagcatggataaatgaagttggtttttccaccttacaagaagcctggagatgcgcagctgctgtattgcacaaagttctcagccatggcggcaggggcgctccagctctttctttcttctctggtgttctttggtgtcctcagacagccatgtcatggctgcaaggtcgttgccacacctgtaggcttcaccttccaggctggggcaagagaaaggcaaaagagctgcactgaacatggctgtcccttttctcagaaaagcaaaaccgttccagaagtcctgccatggacttaacctgacatcccattgccgtggtggcacgcacctgtggtcccagctactcgagaggctgaggcatgagaatggcttgaacctgggaggcggaggttgcagtgagccgagatcacaccactgcagtccggcctgggccacagagtgagagtctgtctcaaaaacagtaaaaaaaggagaaggccgcttcactttggtggggttccatcttccccaaccccaggctaggggtgcacaggtctgtgtcacaggaccctcccactctaaatggccctagcaagtcctgagtgtgaggcagtgccagagcaggggagaaatagagcaagccagggtcctgtcctctaagaacccatcgaatcgaagagctgatgggtataaagggaaaccagcatgaggtggcctgtgaggtatcagatgaatgttgaagtgctatgggttggcaggagggtggtagaagagatggcctcacccagcctactggaactgctttccagcttaccaagcattttctcatcattaagtcatacaattgtcacaaaagccatctaccttgagcagagttggttttaccatcgcctccttccccagacctgaagatgcagctgaagcccacttgtccaaggccaaataacctgaaataacccgtaagggacagagatgggcatgggaccttcattatcgagcccatgggctgcagtgattgtgggctgtgcttagggcaggctcagaagagcagacaggaagcaaggggaacagacacatttcacatcaggtgtcagtttgtgcataattaaacccaacaggctactgtttttttaacagcgtaatctgataattgatacacgtattgattggagccattgaccactatgctgtaaagatcaggaggagaaaatttagaggagaatttaacatttgctgtgcgctgggaggtcataccatggaatggcaaaaagcttgggtcttttattggggaaatcactgaatctctctgagcctcagtttttcttatttgtaaaatgaggataatagcacctgccttatatttttgtgggttaagtagggtaatacatacagagagtcctttacaaattatgctgttatcattatcattattcatgtgatttaccaaaaacttggatgcaatgctggggaacagtaataataaggatgatgataataaccataataatcccattttctaagcacatgctgcatcttgggtaccatgacagactttggggcaggactgtgagccgcccctggccttaacgggtgcctagtcagtaggggaagcccagtgtgctctgggagcccatgaagaagcccccagcctggcatggggatgaggaggacagaggtacatccacccctgtattcatcaagtctttcctgaacatccatgaaaggtcaggccctatatcaggacacagaacatcccagatggagacatcggcagaggtggcagctgcccatctccttgccttgccgagggacagacacctctttttattttgtgttgagcatgcctcactctgattgacagctgcttgccgggaagcaggctggatgggaagcgagagttcattccagtggtatctaggagagaaggtcagtaaagtggggaaggggcttgtcctggactcaaggagagtatatgtttaagatcctggcatatagtaggtgctcagtaagtgggggcccttactgtctcttatggatgaggtggaccgttttcactttcggtcctgtcaccattccaaggggaagcagaacttggtggagggtttggtttggcctgggtatagtgaacagaggaggcttctatgtagacatgtcacaggatagagtcagaaagcttttctagacagggaacttttcccaaaagacttttacaggaagaatcatccttcctgtgtttgtgtctgctccttatgctgtcactgaaggggcttgcagggggtgagggagcaaatgtgagccaaagtgctagcagcacataggttcaggtctggagctggatggcatctagctgtccctttagggtccaaggtacaggcagaagttgatggtacagctgcgtttgctaggatgccttagtgcagtgctcctcaaactctgttgtccgtgcaaatcaccttgtctgattcctctgtggccaggcctgagattttgaggcatctaacaagcctcaaatgatggtgatgatgctggcctgcagaccacacttgaggaggaagacagcggagactgctcctgcccacacctactcagcactgtctgtttgtgtgtgtgtgtgtgtacgtgtgcatgcgtgcgtgtgtgtgtgtgtgctgatctgacgcctaggctttctttggccaccagagtctgctcagcctggacctgggaggcaggcaagaagcgccaaagcagccggtagctgggagcctcagttgcccacagcagtactgtcctcaggaacacatttgttattggctttcttccctccttggaaactgctcgcatgcacagccttgtctcagattctgctcctggagaagtcaacaacaaatgtcagttacaaaacctgaccttctaggcagaaggggagtttattggaagcctatcaggaggttcaaagagtacatttagaaaccagacaagaaccaggagaatccctggagagcccaggagcaggaaacccagtagccaggacatactggccaggggctgcctacactctgctggggaggcgctgctggtctgatcagtcctcaccttcgctctgtccttgtgcctccgtttgatggtgcacttggctgagcctgtgtcacgggtccatgccttgacctccagagagcagagagaaggagaacatgtacttctcagatatccattgaggggtgggacacagacttccaacagtttccgtattcccaataggggaattacattttttaaattttcttttgagatggagtctcactctgttactcaggctggagtgcagtggtgcaatctcagctcactgcaacctccacctcctgggttcaagcgatccttgtgcctcagccacccgagtagctggaattacaggcacgtgccaccacacctggctaatttttgtatttttggtagagatggggtttcgccatggtagctaggctgatcttgaactcctgacctcaagggctacggcctcccaaagtgctgggattacaggggtgagccaccgcacctgaccaggggaattacctttaaacaggaagcctgggtgggctgctgagtagactccccctctccccgactaaaaaacgtttagcaccaggtacaaatacaccaggttgtggggttgaaaaagacattgctgacaaaaatgaggagttgtgggctcactcagtgaactcacagcatccttgccctccagggctggagtcctgaactgaaaacacctggggcagcagaggggtggggggtagtgtccttagcatcccaaagttcctttagggcaatgtgcacttaaaggagttttctccactcattcagtaaacaaagtaattttgctttcagttgctctaggaaacttccttcttctcagggactgaaatttagtagctgaacatcctaacaaagaaacagccagaaaatagccccaggcatgaatgggctctaaatcatcattccattaagtaaccattgttctgacttccccttgcctgttctggagaaaggcctgaatccgggggactggcagccaacactctggggctgaaggatggacaaggctgggacaggaaggaagattctgtttcttctgctccccatctaggaagtaccagagtttattagaaaagggaaagggccctgaaggtcaactgactggggctctgtgagggtgatactcactgcctttggggaaaagaacagaagttgaacctggcctgtcgcagcagaggctgaggtggcaacccagctttcttctctgaggactctggtctccgtgtctgacttcttgtgtgtttcagtcaaggcccatttcatgatcaggaaaagggagctgttcagtgagctcaaggtaaggactccaagaaggaacgttgtctgaggctggcctggaagagccacagcaagaaggcagaagtggcttccaggccccacagggccccagcaccatgcttggggcacctgctctctggtgctttttgtgttggttcatactttgtaaccaatttgttgggattcatccttgcaggccaggccacatcagtgggtagccagtctgagctgtgtgtccacctgaggccctgtgccttcgatctgctggtggggggcatgaaatggtaccaatgtgtctgtccaggcagcaggagctgtgggtgaggcaggcttccggaaggcaagttggattcagtgacaatgacagatctctccagggtaaactctcactcctggaagtggctgtctacgtggagtagccacagctgcttttgaacctactttcaagatatttccaggcactgattttccagtccagaggtggccagcccaactgttgcattcccatcccctggggacttgtgtaaagacagactctagagctttatgctagaacctcagagagtggggtctagaaattgacatttgtaatgagcgcctcctcagatgcttcttgtgtgaaaagtctgaaaacccttgaagtgcctgtgaatgaccgggattcctttcttttgttggcaagttaaccctccctggattcaaagcagatctaacataatgtgacttcttccgccaacacttggtagagtgcctttgttgacataaggagaaccaagggctgagggttgcttgggatgaatttcagaaggatgctgaatccagagagacaggaccaggcctggggcaacgggatgcgccattactgttagacaattattttaggattgtccagccacctggcctgaggctggccgtggggcagctgtcgaaggtcatccgagcaaggccctgaaggacccagccagtgctgaaattccaaagtcagtgcttctaccctggtgatgttgaacaactgctgagatcttttccctttcctccccaataggtgtgcgccttgatcgagtgcgtggaggccgtcagaaatacaagcgacggctggactcagagagcagcccatacctgagcttacaaatttctccacctgctaaaaagccatgtgagtgtcagggcagtccctgccccttttgccagcatctgtacctggaacatcaggcatcccttagggaaacatcatcttcccaccactgggtcatgagacaatgtggatcttggggaggtgacatcagtgcctggcacatttagaatgtggctccaaatgaagcatggtcctgacaagccacgggccccaatgtccagaacatgctccccttgccacccacccaaagttgctctgcaggttcctcctggagaattcgtcaggcaacttcccttggagggatatttctcaacagcccagatcaccactaccagcaacttcatggagccagaacaggaggggagattatagccgctttgaccttcctggagctcttaggaacccaactttgcttcctgacccatctgagcctccaccccggcccctttcctcttttcccagcatttacctttccctctttggttgttgcagtgaccaagattgtctcatacctactggtggctgagccggacaagctctatgccatgcctccccctggtatgcctgagggggacatcaaggccctgaccactctctgtgacctggcagaccgagagcttgtggtcatcattggctgggccaagcacatcccaggtgagcatgtgggaccaggggagagtgtggccagggactctcagccggtatctccgcagcctacccaatggctgtgcttctgatgcccggatcctggaccccagaaggcctgtgaaatcctggcaggcctgtttctctgagctcctcttctctccttgtagcattggagaggaacaggtagttagaagacccagtgaggcttatacactgctgcaggctcttcagaattagttatcattcgaggcggggccatgtttggatctacaatcagtgtaatattcaaagaacaagttccttgagcccttaaagggcaaagagtagggttttcttgtagaccttattggaaggatgccagaaaacaacagaagaaagactgaccctctcttcctattggaggcagcagaatggagcagtgaagagcatggccttgggaatcagatcgggattccaattctgggtctgcagcttactagctgagtaaccctaggtaggccacctgacctctctgtcaaatgggaatacaagagtcccccactttgtgagctttgatgtgagcatgaaatgagatcctgtgtgtgaagtgttcggcacagtgtctggcatgtgctggcatcagttgcatgcccactattgccattcgcctgatctctaagggaggcctgtctctggattggcttctgagattttaagggcctttctggtgcggaaagtgtgtgttccatgtttcaggctgtgtggacttctcttcgctgtgtgtggacccaaaccctgctttcaccctctctaggtctgggcagatggcgggagcttttttatttttgtagacaccaacacccatgtattctacattacatacacattgggggcctttctctgtgcaatttattcctcaactcctttaagactctaataagttgactcagagtgtggtagaaacatccttttatccttctggtaatgacccaccatgaacatgggacaagtcagcttcctgtctgtagatccgtttttggtttgtcatggctctgaaaggtgattacagcagacgatacagcaaaggtgacctagactttagataccaagacccacagttgtttgtttgtttgttttttgagacagagtcttgctctgttacccaggctggagtgtaatggcgcgatctcggctcactgcaaccttcgccccccaggttcaagtgattctcgggcctcagcctccccagtagctgggattacaggtgcctgccaccacacccagctaatttttttgtatttttagtagagacggggttttgccatgttggccaagctggtctcgaactcctgccctcaagtgatttgcgcacctcagcctcccaaagtgctgggattataggcaagagccaccatgtctggcccaaggcccacagttgattgagagaataaaaaatgtccttccatgtgagaccttacatgcccaagttgcaggaaggagccttcctgtggacagggacgcacagagacatcagatggcccagaggctctgctggcagggactgcctggtggcccctgggcattctgaccagggatctgggctggtacgcccttactaaggagctcaacctctcggggattacacactcagtagtttttgaatctgcccagtgctggttcagcacagatgtggggtcaggccactgcttaagacacttcagcctggattgctccactaacccagggccaaattgggtacaggtacccctgcccccgccccacactcctgttccaggttgaacagatcctgcatcctagcaatggctcacgagtggcgcctggtggtcccctgggtcaatgcttccttcttccacaaccccacccctgcaacaccacggaggaagtagataagaccaggagaccctgtctcccctgcactcatttttctctgtgcctttccacctcccagctccatctcccatctgtgaccaaccaagagggcatggctagagcagagtgagtgctaaaggcatagactttggaatcaggcagcctgggctttcatctcagctctgtccttactggccttatgcaagatactgaatttttcggagcttcagtgtccttgtctgtaaaatgggaatcacgatagagccccttcacgggattgctgtgaggatgtagcgcgcttagtgtgtacaccgggtgaatggcagagacgcttaccagcgctgttgtagttgctaatagtaataaaagcctcctttcatggcttcatttatccttgtccaaagccggattctttttggtaaaaaaataaaataaaataaaaacgggctcagttgtccatcttaaatgctaatttgcctattttgcataaatctgcatgctgaattctttgcctcctgaccttccagtgtttaaggtaaaattaattagtggagtctcctgccactgcatgtaaactcatactaagggcaatgacacaatcaaatgcctgattttttttttttttttttttttttgagatggagtctccgctctcttgcctaggctggagtgcagtggtgcgatctcggctcactgcaatctcctcccaggttcaagcgattctcttgcctcagcctcccaagtagctgggactacaggcacgtgccaccacccctggctaatttttttttctatctttagtaaagatggggtttcaccatgttggccaggctggtctcaaactcctgacctcaagggatccacccacctcagcctcccaaagtgctgggattataggcgtgagccaccgtgcctggccaggtgcctgatatttttaaactaatcaacttaatcccatctcagattagatggaaaatgcatctgaagatgggctccctatccctgagagagagagagagagagagagagagagagagaaagaaagagagagagagagagagctggttgagtagggaggataaaagctggggcccaccctggggcctgtgttggctccagtccatctagttcctgcacagacagaaagagggggactggccactgcaggctgctcaggagtagagctctgaagaatttaggccagtgtccttaaacgcaaggtaccgcatctcacgagagggcattgcacacttagctttgcatgcacatattgagaagtcactacacatgaggtcccctgataggagttgtggctgagacaaggaatttattttgccccaaggatcccatttggaacaaggctgacatccagggggagcttggttcactcagaatcccagccattgttcaagtcagtctgacattgtcctaccccaaatgcaggttttttaccttgagttgaatgttccaagtattgggttccccatagggcaagcccaagtcttcagagtgtccatttcttattccatgagatcaagagctagctgactttaataggcagtggggaatcacttgatgaattgcagcctcctccaaatgacccgagcctgccatcctgcctccctcggcagcctcatgcctgtgccagccaggaaagcctgcccagggagtttccaccaccctgccctgcccaggctcccatgtgcagggcatccccagaggcctcctcacaaaagtccctcagcggcactgctcccaggtagcccccatctgactcaatgaaatatgagctgccgagtgacagcagctgtgtctgaagtggccccagatcctataattacatctccctttattacctctgctaatggccctccaggtcgacagaaacgatcataaattaacagattatgaactccacttgccacaaattacgtgctttttttttttcccccttcaattctaggagcttgtggtgccaaatcacggatggggggatggggagcttggggagagcctgaatgttattagatgagttggtgcagataaaacaattttcctggggcagcagagctccaagtgggagcatgaggagccagaagctctgggcaggcccgagagccttgatgaggcagtgctgcctgcagtgagcccggcacagggacacccctgcactcccaggggcacggggcacccccagaccctcccggtagcctcttcaggggcctcttggtcccagagttactaataacttgagaatgagacccagcccagctgagagaggcaggggtggaagcgctttactgaagggcagggaggagtgcctgggctccttctgggttttaaataaaagaatctgtggttttagtaaagatatcagatgggacagatgggtcgaaattaagagttccaaattccccatcctaaccttccttctgggaatttcctgggcagatacaaccactgtgtgaggtgtgtgtgtgggtgggggttgtgtatgtcccccagtccatgggcttataccataacactgctttacacctgctttttccatttaattatacaaaatagtagcacttacctggcaaagcagggttctaagtgttccacatgtcagctcatgtaatctgaacaaccccatgaggtgagtgctgttatgatttccattttacagaagaggaaaccgaggcactgagaggcagacttgccagggtcacagctagtgaacagcagagttaggaagctgatctctgtgctcatacgattacaccctttttgcccccttggctgtctttccacgtccacacagagttctaacttatttggcacattcatttaactaaaaattacatctatgtaataatcacatgtattacattagttacctttttttttttctattttgaatcatttcaagcagtgatctaatacccttttacatttatctctatgtctttattcatacttttctttctaggataaatttctttttttttctttttgagccaggatctcgctttgtcacccaggctggaatgcagtggcatgatcttggctcactggagctttgaccacctgggttcaagcgatcctcctgctgtagcctcccaagtagcagagatcacaggcatgcaccaccatgtccggctaatttttaaattatttgtagagatggtgttttgccatgttgcccaggctggcattacactcctgggctcatgtgatcctcccacctcagcccccaaagttctgggattacaggcgtgagccaccgtgcctggccactaggagaaatttctagcagtagaattgctaggttgaagggagcatgccttttattttatttttaatttaattatatttatgacttacttttatttttaagcatcttaagcactgactgggttcagaagccaaatgtagacacaaatgtatgtaacagaagtctcacctctatccctgtcccctcccattccgacctcctaaaagtcaccactttttctttctcaattttccttctggtgtttctttttgcaaatactagaaaagattcagatgttaaaagatgtcaaatatctccccctcccttccttgcacaaaatgaagaaggctgtatcaccaattcagcgccttggagtatacctttggattatcaaagctattttcagggctttttgaaaatgttcagggaggaagagagtgatcaggggctgagtccagaactcgaagcagcctatcagaggtttgggaacaggcctcccgggtacatcctcccatggcagcacaaaactttccaagtccagtctccctcccaccacccaagggcagggcctgactcctacaagataggcaaaggcagctaaccctgaacctgagtccaaagatcttagagggtctaaccaagtactgtgggcacattttcttgtctcctgggagtcaaagcctgtggcatttgtccattctctctctccttttagctgcaaagttttgtcgggcagcttctttgctgtgcccagtcgtgggggtggggaaggaacagctcagtgtctgtgcaccctgggaactcagagctgggatgggccatccaggggcacctgggcatgtgcctcatcaaaggtgccctcaccaccctgcttgacagctcagccctcaaggctccccttccacaaagcctccccagactcttgtttggcccaccttccccagtgcgtgctctcagggccctgcatttgctgtagctcttcttatattgcaactttgtgctgacttgtgccccttggtgtgtgtcttccccttcactgtaaaccgttgaaggcagggagcagttctggactgagcacaccattctgtccccggtgcctagcacaggcctggcacttagtaggtgctctgtaagtttttgctgaatgtctcaaagggcagaaaagcattctagtaacatcctaatgattgtacctgcaggattcactgcacaggggacttttcccctgcgtttccagaagcctagtccttacctcatcctctctctccaccaccttccaattcagttgtctgctaatttcacccctgccctcctcctccatctcccctccagtctgtctgcttttagaccccctccctagagctgtccaacactccccccaacacactctccggtgctggctgattggtatctgttaattaatgttgcccaaggcctctctcctactcaaagacctgataagggaaattggatgtccatttctatctatcttttattacctcccagctcccccggccaccacaggcagccacacaccctctcccatgcagggaatctggacaaccacacacacacacacacacacacacacacacacaccctgatcccctgtcacagcctctcccctgagaaggtgcatcaatcaaagctcccccgtgtcagtcggtgtaatcactcctgctcttttgttgatcacccatggattccattagccagtggtgatctgaggcccaagttgtatagatcagtcttgggaactgtgataattcacttggagaatgctcacagggtaagggtggtctgcctggtcagggaccttcagctccaggagtgacccctaaggttcaactgccatgccctgtgtggaagccagggaagaagtggcatttggagacaggacagcagatggatgggggagaccacacaagccaaagagctgggtggtccagaagctcaggaccacccaggcctccaggcaagtccagagaggagaagtgagtgatgccaatggtgtgccaacaacaacaacaatatttagtaacaacagccacagccatgaccagcaccctagcatgttgagtgctgatggcgccgggagaggtgcccagcactgtacatgcatcttctcttttcgcccccacagcaccccacatcagaaagtggcttccagccaaggatggggtctaagtcagcaaatgaagtagaaagtccttcctaggcaaaattacccctgaaaaaaatcccttcatgtcagttacccatagtgcatggtgcaaacaactttgtggatgcccttccttctttgaataaatccagcatgtccgtgttagaaccaatcactgagtttctgtttgaatctccagtgaagttactgccttgtgtttggtggttaagatgcttgaaaatcagctgacttatttatttacttactctctcttactctcctataaatcaagatgttaattgactttgcctaatttaagtgcatgtataatgcaattccagtacattatcattgttctgcagtgagaactttcatctcatcattagtaataatagctcagtaaatactttgtatattctggaatcatcgtctcatttagacctcacagcaactctctgaagtagaccctactattatactatttcctagatgaggaagctaaggtttggagaagttgcatggttttcacaagttcagcctacagctagtaagcgggagtcagggttcaacccaggcaatccccacagttcactgggcaagacagtgtcacagttctggagccttctccatgcccaactttattttcactgtggaatcagcctcctcaaatagcagggaggggggaactagcatgattccaagctcccggaacaggcctgctgggtcatcgttaagcagagagttatggcccgggaagaggggctccgaccctgggagagcaggctgtcctgtgagaaagtgcccctgaccccgggggctcttgatctcttagcagccccaggctatggtcactggggccttcccctgtggctttgaacagctgcgtcctcgttcttggtcaggcccgtgggtctctgcacagctgagactgcatcaaggatcaggtgtcattttcaaataccaaagcctcccctggtttgagcagagagtgggccctggaaactccccagagtggccgagagcacgtactgctgcctcctggttccagtatgtactcagtcactcctttaactacaaatgcattgaattaaacaaaaagcctctacagacgtttggaaaataccatagagctaacaatcataatgataacaacaactgtcaacattgactgagctctcattttgtaagtcttttccgtgaattccaagtctgaggcattccccaaggggaggacagtgagtcttacgctacacagggaaagcctgggggcaggatccaggggtgccagggacaccccgcaaccagccacgccctgcaacctctgcccccagcgagccccagggaggcccctggtccgccctcctgacctgctgctgccctctgtgccccctcttcctgcaggcttctcaagcctctccctgggggaccagatgagcctgctgcagagtgcctggatggaaatcctcatcctgggcatcgtgtaccgctcgctgccctatgacgacaagctggtgtacgctgaggactacatcatggatgaggagcactcccgcctcgcggggctgctggagctctaccgggccatcctgcagctggtacgcaggtacaagaagctcaaggtggagaaggaggagtttgtgacgctcaaggccctggccctcgccaactccggtaagggcggcggcggggcctggaaggggagcttctagggctctgcatgggcctaatgagcccatccctggggcctgtgggcagggctggctgccatggatagagatgaaaggaaaacactgaaactttttattactgaagattgtccaaggggtggcctgcagataaaaagctggtgatgaaggctgacactggctgagcatttcctaagcctcagacatccagactggcacactggctaaggacatgggttctgaggccacattgctaaggagcaaatcccacgtctaccaactgggcaagttgcttcactctgtgcctcagtttcttcatcagtaaaaggagggcagccaaacagtccctactctacaaggctattgacaggatttctttatacataattatattgcttgcaacatgcttggcacataaaaagcactcaattatttatttatttgtttattatagacggggtcttgttctgtcgcccaggtaggagtgctgtggcttgatcctagctcactgcagtctcaaacttttgggctcaagccatcctcccacctcagcctcctgagtagctggaactacaggcatgtgccattattccggccaattcttatttctattttttatggagatagggtctcactatgttgcccaggttggtcccaaactcctgggctcaagcaatcctctcacctcagcctcccaaagtgttggcactacaggtatgagccaccacgctcagcgtcaacttattaaattagctaggagtttattgaattcttacaaacaacccaagagtaaaattcttattgttgcaaccccattttacagatgtggaaactgagacctgaaaaagtaaagaaaatcacccagggtcacacagttaaaaagtgtcagagttaagagtcaaaccaaggtcctctgattccaaaatcaacctgaacctatacccactccttgaatctttcagtcaaatttcttgaacacaggaggataaaaccttcccaactgagtggtttaagctggagttacaaaggaggactcactccatttcattagcatccaccaacttctggctagattatctgaggagagaggcaggcgttgggtaatgccagtaagtgaacttgaatgtaaccaacatccacacttagagagcttccacactattcagggaatggtgctgggtgccagggggctgcaggagaaggataaatacagggtaccctccctaaagagaacacatgccaggaatcacacacataattctgttgcagagcagtgtgtggcagagttaactgcccaggtctgggtcagatagacccaagttcaaattctatctctgacacttcctagcagtatgaccttgggtaactcagtgtccttgtgtgttcagtggggatattctgagcacctcttccaagcactttattttattttatttttttttgagacagagtctcactctgtggcctgggctggcgtgcagcgatgcaatctcggctcactgcaacctctgcctcccgggttcaagcgattctcgtgtctcagccttccgagtagctgggactacatgcgtgcaccgccacactcagctaatttttgtatttttagtagagacggggtttcgctatgttgcccaggctggtctcaaactcctggcctcaagtgatccacccgccttggcatcccaaagtgaggggattacaggtgtgagccaccacgcccagccccaagtgcttttgtgagtattaaagattgactgacaataaagcactcagcctggtgcctggcctagaggaaatgttcaataaatattaattattatcattactattaatgatagaggatacaaagtgttattagcatatggaaaagggagaactggctcccagatgcagacagtacacacagggtaaccaactggtttgctcaatactgtcctgcttttactgaaagtcccatatcccaggaaactcgtcagtccctggcaaactgggacagttggttgccctagcacatggcttcatggtgcatgcagggggtgctgttgatgacccacttggatcccttttactgggttagtgcatccatcccctagctgctaacagttcagaggtacccctttgcagggcctaccctcctctgccttgcccagagggttatgtggccctttccttggcaccaccaggcaatggtggacccacatgggtacaaaagttcggatcagagccctgcatgggatcaggctgaagccgaggtcccatctttgccttgctttctccttccctgtgcttcctgcctccccacttcctttctcctgaacacatgccccccgtaaatgtctgtacctaaacccttgcctcaggctctgctcccagggaacctgatctaacacagaaaaggatgccacttttttagttcaaatcttttattaacaataaatgaatgcaaaataatattaaaaattttacatacgtccacagagaatatttacacattgaattccaaaattgtagtgcattctttgttagagaatcctaatgctgtttttttaaagtatagttttagatttacagaataacttttttttttttttttgagacagaattttgctcttgttgcccaggctggaatgcagtggtgcaatctcggcccactgcaacctccgcctcctgggttcaagcgattctcttgcctcagcctccttagtagctgggattacaggcgcctgccaccacgcccggctaatttttgtatttttagtagagacatggtttcaccatgttggccaggctggtctcaaactcccgacctcaggtgatccacccacctcagcctctcacagtgctgggattgcgggcgtgagtcactgcacccggccgactgtgttgtattgttctataggttttgacaaatgcataatgacatgtttctacaatgacgtatcatacaaaatagcatcaaggccctgtgcttcacctacacagaggggagcatttgaaccaggcattgcagagggcttcgaggttctgtcaggtggaggaggagcaaaagcagttaaagcagaggaagccaggtgcacaaagccaggtgcaggaaggctggccaggccttggaggtcaagccctctattctgggctctcctaacttacaccagacacagagctcaatcttgcctgtgttgggagaggagagtaaagaggtagtgtctcctccactcttacttggtcctcagtaccggaccacaccacaccagctttcagctgctcttcccttgatctcacatggacccgcacacatacacacatgcacatgtatacatacaaacacatgcacatacatacacacccacacatacacacacatgtgaacacacatatgtgcatgcacatacccacatatgcagccacatccatgtgtatatagacatacacacacacccccacctgaggacccgtggaggtttgtcaatatgaatccatatcgaacttctgttggcatcaacagaacttctgttgacatcagactttgcctgagtgcactttgtcgcatggtatgaggtttcaggtctccggacttcttgccccagcaacatgtagagagccatcctgcagttggtgcacaggataagaagctggaggtggaggaggagtttgtgatgttcagggccttggctgacccccaagagggaacacacgttgcttattccagagagccgcagtccttgatgaggggaatgcttccttcccagcacggaggggttgagcatgaggccctcttgctatcaagtagatgctcagaaagcaggctggctagtctttttttttttttttttttaagtaatggttttccagcctaggcaacagagtgagaccctttctcagaaataaataaataaataaaataaagtaatgatttaaaggagtgcttgccaaagtacctgtgatgaaggacccatttttaaatgtttcaaaatgttcaatccattacggacagatcattttgtaaaatacaacaaaaataaattattaaaaaaatgaaattaaaaaccagatgtacaaaacatgagccaaatttttaaatttttatatataacagacataaatataaatcatccttccaaagtgctataaagtttctaaatgcttactctcagtttcttatcacagaccagtaacctccagagggcaggcaggaaccagtctgtgtaccatgctttgagcaggctgggtttaaagcgtgtacttcagggtcagtgagacctgggttcaaatcctgcctctgccacctgctggctgagtgtctggcaacctgacctttgtgagtctcagtttcctcatctgtgaaatagggagaacagcagctcattgtgaagaatgtgcagtgacgcacataaggctgtggccaccgtgcttggcacagatccctcctagctcattgtgtttctgttgggctctgtggggtatagtgggtggcctggggaagaggagccagttggatgtagctcctgcttccaagggagataagacatgagcctggatgtggcagaaagagccagtgattcctgacatgagagaggatcatgtaaagggctcaaggagggaagagtaaattgttttcagctggggaggtagactctgagtggggtcttaaagcaagagacggttcggtaggatgggaagagggagtgtaaacttctgtagtggggccatcagctccaggcaggaaatggggaaagaacaggccagtttcagggagaggctagaaaagcaggctggggtcagaccagaagctcaagggctgtgaagggattggattgtgatggggtcagtacagggaggcaggaagggttgtgcgggagtgacctgcctcagccttgagggagaaagatcacccaggcatcatagagaaaatgtgttggctggaggagggatgggtgccaggagaccattgaggtgtcctagcagcagccctcagggcgaccatgggtgccactgctgaggctcagtgcacgggatgactcaggtgtggctccagtggctcagggggctgacgctgggcagaagtgcccaagcacatcagaggcagactgtgaccccacaccatggccccctgggagcctgctggctgcggtttaccccacatcccagccatccccaaagctccctgacagcaggaaaaattcatagccattgattttgtaattaacagtttatcaatgccatcgatacagaccggctgatggattgcaaagaaattaatcttgcaatgttattttatttcatttttggtcgaaggcagctgccaattttgtcctccttggggagagtcgggggaggatggagagggcggggagagggagctggcaggagtcaggagcccacatggcaatgcccagccatgttaggtacacactctgtaagtggccgagagtgtaggattagggccttgcttcatctcccacctgatgacgaaggagtgctcactgccttggtagcagggagcagaaaaatgtggaggaggcttgggtgtggggccagtgaagactcagccctgcaaggacactcacccccagcctgagtccccacaggaataacactacctgacattgaccaggtgctgatcacgctctgggtaatgtgctgcttcagtcaccctcaccaccaccctgtgagtcctcactcctgtgttttacagccggcttagacccagctgtaacgtggccgtcagcaggtgcctccctgccgtgctgggatgtaggtaaattttgtttgaacccctaggtcatggcctaagttcaaaacctttcccaagattttagagaactccctatagctccctccatcaccgtgcctcatgccgccaccttgacacagtgctcagcccctatatctgtgcctgtattctgtgtcctataaccagaattttgtcaggttagcgattgcactgaagacttggggagctggtgcctggcagcggcagctgcagtggttgtcatggtgatagtagtgatggggctaggggcggtggtaggggtgataccgctaccagggcactgacttgtgacaagttctgttataaacccttgacctgtttaactcctttaagcccttgaggtaggcatggctattatcccattttacaagtgaggaaaatgaggctcagagaagttaataacttgcccaaaatcacacagcctgcaagtaagggacacaggattccaagtctggctccagggtctctgctgccaccccctggtgacctcttgagaaatgtcccctgtagacgccagtctctccctgggtttgagtcccagctctgtcattagcttctgtgacctctctgggcctcagattggctctctgtgaagagagggttctgaagatacccctgcctgcctccatgctgcctcctggaccccaagatggcccccacaccaggcagcactccctggccaagcctgctaatgctcgtccttgtgcctgcagattccatgtacatcgaggatctagaggctgtccagaagctgcaggacctgctgcacgaggcactgcaggactacgagctgagccagcgccatgaggagccctggaggacgggcaagctgctgctgacactgccgctgctgcggcagacggccgccaaggccgtgcagcacttctatagcgtcaaactgcagggcaaagtgcccatgcacaaactcttcctggagatgctggaggccaaggtgtgatggccccgcacacggaccaatgcccacctacagacagacaaacggacagaccgaggtggagacctccacagccaccagcctccaccttcaacccctgtatcatggctctgagctgtcccagaggcgggggtttctcacctcctggctgtgtgcagactcccgggtgcagtggggtgggggacggggatgggggggcaggggtgtggggctcgactgtaactggctttttctttggtatgtctttccttctccatggacggtgcggaggcctgggccagggctgactcccttcaggagtggaggccactggagcaagtgccctctcccctccaccgagccaccaagaggcagcatgtgcatttcctaactcccttgccccctcccccatctgtggcctgggtgggcactgctcaggctggataccacctggaggttttccttccgcagagggcaggtacgcaagggacaacagtatctttcttccagaggtcctacctgctctgagatcctctggggccggtcaagaggccccataccttccacagtttccactcagctttcagccagggggtacccacaggagagcagcggctagagctcaagtgcttcctgggcaccccacccctcggggcctacccccctgcctgtcacccaccgcgccggtgtccacctgtcctcctcctcttctcctccccccgggagtcccccgctacttcctgaccctacctcagagctcactcacccagtgggttcagccagccacagcgactccaggggctgtagacaggaacgcgctggcacagagaagagcggggaccacaccatcctcccaagaaccctctccctcttcctgccttccccctctccctgaagggcaggtccaggccaagtgagcctgtgagaagctcaggagcctggctccatccaagagcaccccggggggaggatcaggacaggatggacagaggcccagactcatctttgccaagcacagaaaggccgagcagctgagataagtaggcaggggagccccaaagggagggaactcagcggggtggcctgcctcatccttcctggcttcccttccctgcactcagcatcatgccacagggctagtgtaccagtgccacaggaggggtgccctcctaccacacttgggctaccagaggtttggtgtagctcccctgggcaccgcgagcacgccagctctctggcaggacccctgcagtccccctggctgtgccaggtaaccaaccgtcttggtttgtccaggacgtttctttatcccaggaaactcctctaccccaggcacacggggacagtgggtcactctatttctgtggatggccgtgaaagttttcactaactcaaggggcagccctgaacacccatttgtgctcacaggttggccaagagcagcttagaggatctcccaaggatgaaagaatgtcaagccatgatggaaaatgccccttccaatcagctgccttcacaagcagggatcagagcaactccccggggatccccaatccacgcccttctagtccaacccccctcaatgagagaggcaggcagatctcacccagcactaggacaccaggaggccaggtaactttctgcagcttttccatagaagccctggtcccacctccttggctctaccccaggaacctcccggcctgggcttctgggctgggacgtgctgaggtcatcccagacaggagggagggctggctgaaatccacaaactgcagagcagctctctgatggtgtcccacacagaaaatgttaaggatttcaagagccctcccagaccagtgatgtgtccctccggctccccttgcctgtggggaatcgggtctgagtcacttgatgagtaggcactggagccgttacccaggatgctgcggccctagccctccatgcagcccatcttccctcatttgggtggaggcacacatttggggcaaaggccccttcttggcatcaaggaacaccagctacaaaccaagtctagcacagtgtttagaggctctgccctgaggttctgctccggagaaaccttcacagtagagaccttggggtgtgtgctttgggactccctcagtctctcactgtgctgtgtccttgcagcggggccgaggtagcaccctgctctgtcacttcctgctcaagctggaggacccaggcggcagggcatcatgcccagctggcatctgctgtctgtcttttctagggaaagcatctctggctcaccatgtaacatctggcttggagcaagtgggtgttctgcacaccaggcagctgcacctcactggatctagtgttgctgcgagtgacctcacttcagagcccctctagcagagtggggcggaagtcctgatggttggtgtccatgaggtggaagctgcttttatacttaaaactcagatcacaacaggaaatgtgtcagtaacaatggaactccatccaatgggaaagttcctggtactgaaggggtccattggacactcagaaaagaagttcaggggccaacttcttagctggaatcctggccagatgaggaccctctccggggaagggagaggactgacttagtggaaggtggtgaagtgaggagagtttaggggaaccttcccccagtggaacagatctcaagtttaccctaaacctgccatttctggaaaatctgtaaagaggaaacagcctgtctcagctgtactctcatgatacaggtcatttgaaatgaaccaagaaataaaacatgaaaatccaaccatggagaaggtggtatggctgggttttgtttggtccccttgtccttatacgttctaaagtttccagactggctttgtcactttgtgaactcgtcatgtgtgaaaaccaatctttgcatatagggaacttcctcgggccacactttaagaaccaagtaagaggctctcaagactccagcagagtcgggaggccatggcagcgccttagaggagctggaacctgcacccacctgtgtcggtggggggggcctcctttccccatagactctgccctccctctgtgcagatggaagtggcaggggagggtgaccagcttgtgacaagaagactgaagggtccagagtccatgctcacggaacagcaccaaagaaaagcactatgtggaaagattgttttattttctaataatgataatatggctggaatggcttcttaagatgtatatattttttaaaatggcagttccccattgcagcatcacctacttgtatgtctttctgcctctgtatatgttctcccagaaacccccatgtaaatcaaatgccctaggatgcttccatcctggtcccatgtatctggaatctaataaataaggaaaggaact

SEQ ID NO: 51 - DNA, 126838 bp, Pan troglodytes
  misc_feature (66284)..(66496): n is a, c, g, or t
  misc_feature (79177)..(79260): n is a, c, g, or t
  misc_feature (80541)..(81419): n is a, c, g, or t
ggatgagtggagcgctgggctgtgcgcgcacggctctctgcctccctctcccccgccgcggccgcctcctcccactctgcgttctcgcgctcactgtgccctgcccgggctcgcaccttgcccgtgcccttcactcgctcttccgcgtgatttccccgccgcctttctctaccaactgggaatgctaaaacgggactgatggacgtgtccgaactctgcatcccggaccccctcggctaccacaaccagtaggtgccctgcttctcggtctgtctgtccttctgcccgtctggcagtctctgtcctggggatcgcagttccttttctgcacattcttgtgtaaaagtggaagggacttcgggggggcacttgggggacgaaggaggggaaaagccgcacacttctgggtttctttctagggcataaacccgcctctaactttttcccgcacccctttttacaaatccacactttcaggcaagagtggcgctttctcatgcactttctccctttctttctcctctctgatcttgctccggggtgagaaaatatttgagtttttgtggaatggagcaagaagggaggcagaagcccagaacaggtgcagggatgtggttgcaaggatgtcctgtcctgtcagagaaagcctttcccgcgggcgctttgttttattatttccatcctggggaccaaaaatgatcccggcaagagagagaaaatcgaacgtgccgcggcggtttggaaactgcaggcggccagtgccgctctcgcctcgcggtctccgtggggcgccccgagggtgcgcacgtggcgcggcggatccagggcacccgggggatgcgggcccggcgctgcgtcgtaggcaaagttcgttctcggctttgggggaggctgtgcccagcggaacagaagggcacgatttccctgctccgaggcggctttgcgctcgcggtgccagaacctggggttatctgagcggcgtgggcgcgggcggcagccggcgccgcgagaagcgactctcagaaaccgcgggtctccagcccaggggcagcgcgccaagagcgcagagtgggaaagtgaactgatcgcccaagcagcgggtggtcaacccgcgtgtcatgtccgggctctcggggatcccactctatccacctacggtttccctcccgacaccctccacggtcgccgctccacctgctcgggtacctgcccgggtctccccttgggcgctgcgcaccccacggcgcccccggcgggtgtcccggaggcaggttgtgtgcgcgtgcaaagtggtcccttggaaggcttaataataataatacataaaactctaggttcttacggacagctttcctgcttaactttgtgctcatcttcctcttttttttctgacgcaaactaaactctccaagtcagcgtttctccagttccaccgtgctttcatttgtgtaccactcgctctccccctccccccaagaaccacgactacatctctaaaataaatactctggatcatgtggggtcccaggaagtacctaacccctctcctggctgcacgaagcacctccaccacggtgcaccccgcttgagagagagggcagctgtccacagcatggcttgtgttgttgaccagactgttcctgcttctagtttggggattttccccactccaccctggggcagagggccttttagatgccaccagaatgtcggcagaaggcgctggtctgggataggaatccttaataataatggattccgatttccatcagcttgaaaagtggctttcattccttttaaaggttagattctagctggggtggggatggggtgggagcacctgaggttagtgaggctgtggacagtatttggtgcttgtggaggatttccttacataaaatgatcaagtatgacaaatattggatatttaaattattaaggctccctctctccagaggtgacttctttagttgagcatgaaatacttatgtatttgttcctggctcaagtcatagtcaataaatatgaaaatttgtatgaaggaagtacattctttgcttatgcttaccaggaaagcaaggagtgagatggaggctttaacagctgggtaattcatcgagttgacggcagccctgactggagtttgaggagaaatatgggcaaaaaggcaatgtcagggaagcagcagaaggaagtcagggagctgaggtcctgggggtctgggaaaggtttgagatagaaatcatttataaactaagcctgacagaggtttagatccccaaccctttccgttttttgttttttgttatttgtatttttgcaaagaattagcttgtccctccatggggcacaggaaaagccaaaaatatacctgctgtctccactgaggaattgagcacccctgtgagatgtcatttctcaaagcccaggacccactgggcagcagcccaggcattgatgagctggcctcttatacatatatgtgctgcctggggagggtctgcgtgtgctgtggcgcagaggggcatcatttcaaggacgagcttgtggaggtctggggctggtgtctggggagacatctttctgacctctaccccacggctttgtgacacagctttagagccatgggtagtaaagtaacagagcgggggactggattctttggtttggtagaaggatagtaggacaaagccattcattatagtgctggcatttcccagggaacatacagtaagtgggttcgtgtatgctctgctcacagttttgacccctgtggattggctgacattcccagacttgagaaaacccaagggcacagggactagagttgagggaggaggaactctctggtcctcccttttgcttctaacacatagagagcatttgttaatgctgtagaatcattctcactttcccaggtgagaaatgaacacacacagagagaaacatacgtaccttcctacctcgctctccttcattttcattttcctgtagccaatcctgtaggtgactccattacccattctaatcaatattttatgtacatatataatcacccagagtgggaggcagcgtgctcgcctgtgtgtgcctgtgtacaaatgggtccatgactggaccagctggagacccacggcaaacagtccagagagcaaggggggctatcttccccactgtccgatgaccactttgctgttgttaaagaaataaagaacaaattgtcctgaaggtaaaatatgtgggttcacacgtaggaaaaatgccacatggtaattcagagtcagtgacccggagaaaaacaaagggggaaattaatttttaatggtacatttaaaaataaatcagagtgaggacattagtctcggttttccaagggaggggctctaggaaataaacctttatgtgcctgtcagccttctggaggtgtgcgctgccatggaagaggatgggtgataggaggtgggaggtgttcaggcctgaaggcgatgaactgggaggagacagtaggtcaacgctggagggccccggtcccgggtaaggccctttccagctcagtgagatcctgacatcactggaaatttcctcttggagtttgttacttcccccaacccttttcattttagaaacaatcctttattttgctgataatgaggacatatgaaaaagatctgttccaaaaaaaaaaaaaaagcacagagaaacaacctggccacaaaacaggaacctttttattctattgatttggagtaatcaataaatattccatttagtctgggagaggaggggcagaggggactttcggggaaagcacttcaaaggaggtggcggtgacagagatttcatgtcacaccctgccttctcagagcacccctggccctagctcgggggcccttataactttgtcctgcgtgtgctccattcatattcctgataactggacattttgccaagtggtttttaaagataatctaaactcattgagaaagtttgtccccttcctcagccctctgctgaatgccttgtttcttttgagcaaagatctgcctacttctgatgggccggaggaaggatgcgtgtgacagagagacactgagggagcatgtacattggggagggcggtggagttggccatgaatgcgtaggattcagaaggagacagaattcgaagacagtagacaagcaagaaacaggatgcttttggcctgactctgcagcgcccttctctagaacttgtctccccaagtcctttaagcgacttcttaaaaatgattaaaattctttttggttccaaatttaagggaagagatggcagatatttagaccataatgtcctccttccaagtaaagcccacaccacaccttgattgcctccattctggtgttccccaacacctaccggccatcgtcaagtctctgtccatttctttctgaagtgagaccctcgtaatgctcttcctgctgagcaggagctctgcccagaattagcgaggatgccgcacagctcccctgggagcttctgtcgtagagtctggtggctcttgactgaatgttactggggtggggagccccagcttgacttgaatgctcaacctctggggtcctccagtgacactacagcccctagaggtgctgccagtgcagggtctaaggaaggaccccaggaagccaggagagtacaaattaagaatgggctggaactagccaaatctggcccggaatcttcctgaacatcctgcctgtttgcccttgaaggcttttgccgatttctagagataaatcaaagacctttttagcatgtatgcgctggtgacccctgattggtctctgtctctggtgagtttccccttcctcagccccagcagccttagacctctggggacagtcacagacatggtcttccctcagaggaggggcccataggctttgggtggccctggtgtcccctgtcccctggcatgggtggggtgggattatatccttttagccccgtcagctggtatggcttcgtccctgcgcggggaggttgtggtgtttattataattgcaaatgtaattagcagaccagctctgggggactgggaggctcaacttctctgcacatcacggtgacccctgtaatggctggcccagcagattaaccctcaccgggccagcctgcctcctgccactggtgaggctgctgaccttttctaataatggcagggctgtcctgggaccagacaccttccgtggaggggttgtcagggcaatgactggagagatccgtagttgggaggattttttcttccccagggcactgggctagtgacctttgcctcttgagacactgtcaccctgggcagcaggctgtgctgggccatttcttctctcgtgttcctggccatactggaaggatgtgacggaaggactgtgagtgcatgctggtcagttctgtggctctaaagggactcattgtgacttccatctggtgctcctgggctcagcgggcagtagcttgtattcacccatctcatcagcttcttctcagagccagctttggggaggtgactgttcgctggctcctggactctgagcaggtgttccacagagctggactgcttcgggtagggaggctggtcataggagagcacaggctcaatttgtttctgagaacagagacctccccagttaaccatccaacaaaaggacaccaaaacaccagacaagtggggaacatggagctgcacagtcttttccctccctcctatgagtgtacttgtatttgcctctctagggtgcccttctgtactgatcaggattaaaatcatcaagggtcctaacaggacctttctttataagtcattgcttaacagagtgtcaagcccttctgtgctgccagtaaagcccctgttgtagaggatgtttctgaaccttgaaacatcaaaagccgtgtccacccctaagagagtttccaccgtgggaaacctgtgtgtgcacatgtgtgagtgtgttccggtgggtagtcccctttaagatggggtgacagtggacaggggtctctgctatttaaacatgttcctgctgactgctataccccttggctgggctgaggtctggctgtgaccacattccagcaggggctgccatgccttgggattggttcgtccatggtgcaaaggggactgcaggggcacctgctaggtggctgtccctctggtttgcccagaggatttcagtcttaagagcctctctgcaattttctggcctgggtagggctggggcagaccccagagagggagagaaggaagtcctgcccttctccaggataacagatggccacactcagaggagcatttgggccattctgttccaggttcccgacttccccttctctccctggaaatagccattgacaggttgtggcttaaagagtcaactgttttcttaaatcaaggaaaatcatactggttaatcagcccatgggatgttcactatggagttggactaggtggaaaaaaattattggccaaatgttttaaattcagaattgtctgagtttgagttaaaattgtataaatctaaaacaaaagttttcctggggctcagagatagaattttttcatttcattttgctgtgcttttaaacctatacacattttggtctgaaagtttctttttttaaaaaaaaatgtctttcctttgttccttaggactttaaaatactctattcaatattgtcattcagcatccccgggactgaaccttttcagggaatggttttctggaaaattttattttatttctcaatgtcatttcattcagaggtcaaaaggcagttaaacaaactccaacaagcctttgtttttatcttctgatttcaaatgtgatcaatttttatttaaaatcgtatcagagacctctcctaccaattatagtggcagtcagcctcgtgcctgaccattggtgtttaccaaaatcctgcatttaaaactgtacgaatgtgaagtgtcaaattgaattcaatcttttctatcaaggaaacgatgagttaaaaaaccccaaataccaaatgtggttttaacttggttcttttatttttaatggcttgaattggcttgagttcataaattagtttttatgttttattctttttgttaattcattttgaaatttttattggttttttttttggcattttcatctggcttatgctttaaaaatgatgcctgataaagggtttttgagaatcattggccttttgatgtgttcttggtttctgaagggcaaagaacaaggaaatacaggtgtaaggaaatgctataggagaggatggaaggggtgaagaagtgtgatcttttagatgagatttctctcgtgttttacaatttagcattttcttttgtcttcattttttcccctctatttttattccaacttgctgtagtttgcccttgtccttttgtccctccttgactgttttggaggaaggagtgtaggtgtgtggtctgcctgtgtgtgagtgtgtgtgtgtctgtatggctggctgagctgttcagaggtgctgagcatgattagttgggtaaagtcccaaagcagaatgcctataattggcccccctgttctgattcagccatcaatacctttattcatggtcgctggctggctcatgttttggtgaaaaaaacaagaagggtgtagacctgctgtttacagacaaatttcgggtggtctgtttgttatctgaggagcgtggtgataggggctgcaggtatgggtgaggatatgaagaagcactaaactttatgcaaaaccaatttttaaatccctcccctcatctcaccgcctatgcttggaaccctagtttgggatcttggtgatgcacagtaaatgagctgttgtatgcttttgtttttgtcttcctaatcgatcagcagaaaacatttccttttgatggtgaaacaggacttcagcatgcagagcgcagtatttatcctcttacttttagcttcactctttgtcatttgtctcttgggtttgttgacattgtctacctaagcagtcaagctaacaagctttggcagaaagaacactgcttttacagaaatagtagcaattttaatgtgatggttataataattgtgattacagtaatcacagcttgtacctttttcttcccaaaaagcacaaagcaattctcgtaaccatttttctcatagtagctggatgagggtggccgtttcttgctcccaaacataaatatcttcatgcaaacataaacatgcaaaggctgcaggtttgcgtgtctgaattcacccaggagcaaaaactgcctggtctctgaatacgaacaggcaggtagaggagaatacggtgttaaccacctggcccccctgagaaaagctgggtgctttgcctttgaacgaagatgggagaagtgtttcttgtaagtgatgctgtgccaagtttgaccccactaccgccggcttctatgccccgtgccatgctctgcctcccagtttccccttgctccttggttcctctggctgcattctcatgacaggtttgcagaccaaaggcacagagaggacaagggggggttatgacttggcgcatgtgaatatctgggagaagaactgtgtgaagagagaggcaaagtcatctctccacccttgatcgccttcttggccatttggcttctatgaggccgttgtccctgctcctgagtacctcaacctgcactatggaggcgattagagggaggtcatcagggaactgacctctctgaatttccgtgacccttcttgtgatgcttcatggcgactcccagacctgaagcctgctcacctacagaccatgctcatctgtgcgttactttagaatccatcaatgcttttgttatttcctctctcatttccttttttgtatatgtatcgtggaacgaagaagcagctctgcttcacctaatattccagggtcccatagctgtctgtattttttttccatctcaatattcttactcatgttcttactcatagtttcttttcctcaggaaaaaaaaaaaaaaacaaccaaacctcaaagctttggattattaattgattattaactgattttacaaacaaaacattccacccccaaggaatgcaagcaagactctggctgtgctgctcaggttgagatctgctttccccctcaatcggtgagaaattttatatcttcaattcccttgttggaccctgagtaaaaaattaattcatgaataataaaaaccaatcagtcttgttgagtttaagaaggattaggagaaagggtgttttttcttacagagaacatttggaatctgtgtgtcactgtcaccgagtgtttgggggtggcttgagcgaagcctttattcacggcaaatgagctgttgattatcctgagtataacacatcttcctcagttgttaaggccagcttactgctgactgttacggggttcctactcactgctctcccaccatcccgtactccaagccagtgataattcactgaaattaagacagtttcctgtgtaagtggcatataaccaaatagcaaccgacctggcctttgcattatgaataagcccatttgctgatgggatggagtccttcttggttttcctcccctttctttctcaggaaataattgaccagaaatttacatgcttttcccagaactacagaaattagatgtgtagattctcttttcagtttccactaatagtatctacctcccagggttgttttgaagatttagtcagaggacaagcaccaggcatatagtaggtgtgcattaaatgtccagtgttattaattttttgatgttatctttggggcattactttttattcctttgacataatctcacaattatagtcttccctacagtgagactggggtgcttgaactgactactttgtttaatgtgatcaatatggcttgcatgtcaatatataacacaaggggattaaagaaggaattacagtttgggatggagaggatgaataggaaattttcctctgaacgaatccctatattttcggtagggctgtccagtaaaatacaggatacccagttaaatgtgaattttacataaatgtgagtatctttttttgtataagtaaatcctatgcaatgcttgttaaatctggcaaccctatctacccatgactgtttttcttaaaatagtctgataagaaacacattgcccttattttttttctgcttttgaccaagcccgaaagattaattctaggttcggttttttaatttttttttttttttttttttttttttttcgacggagtctcactctgtcacccaggctggagtgcagtgacacgatctcggctcactgtaacctctgcctcccgggttcaagcgattctcctgcctcagcctcctgagtagctgggactacaggtgtgtgccaccacacctggctactaattattttgtatttttagtaaaaacggggtttcaccatgttggccaggttggtctcaaactcctgacttcaggtgatctgcctgcctctgcctccaaatgaccatctttaacattttaccaatatgaatgtgttaggctggccgtgcccttagataaggcagtgggtaagttccatcgaccagatatattgatagagttacaattaagtaaataaatctgctgaatgaggtctcctaacagcacccagggctactgaattttgccttagggaggaacagggtaagtcaagtctttttgggaacctgtctgtgcctgatgtttccctgacaaacgggttggggtgctggactgccagaacctgagaccccagaaactggaagttacccttgccccaccctggaggccaaagcagcagctctccctacctccccacataaggacaggaggctgacccttgggagggtctcccaggaggctgaggggaagcagcccaaatcagtgttaggtggtggagcagggagggttaggactccaaacctgaagcagagctagttgagagcatggatgaaccggggctcgccaacagggtaccagcggaccccagcttcccctcattcacctctcggaacagcacagtcgcacagccttggtaaacacaaccattgttttaagcctgatgccctcacagcccagggtacggggaatggaagagctctagagccccctacaggcactcactggcactgcaccccatgggtgacagttctgcaacagagccttcccttggtggggtgtatggagaatcccagggggtgagccttcagaagctcaggggtgagctcaggaccctggctttagaaagcagctctggttttcacctttcccagccctactccatgcaatttagcactgcagctgccttgtagtgtggtattcctcccaagccccaccatgcatgcaggcacacctacacaccacacactcactgcctccgtggcttgcctgacctccagacgggctggaaagtgctctggtctgattcagtttgaggaatgccctccagctgctgaatatgcagaagccgtgcagccagcaccattttcagagccagatactggtgttcagatgctcttctccaagccacctaattctctggggaatcattttaggatttgatgtaagaaaagtgtctgaggggggataggagagctaaatataaagtgtaaggccagagatgggtgattgtaatagtaatagttgtagtaattgacatttattgagcatttactgtgtgtcaggctttgtcctaagaatatttcatgtatgaaatcatcacttcctcacaacagtcctaggaagtaggtattattatcatcccccatttcacaggtaaagaaactgaggtacagagacgttaagtcatttgcccaaggtcacacagctgacaaagctaggatttgcacagaggcagtctgggtgtgtgcctgcactcctcaccccgatgttatgtgtttctcattgcatctagaatttcagctttctttcattctttttttttttttttttttttttttgagatggagtctcactctgtggcccaggctggactgcagtggcgcaatctcggctcactgcaagctctgcctcccaggttcacgccattctcctgcctcagcctcccgagtagctgggactataggcgcctgccaccatgcctggctaattttttgtatttttagtaaagaaggggcttcactattcatcctgttagccaggatggttctgatctcctgacctcgtgatccatctgcctcagcctcccaaagtgctgggattacaggtgtgagccactgcacccggcctagaatttcagctttctaactcctgccttcagaacaccttgtgtggatctaacacttgggcaaaatttaaggtggtggtggagggggaaaagaccaagacccatgtcttggttctgaaaaaaataaggtggaagaattgctgcacagagtcagacctctcatcccccaggtcagcttccatccttgtcctcggcacaggagaaagctgtaggaaggaacttttggtcttcctgacatcatcgtccaagggcccatgcccagcctctggaggccacttagtggtttgaccccctccatgcctctcctggagtctatcataaacatattttgaagccaacttccctcttctcagcttgcattttctcctgttccttgccttcccatcattctcttatcgcccattctccaacagctcccaagtctgagtctcagtgccctaccttggtgcccgtcttggattcccgcaggcaccacacagcagcacatgcaaaatcaaagacagcatcacactctaaacctgcttctcctcatgtctctttaggcagggaccccccaccaagccaagatatggagcgtatcttcagttcttccctcctgctcttcattgttgagtcccctcctacatctggaaaacttttacctatgtatacacctcagatctagtcattcttgtattgcttcccccaaccctggtctgcttggcgaacttctatttatcctttaaaaccctgctcaggtatccccctctgtgtggagacatccctgacttctccctgggggaattagtctttctccttgcagctgttctctgtctcatgcccctgactgggttacaatctgttggatttgaatatttgcttattttttctcctagatcatgaggtcctagagtccaaggtcatctctgtgtccccagtgacacagagtgggtgtttaataaatgttggttgagctaacctgaggggattggaagtagttaaaggggagcccttgggggaaaagagggagaaagaagggcctgggaagaggtaaccaggagagcactggttctgccacatcttttgccctggttgagccatggaggcagctctggcttggggagcattatatccttctgggaggcaatgcagtgttggggttaagagggaaaagcctagctccagactaactgaattgaaatcctggtcccaatggtgtgctggaaccagctcaaaccagctcaggagagctcactgttaaatattcagcagttttgtgggctgatggtcaaacacaatcattattaaaaattaaatggtataaacttataattaaatacattgtattaaaaacaaaggtaatagataccactcctcacttcctcatatcttagtacatttcactttacgttcttgccatcaatttacacctaatgtatggtggaaaaaaccatgcgatgctgagctgctgcctgtctcttcccaagcctgcattccatgatgacacactggtagtttgagaacagccatgatgggagtatttacaccacggaaattggcaaatgctacagatccgccgtcccccagctggccgttaaacatttattaccacaccactgcactggctccgtcacatcccagctctgtgaccccagataaatgactcaatctctctgtatctcagattcctcttctgctgtgatcttccacgttagattgctgtaaagattaaaagttgataaacatggctgagtgtggtggctcacgcctgtaatcccagcactttgggaggctgaggtgggcagatcatttgaggtcagcagtttgagaccagcctggccaacatggtgaaaccccatctctattaaaaatacaaaagttagccaggcgtggtggtgggcatctgtaatcccacctccttgggaggctgaggcaggaggatcacttgaacccaggaggtggagattgcaatgagccaagattgcgccactgcactccagcctggaaaataaagcaagactcagtctcaaaaaaacaaaaacaaacaaacaagaaaagataaatataaggtacttatagcagaaactagtacacagtaggtgctcaataaatattagttctttttagtatttcttctcattgctccagtgatgcccctatccaaattctacagaaacagatgacgtgccaggtagaggaatgtaagttttatttctagagcataaggttcatgtcctttccctacaggacccctgtgtgtagggtttaacttgaggagctaagtgcgggaagtaaaaaccatgaattttccaaggggaaaggcgctgatggagaggtatgctgaagcctccaggccatgagaggattgtgccccaggccctttgaggaaatgaggccacagcagcacatggttgaacaggtgaggcaggcacaggtgaggtcaggagaggaatgaagcagatgccaagaacagccaagctgcagcatgaagggaggctctgtgtgtggctgcagcggggccccaggaccttgcgaggaggcagctgccctctctggaaatgctgggctgtgcggtcatgcccatgaaggcaagggctcctctggctttgaaagtggagaaaatattcctggccaatcccgagttggatcacacagttgaggttacattggctgcgttgtggtttcttgggatgctacaggaaagtgggaaggtaagaagatttggtctgcagcctccaggacagcagaggccaggaaagagcaagagtgcgtttgggcttttctagactcctccgtggcaggtttcctgggtcccagccaacccaggcccctggaatgaggattcacacttaatctctctgttacctggaaattgcttcaggttcagacctttgccatcaggaggggcagttcagtgactcagatacacacagttcccagcccagcccttttccgatggtaagtgcactacaagcccacagacccctggcaatgcgtacatctgcgtgctgtacaggccagaagctgcagctcattgctggggtctgcttctgttctttgaatccctggtctgtagacaaatgccctttggagcggccttgccgaggagaaggcagcgttgagagtgaagcccttccttcccgcctcactgtgggagtctttcactttaccctgagctcctcaagggcccatctggctctgattcgtctgcagcacagggtcactcatggaggagccttcagtaaacgtgaggtagaagtttagatacattttgagaaaatttgtgctttggggtgcaccactagtgggttacctgttccgttgtacaggttgttcactgtccaagagtgcctggttgaggaggtgggtggggtctgaacttagtttttctaattcacaacaagccacacatagctggggcatgggagtgagtatccaaggggttgagggcctagagggggctgaggaaccacctcaccaggctccaactcattcattgggagcaacttcctgtctaacctgtgtctggattctctgaagaactctgtgtttctttctgctggcaacatccctgcagcctgcatttagagccggatagctcttcgaaggctttctgttctgcgtaactgcagtacttagcgggtcccccatggctctcagcaggccccggggcagggaggggcctccaggccctgccctggctgctgatatttcaagatgccagtggaaacagagacactgtggccctgtgttcccagagtcgaggtgcagggtggtgtgtgggtgtgagtaagccagcggccctggcaggcaggggcatatccgagaaacagtgtcacagggttcctgggctctaagggcttctgtgagtagattttggggagtgctagaatttatcaacttggagggaaaggaagctgccgttttagcatttgatgcctttaatcttcacagtaatacctaagtagggagtcctgtcccccgtttacagaggtccagaggagctgagtgactgcccaaggtggcgcagtggatccacttgaagagccaggatgcacgtccaagtctgtctgcctgaaatagctcagaattccaggggcccagaaaacccactgtttctatcacagatctctgtcttgccaggcccaccctcctgatgttttccccaacacattaatgtggtctcaggctgaactactcagctgaccctgggctcaggaaaggggagcgcagaccctgagacgggcatgtggctcgggggctgccaccagggcctcatcccagtatggctgtggagagggtcaggacatctggaagagccagtgttgggatctgttcatgctgtgccgagagaagtgcttccatttgccaagaaagaatgaggaagagggaagggcaggcccacctccttgctgctcgctgggtcagtagccctgggtggccactggccttcacagagaagagccacttgggggtggtccacatgtgtgagctggaacccagggcctgtggccagccctgggagggcctctgtgcgggcatgtggggcagggaggcactggaggccagtttcctgtgcaaagcctttggggcatagcggatttggggcatagcagagaaggaggcctgctttggtctgtaaggtgctgtagccaggatctaacacacctgggcttgggtttgtgggtttatctcccttgtgtattctttgaccacccagctccatgcctggccagcagagttctcgcaggagaccctgcaggcttgatgtgaggccatagttggaaacctgatgggccctccctagagacctattgcctggagaagtgctccctccgtagctccggtagacgcccctacgtgcagtcttgcccaccaccttgctctcaacgctcctctccatgccctgcagcctcccaagtctttcctctgtgccagctatttttgcatggcaacaatagtaataaaaatagttacatatggtcaggcaatggatctgttttttggtctgtaagtgtattttatgttaaaaattttacattttatgacttcaagactttgcatgaaatacctttactgcaaagaaaaaaaacattacctgggatcagagcagtcacagaacacagaggcccctggcagtcaggagagaggtcccctggtcggtgcccaggtggagagtgtagccaggtgccggcaactgcaagtgtttccaagcaggtgcccatgtccagcagatgcctgcaagacttgaatcagaggcactgttatgagggcggaaggacctggggtccccaggctggccgaggcaagggactccacggctgctgtcttctcagtaacaacaccttggattcttttttttgagacagagtctcgttctgtcacccaggctggagtgcagtggcacgagctcagcacactgcaaccttcgcctcccaggttcaagtgaatctcctgcctcagcctcccaagtagctgggattacaggcatgcaccaacatgcctggctaatttttttttttgtattttttggtatttttagtagagtttcaccatactggccaggctggtctgacctcaggtgatctaccctcctcagcctcccaaaatgctagtattacaggcgtgagccaccgtgcccagcctagaacactttggattctaattttagtacttccagctcctggccatgtggatgagatcagagattgtgcccgtgtcaggtagacttggccactccagacaaaaccagcttctctttgatgctgggctcttttcttttcccccatccttctttctttctagccctgtttccctgcctctgtcgttctaggccagtttccctctatttttctctttgctgatgctcacgacaatagtaatatttgctaacatcttctgactgcccactatgagccaggcgctgtgcaaagtgcatcttgtggctactcatattttttgcctccttccctctttctgggccttttgtactgaagattcacctggtatcccttgagcacctcatgtggctggtactctcctccccaaagaggatgcagccttgtgggggctgggagggagcctcattagctccagcgccctcattttacagaagagaaaactgagggcttgagctgatgagggccttggctacagttctgcagcttgggtgcagaaggaaagccagggcttggcctcttgacctttacccagagctgtcttgcatcttgtggatgcaaattgtttgctgtcagctgcgttgagggtctctttgaccttggggttctgagtacctaaatggtgagccttgggccaggcagtgcagatcactgatgtcactgtgccagtgtcactgcatacccaactcaggctgggcagggcgaggagactgcaggagccacgcagagccagaggagggctggatggactgacacgaaccattcccatgtaagaaaattaaaagataaaaataattttgatagagggaaactggtaggagggaagatgagctggccgtctgggcgaggtggcctccttcacaggttttgctgccatcatctccctatgtgggcccacttctctccccgggccatccctgtaggctgttctttgcccttggtgacctcagtaggagctctctgtttccgacagtcagcccctcgcccagtgggaggaggagatggagaggtaagagctacctgagaattaagccatgtgcactatctggctcatgctggtcttcccggggcctcattccatggctggtatagaaatatgaatgcatcatcccgctgtcaggcagcatcccagctactccagcctgtgtccaaggtcagtacctaactggccatccctgctccgaggtcagttgagggtctggcaatattaccatggatctgaacaccactggctccccgggggctgcagcggggcgtgtggaggaaggagtccctccggactcacggcccacactagaagaacataaaggaatagacagcccctgtgtggtgcagcacagcaagcaggacctttgatgtcagacaggtatgaattcagctgacaactcaactctcccttggtgtgtaccctggggcaagtcacctaacctccctgtgcacgctggcctcatctgaaaagtgggaataagaatccttctcttacagggttgcagaagaatttaataaaataatgcttgcaaaatgcttttatgcagggtactgtcagcctcacaaagccagagatgccccaagcattctctgtaaacacggctatgaccattcaaaagaaaattataaattcattttaaagtattacttaattaggagttattatatatttttccacctaataaagactaaaagtaccaagtttatgatacttggtacttggggtgaggggcagggttgagaaatgctttggcattaaaaagaggccttcagccgggcatggtggctgacgcctgtaatctcagcactttgggaagctgaggcaagtggaccacaaagccaagagttcgatacaattctggccaacatggtgaaagcccgtctttactaaaaatacaaaaactagctgggcatggtggtgcgtgcctgtagtcccagctactcgggaggctgaggcaggagaatcgcttgaacccaggaggcggaggttgcagtgaaccgagatcacgccactgcactccaacctggtgacagagtgagactccgtatcaaaaaaaaaagaccaaaaaacaaaacaaaacaaaaaacaaaaaaacagccttcacaggttcatgtggactgagatgagaatacaggcaacatagagttgagtaaaaataaaaatcaagtagctggacagtggatagagtaaaatcacatgtatggctttttaagctctaaatgctgggtatatgcttttgaaacttggggaaagagatataaaaaaaaaccatcctttgagttagctgtagggaatgggcttaagaatcctggtattgggagagatttttacctttaactttgactcttttgattgtatgtacatattctataatgaaaacaattttaatgtgtaagttaagggaaccaagtgtgagcaaacaagccagcaaactaataaaccttcctaagaaaaacattgaaatacaaaggatccttatgaaaacttggaagtcagctctctggacacacagtcctctagaaaccaggttctgtccctgctccaggtccctgcccacctgctcccctggtcccctgcagtgcacatgctaccaagcctgtgcctctgcctgcagcaggacaaacccagacagaggcttagcctggaggctcaactcccagagccagcgctggcggtagatgcagcagccaggctcggcctgggttggcaagggttggcctcaccactagattcgtctctccacttcacgcctcatggagccaggccgagggagtcgctggaggatcgtgactgcccgagtgggtggttgctcacctgcccaggaagccattaatcttgtgtctctgcggcctctcctcccacgccagccgcccgggcacggactgactcgggaaaggacatgaaaggggccctgggcttcactccatggtggaccatgaccctggaaaataccatctggcttttctatgtgtcttctgacaccaattcccctggtcaggacacatcaaagagagtgagtctggtgacatttctcattgttattcctttggcagggccttcagattcaggtcacagatagactcgcacctccagaggctgcctgtggggcctgagccccccatcttacagatgcctcaggaggggcttgtagaggtgacccaggaccccctagcggccaagaccccagtcaacggcacccagcaggccagtcccccagggccagtctgggcagcagaacctcctggagtgaccactctgactttcgttctctgtcctctgatgctacccacgcaaaacagccaaagcgccaggtaccccatccagggtgtcagtaatgtgtggagtttgacctgaccctgggaatcccagcttcagtcacagagtcatattttctttacggaggctgggcttgctggctttaaagtaattccaaaatagatttattggacaaaatttgggcaaaaattgggacaaaataatttggggcaggccaggcatggtggctcatgcttctaatcccagcactttgggaggccaaggcaggaggattgtttgagaccaggagttcgagaccagcctgggcaatgtagcaagaccttgtctctatttttcaaaaagaataaaacatgtaaaagaataataacttggggcaaaaagggggcttctgaataaccgcgaggtttgatactcagaaatgcactacctcctgagcagaaagtcgcctgtggcaggaggtatgtgcatgcaaagttgacctttttggaaggttatagaagatacaacagcagccaggggcttgcactttctgttgcacactttccccttttgaataaacccctttgtttcatatcagtggggaacagaggatgggcacgtgcagggcctcattggatatcctctcacttttttatgtctagctgtttaaacatggggcctcctatgccagcttgtgctttgttggaaaattggttcaatagccctgctagctggcacgcattgaagtatttcctatatgccaggcacagtgtatcgtgcattacccagttagtacttttgaatctcacaactgtcctgcaaagtaggcacttgcattttcctcatattccagatgaggaaataggagctcagagaggttgagtagcacccccaaagtcacagatctaacacaaggcaaagctggcatttaaacatagacccacctccaaagtccactgtgctggacacatctgcagaagacaaatagttcccccatatttcaatctctctctctgttggaaactgagtccgctttttgttattgcttcccccatcagagttcaaaggcagccaggaaatggggtggtctctgctttgctgcttaccaccttgtcacctttcatttgtatttccctagagtagggaggcagtgccctttcttggcagggtgcagtgggtggaaggagggtagggctgtgggggaaggggtcagaagagaggattgcctctctctaggtagtcaagggggcatacgtatggggtaagaggctggttggcattgggcattgcattcagggtcaaccattccagttcccagatatacatgctgatagaatccttgtgacaaccctgtgaggtagaagctcttctgctcctccttttacaagtgttgaaactgaggctgtgtgccttgctcaggttgctgagctagcacacggtggagtctgactccagcctaggtctgcctgcctcctaagtcccaactcaccaccaccatcctgcatttgatttggttcagcctctcggtctgttgaggggactgtaggaggtgacagaaaggatgcatttgcataggtgggttagggatttttttaatcctcattttcctgatggagaccgtgagacccaagtgtcttgctgaactcagtacgttggggactgaaattaccacctgtcccctggctgcagcctgccttttttgcagatgggtccaaacagcagatgtggatggtctgggagggaaggttcctgtggctgtgtgaagagggagactggggtggcttcctggccagccgtgtgttttaaccagcgcgtatatatctttatttaaaggagtcctatgcttttgacaatccatcaggaagctccctgtgacggagtccaaggggttccctggtattgctctgtgatctttagacaagccacttagcctctgaacctctatgttctcatctgcctgatgaggataagagaatcccaactccctgggtcaatgctaggctaggtgaaatctagcagccaacacaggttggatgtgcactccaggaggcttcctagcaatgtccccgccgctcattcctcctcattatgccctcagagcccacatcatcccctttgaatatgctcgctgatggcaagtctccttccattccgggtggatttaatgttgaatacagccaaggtcatttggaggcaagtctagggaattagctgggtgacagagctgagcaaagagatttttgattacaaagaacgtgaggatgtgactctatttctcagataatctggcctgaaaggcagctcccaagaggaactccaaaaatggtttgacgaaagccagcatcactgggaacttggaagagatgcccagggtgaccatgaggaaggggacagcgctcactagggtgtataaataccagttggtcacaatgggtctcctgacttcacagtcacaccctgctgctcctgactagatgctgccgtttcaaggagcaaactcggtgggaggtcacataggtgtccagtggaactggggtaattgtggccgtctcaggtcaggctcagtccctgatctatgcggaataaataatggcccagcaagatgcctatacctttctcatcttaccagccaaacctgcaaattacccaacagaacccacgctgctttggctgggagggccgaatgagccagagcttgcaagagtctagctgggggcagaagggaggaaggatacacacccctcctgctcctggtacctcatctgctcttgagaattagcctggcagcgggagcccttcaactgggtacttcgtgtactgccgtcctttgacattttccttctgggaaaacttctagagaagccattctgggaaaggtagagatttagaagttttgaataagaaaatagcaagctgagaacataatctggggagaaagagcacagggcagagaactctgaatagtggcagatggacttcaatctgaagactgttgcagatttgaacaaaatgagggaaatcacaagagccgggagccttccaaaaggaaccgcttccgttgaagtctgtccctgattctcaggttagggtcttcctcatttgggatgtgaaaatggtttttcttttataatgtgatgcttgtactaggttgccttttcccacgttttatgttctcacttgacaaatagcgtcaaccttgtattggtcccagtttgggtggtagtgaacgggagtgggaattatcttgtgtggttggaagatgggaaccactggcctagaacccagaaactggaaactagctgtcctcaagctgggccttaagtctctgtagggaacctggggacagaaagtgaagacacacgaacaactgtttatatccgtcatcctccaacgggcaggctcctatgggtggggctccattcagcccaggaattctcctcttcccgttggtgctctgctcttctgctctgtgcagagggcagctggttctaaggtccagagatataagatttcttctctggtttaagcagcaccgagagcatggtcctctcgctcttcctgattgtgctctgagctctggcctcttgcagggagttgccagacacatgtgtgagaagaagggctccttttaccgttatactctgggtgtgatcacagctccggcccaggccactactgagccctacactgtccaatattcacatgggagggttgagaggagaaaaggcactaaacatcctgtgtcataggaaaagggaacaaaagaggaagcctcgaaacagactgggagttgtcattcatgaaagagtgagccttccaaatcccccacgctggctggtctttacagcctggaagacttcagattaaagagaccatgaggaatggggaccatggggatagattacttcaggtaacaccacagtgtcacccagctgatggtggccccaatttctgggcagtgggtggggagtggaggcctccagccctcttcgattctgaccttcagctgcagcattccttgagcattcgtggaactttagtactgcaagatactctcaggggaaacagcttcctggggagttcgccaaagaaacagaaccaatacgatgtatagtcatgtgccacataatgacatttcagttaacgatgggctgcatatatgatggggtctcataagattataacactgcattttttacaccttttctttgtatagatatacacataccattgtgttacaattacctacagtatttagtacagtaacatgctgtacaggtttatagcctaggagcaataggctttaccatacagcctaggggtgtagtaggctatgccatctaggcttgtgcaagtacactctatgatgttcacacaatgatgacatctcccaacaatgcatttcattattaagcaatggatgactgtgtgtgtgtatatcctttatttatgtatataaagaggtttattataaggaattagcttacatgattatggaagccgacaagtcccaaaatctgcagggtaagtcagcaagctggagacccaggagagctgacagtgtaattctagtccaaaggcaggcagacttgagacccaggaagagccaatatttcagtctgagtccaaaggcgggagaaggctgatgtcccaatttgaaggccattgggcaggaaggattttctttctcttgggagagggtcagtctttttgttttattcaggcctctagctgattggatgattgcacagggcaacctgctttacttaatttgctgatttcaatgctaatctcatccaaaaacaccctcatggaaatacccagaataatatttggccaaatatctggagactccatggcccggtcaagttgacactcaaaattaaccatcatagcagtcacatgagtttgggagattcttgtaaaccatggccctgtctttggccttccagggcattttagtgtagtaaaggttctgagaatgcagtcaagaaacctatttgacttgttcactcaagtgttttccttatttatttggccatggtactttgtggggactggggaggagggaaggaggaaagggccatgatgcctgttgaatcccatgactctgggaactatccattgggaaacaccgccctggtgatgtaacattagaaagacactgctgtgccagctgcaagaaagcggcctgtccatgactggggctgtggtgcattttgaggcttccaggcactgtcatggtcaagctgcatcccaaagtgaaaggactcaagagagaactttctgggaattctctttcttttcttttatttttttgaaatgcgggtcttgctatgttgcccaggctggcctcgaactcctggcctcaagctaccctcctgcctcagccttctaagtagctgggactacaggcatgacatcccactcagctctgggaattctttctttttctttctttttttctttttcctggagacagggtcttgctctgtcacctaggctggagggctggagtccagtgatgtggccacaggcatacaccatcacacctggctaacttttgtgttttttgtagagacagggtctccccatattggccaggcagctctcaaactcctgggctcaagcaatcttcctgccttggcttcccaaagtgctggaattacaggtgtaagccaccacacccagccagaattcgtaattcggctgcacttagagggtgtttactcggtactggctgagtgctaagtgctttgtatgcatgatctcatttaatcttttcaaccactttttgcattaggaactagtgtctcattttacagataaagaaatacgcacagagttgtgtgactttctcacaagtgggaaatcaggatttgaacctagtcctgtctgactctagaacaatgcccttaaccactctaccctgattcccactgtgtggctgggaaatctataggcaaaaacaaaacagaggcctcaccaggcatatggtttgaaatcaaacagtttatctgaaagtccttaactgataggatgccttttgatggcaaaagggaaaatgaagagatgagggaatgggaggaagtgtaatactgttagggaagacagactttgcatgagggtaagatgtggtcatgtcaaagagggaaaggcagagcatagttcagggtgttctgagccatcatctgccttgttgatgacagacagaccctgctcagctctacatttccttgctgcacgaggccccggtgccctcagaggtggtccctgagagtgcaagagaggtggaggtggtgacaggtggtaagaccctgctgagcaggaccatctttttttttttgaggcagagtttcactcttgttgcccaggttggagtgcaatggcacaatctcagttcactgcaacctccgcctcctgggttcaaacaattctcctgcctcagcctcctgggattacaggcaccctccaccacgcccggctaatttttgtagttttagtagagatggggtttcaccacattggccaggctggtcccgaactcctgacttcaggtgatccacccgcctcggcctcccaaagtgctgggattacaggcgtgagccaccatgcccggccgggagcaggaccttcttgtgctccaatcattggtgtgacttggacaagtctacatactctcaaatatctggtatgttttctatctgctgtgcaaacaaggttgttgcatcctatttttgcattagggtgttccagaaaggaagagtctcgtgtgtatgtgtgtgtgtgtgcgtgcgtgcacgtgcgtgtgtcttcagcaaccagtactcaccagggacctagccataggagtgcccacaagcagtgtgtctgcatatgtgtgtgtagatacataccacacataaatgtattcctgtatcacaaagtacttttaaattctttatatatattatttatataatattatataatacaattaattatctgtctctcccaccagaataaaagtttcctgaggtcaaggacttccttttccctgccaaaatggtgtccagaactttgaggtatctaacaaatattgtgaatgaatgaatggccagaccatgggctgtgatctcttagctaatgtcctagaatttacaccttcagcagagccccttgggaaatggcagtcggcgttgcagccaccttcacctcttcctccaccgtctcctcttcctttattgtttctgcctccttttctccctccccttcccagtgcttagaatcatctctggcaacagctccagcccagccttttgaaaatacacttaatgatggttttgactttttttctaaaagcaacaaaatcatttggaaccaagaagattagctgtttttttggccactgaggtccttaactcagagatgataaatagggcacggtaatcagatgagtattttgttgtgggcagtaaactacctctaatggtcattccccttatagaggagggctcagtatgaaagaacagggacagagagacccaggaagcccctcagaaggggacagacccagctggatgttgacattctggttgcatcgttttctaaagcaatttcctgagtttttgccctcctgtgtgtatttacatagacacgaactttaagcctgacacctcagaagctgtttgggaaggacgggctcgcagattttgtttttgtctttgtttgtttgattgttttttagatagggcctctctctgtcactgaggctggagtgcagtggcgtgatcagagctcactgcagacttgaaactcctcggctcaggcaatcctcccacctcagcctcccaagtagctgggactacaggcacacaccactgcaccactaccactacacccggctaattttttttttgtagagacaggttcttgctgtgttggccaggctggtctcaaactcctgccctctagcaatacgcctgcttcggcctcccaaactgctggggttacaggtgtgagccactgtgcccatctggttcccagaactgaagaaggcccggaacctagagggtggatgaactgataatgggagtgtttccttgtaagttgccttgggaagtagtgtgggtggtttatcttgggcatttaagtccatgagcgtgatcagaagaggtagaatgcttccagggtgcttgttggtgagacctcaggaaaatggacaaaggaaaagacagaaggaaaatggacaaagctcgggatttgcacatggcctgctgtagccaaactacccttaggatttagcccttctccctgccaagcctctctgaggtcgcgccactgcactccagcctggcaacagagcgagactctgtctcaaaaaaaaaaaaaaggtgtggtggcatgcacctgtagtcttagctactagggaggctgaggcaagagtcacttgagccaaggaatatgaggctcaggagtttcaggttacagtgagctatgattgtgccacttcactccagcctgggtgacagagtgagaccctgtctcagaaaaagggaaagaaaatctaacctataaattattttccaacataatgaaatgtttacgaatataccgttaatgaagcaagttgacattaggttgtgctttgtggacatttaattacacatttaaacattttgatcttgcatttttccttttcatatttggggattaaaaatgtatttgcatatttcaagcatgttgaaggtctttggaaaaactcaaaggccagaggctctgtgcctacagggctgagtggacaaaccgcccctgctgcggccctgagaaattacagaataaggaagaggcaagggaggaagctggagaaaaatgaagcattgactggagatgtgtctgagggtggtaggtggggttggggctgggagttagggcttggttctcaatggttctctgatatctagttcatttaatccccattgcctggggagctcttcccctaactctccagatacccattagctcccttcctctcttcattaaggattctactcaaatgtcacattggttaaaacagtgccccggccgggtgcagcggctcacacctgtaatcccagcactttgggagactgaggcaggtggatcatgaggtcaggagttagagaccagcctagacaacatagtgaaaccccatctctactaaaaatacaaaaaactagccaggtatgatggcaggcacctgtaatcccagctacttgggaggctgaagcaggagaattgcttgaacccagaggcggaggttgcagtgagccaagatcatgccattgcactccagcctgggcaacaagagcaagacttcgtcaaaaaacaaacaaacaaacaaaaaaccagtgccccatccttgcccatccttgtctaatacaagatgtagtgctaagaagccattaatgccatgtggacaaataaacagactaattgggtagggagagtcctctgttgtcgattagtctgtttacttgtgcgtgctctgtcttgatccgcctcctgcgggcagggaatgtgttgtattcaccagtgtctggcacctaaagcctccacaataaatgcgtggttgttggcacaacaaatgaacaaatgaataaatgaatcttggccctccctgcctccagtggctgttgggagaatcaggtgagagaaaatgcagtcttcaaaggataagctgatgtgccatcggccccaggagccacagcacattttctctttctaggagtccttaaaatgcaggcagaagctcatcctcagaaattctgagtcagtcggttgggggcagagaccagcgatctgaatttaacaaactctgggtgatactgatgctgctggtcatcagcctatgctgggaggagcctttgctgacaactagctgtcactttttagtcattttgctgagcgggacacaaatgtagagccacaatgcaatgtgaccgtagagcccatggttccagagtcgggggttgcccctctccatgtttgagggccgaagagcctgcatcgagcagagccaccaggctaaatcctctgaccttgactttggtttagggaccagagtctggtatctaagtgcgatcttactctagctttcccatctgttctgtttaggccagaggtgatccagtgatttgggagctgcaggtcacacaggctgctcagagggtaagttgggtccagtcgggccagcagggccacatggccgattcacactcagtccaaaaccctcgtggctgagcattgatgcagaccatgctgtcttgtgggagtggtctgggtgcctctaggagggcagaaataccacattactgccgggtgaccttggaaaggggcacagaggtgctggcactgggatgctgagcagccgaagccagcgagacccacgtggagagagacagctagcttgcttgcttcctgaaagccagacagagcctctcagcctaatttgcttgtgccaggcagcctgtgaattcttatagccaaaccacctggtgggtgactgttgacatgggactgcagggtcctggcagcccagccctagcacagacaccaggcagcacacagacctcaggtcacataggcactggccagtctttgaggacacagtgtctggctgcagttatttctacctgcagtacagtctcgggcccctgagtcaacaggcaggtttgagaggacttcaggtcttggccccaaaaaagtgcacacgaccaggttcacggtcacctcaggctatgtggccccactcattgattcatacttatgttcattctacagaaattattcagcaccttctacgaagacacaaagaaggaaaggagttcccatctgtccttaaagaacttaactgttaaatgatgtcccaggctgggctcagtggctcacgcctgtaatcccaacatcttgagaggccgaggcaaaagggtcacttgaacccaggagtttgagaccagcctaagcaacacggcaagactctgtctctacaaaaaatttttaaaaattaaccaggtgcaggtgcatgggggtgcatgcctgtggtcccagctcctccggaggctaaggtgatggggcgattgcttgagcctgggaggtcaaggctgcagtgaaccaagatcacaccactgcactccagcctgggtgacagagtgagaccctgtctcaaaaaaaaaaaaaagataagcactacatagagcagtgggcagcccccaaatgcatagagctggcatgcagcaggcactcagtatatcttggttgaatgagcaaggtgctggaggagctaggaggagagagtgagaaactggccggggaaagctcctgcatgaaggaaaaggaaaaggcattctacatgaaaggtgtgaatgttacaaaatatatgaggagtaatgtggccacgtggagaagtaagagctcacttccattgagcgcttcatttcaaccaggcattgctctgaacatattacacatatcatctctttaacctttgagatagggcctattgttgtcactcccattttacaattgcacagcctgaggcccagagaggctgagcttaaggccatgcaggtagtgagtggcagagtcaggtgttaatccactcaccaatgggcacttaacccaacctgagcctccacttctccatctgtaaaatgggaacacccgggcttcccctgacagtttcttggacagattaagaaagctgtgcatgagtgcacatggaatgtctgtgaaaaggttacaagattcacagaaaacttgctaacaatggttacctttggggaggctgcctagaggaccaaggattagagaaagtatgtatcagtttttggatctctttttgggcctctagcgggtgaaagttaaaatgacaagcagcctaaatgggaaggagttggagggtgggttaagtttgaaaggagaaagagcagttgaggctggagaaaggatgttatttgactgtagcgaacactctgcctgcaccccccagtccctctctctttgaggggaaggatgccgtggcgacggtcttcctccttaatatagtatgtacattttatctctgcagacttcttgcagacttggtttaaagatctcagctcaataccattagtgtatatctgcagagggccctttgtaaaattgattagaaagtgggcttttgcatgtggggtgggggcgggggtgggacctaatcggatttgagcatgagatggtatctaattccctgcatctagcaactggcttggggacctccctgggagccagggcccccctaatttggtttgcgaatacattagccaaacaagctaagggggctccttcggggagagggtttttgggggatggggatgggagatggtgggaaggctgaggaaatgaagaagggaagggttttctgtgcaggtcctggagtataaaccgtacatgcgattgccaaggctgtgcatgtctcatggttttaccccattcgggagaatgaagcaaacttttaagaggaccaggctgggcctggtggctcagtcctgtaatgccagcactttgagaggctgagggggggtggatcacctgaggtcaggagtttgagaccaccctggccaacatggtgaaactccgtctctactaaaaatacaaaaactagccaggcatggtggcacacgcctgtattcccagctactcaggaggctgaggcaggagaatcacttgaatccaagaggtggaggttgcagtgagctgagttcatgccactgcaatccagcctgggcgacagagcaagacaggtctcaaaacaaacaaacaaaaaaagacttggtgtattgcttaccatttattgagccgttatatatacattttgtttcattttttcagtcttttaaaaaaaagtaatacattcacatgtgtaacaaaaatgtcaaacactatgagagtgcaggcagtgactggtagggtatttttcctcccctaatccttggtcccctagacagaatccctaaaagtagccacagttaccaagttttctgtgaaccttacaatattttcaaaaattgtccatgtgcactcatacacagctttcttaatccctccaagaaacctgcagaggaaacctggtgttcccattttacagatggagaatggaggcacaggttggttaagtgcccactggtgagtggcagagccaggatccaaattgtgaatgatctggtggtctggctttatatcccggggtctttctgtgaaatcatatgctctcttatatgcctttcccagaaagagagggggctgttcagagctataaacacagcaaatatttgagttttcacttctccaactcttttcttcttattttttttatttttttattttttgagacagagtctctctgtcacccagactggagggcagtggtgtaatctcagctcactgcaacctcccccttctgggttcaagtgattcttgtgcctcagcctcccgagtagctgagattacaggcaagtgccaccaagcccggctaatttttgtatttttcgcagagacggggttttgccttgttgaccagtctggtctcaaactcctgatctcaagtgatctgcctgcttcagcctcccaaagtgctgggattacaggcaagagccaccgcgcctggcccattcatttcttcttgggtccatccatatgctatcgttttgtccacttatacccaagcatcctaaaaacaggatgcaaggctgggcatggtggctcatgcctgtaatcaatcccagcactatgggaggccaaggcaggcagatcacctgaggtcaggagttcaagaccagcctgatcaacatggtgaaaccccatctctactaaaaatacaaaaattagccgggcgtggtggcaggcacctgtaatcccagctactcgggaggccaaggcaggagaatcacttgaatctgggagaaagaggatgcagtgagctgagattgcgccaccgaactccagcctggacaacaaagcaagactccatcttccaaaaaaaaaacaggaggtgaacttgcaagggcatctttactagggtctccttcagtttagtacccctttatgagagtgaggggtggagtgtgttgagtgaatccttgcctgctttatctggatcttgagttctgcccacttcctactagacactgtgtgtgttgcaggaaggaggatgctggtggcagcacgtgctgcaaattgtgtggcagcatccagcttcataacagataatcacagtatcaacctcggagggttctttggagggtggaataataccatggcatggtacctggtacatggtaatctctcaataaatattagtggttagtagtatcactagctagagaagctttcgtacattgctcatctgttctgtgcaatttgcctcaactataagaatagtattctgttatcatcacactattatttaatatttaatatttttaaacaatctgtgtaataagctggtatcattttaaatacaattagcgtagtgtcaggtatacaaaagatgctcaataaatatgatttcccactttattcccgtctctttaccagttttaaatcaagatcttgattcttctttatccttgttgtgaatctaatttctgtaaagtgagtccatttgtattcccactcacatttattgagaacctgctgtttacttggcattctgctctgcgctgcggggcacacaaagaagaacagacctcggactccgccctcacaggatgaaaaatcaaatcaggaagactgagaacagaggcatcaattgcagcccaagctgttcgcagggtttggggcatgctcctggggtacaggaatagatggagtggcttcatgttcttcagtacctcagtttccccttctgaggagtggaggtagttccctttcttgtttattggtatttggaagatgtggaacaacctggctgatgtggtttcagtcttgtgggaaccagtgggctgagcccctttctttacccctctacctctccctcaccaccaagtaccctatacctctctcccaccctaccctggctggaagctgctcctccgctgggctgtcgacctgggagcctccatcctcctcctccttgcaaaccacaccttttcaccagatcgtcatgccaaccccatcctcccccaacaaagaaggttttgtagggaccagaatacctcagctttggatgctgtactataaaatccagaattatataactgctggattatggagtgattattagctttgctgaaagattttccatttacataaggattagctgcggggttcctttaaatagctggctttgctaatgcatttgtattgcaaagaaaggtgggtgggggaaataaggacaggattgtgaagcagaaggcccgagctgcagtggctcaggcctctaatccaaatgactcaggaggccggggcaggaggatcgcttgaacccaggagttcaacaccagtctgggcaacatagggagaccctatctctacaataaattaaattaaattaactagggatggtggcttgtgcctttagaaaaataaagaaaagaaggctcgagttctaagccagctgagtaactggtcattttacctcttgaagccttgggtttctttgatgaggaaagtgagcggtgaccaccctacccagacccagcattgcaggagaggactgtgcaggcagtttccaaagagctgggcgcaggcggtcaggtgaggcaaacctgcaccgcagtgctgttggtgtgatgagcctgcccctcaaagggtgatgtcgaaacccctggtgttgaatcttctagctggcctctgcccacctgtccatgctggtctcctgacagacccccacctggcttcttcctgtgccccggcgccggccacacacctgtgtcccggacttcccatgccaactccagttccttggctgtatactgctgttccctatctctgtgacttgcacatactggtcccagtgcccagaacaccattccccaccctcttcccttcttggcctggcaaacacctacttgtccttcaagacatagcctaaacttctcctccaggaagccttccctgactcccttacactaaggagggttagacactcctctgcactcgcaggtcccatgaatatgtgtgtgtgaccctatcgtattgctttgagatccttcattgtccagtgactttatggtcattgatcacttatttgtatctgccatgagctactgagcttaggggcagggtccctgttgtgtttgacttagtagatgtgtagtaaatgaaataagtaagcgaatagtaacaacttctcatgtgcagcaggtgtttcatccccagccacatgcagcagaggcggcccccgcaccgtcccccaccccgtaccatcctcacccctgcaccatccccacccctgcaccgtcccccgcccctgcaccgtcccctgcccctgcaccgtctcccgcccctgcaccatcccccgcccctgcaccatcctccgcccctgcaccgtccccgcccctgcaccgtctcccgcccctgcaccgtctcccgcccctgcaccgtccccccgcccctgcagcgtccccccgcccctgcatactgcatgccctgaagcacaaaaaccctggtgttagaccacaggggttcaaataaatcctagctccaccccagctgtgaccttaaccaaattattttgctcccgagtttcttcatctataaaacaagatcataatagttctgaccccttagggttgctgtgaacaggaagtgagttaatctgtgttctgtacttagagcagtgcctgggcgcagtaccttctgcgtctgatggcggttttcatttcggagggccctgagttgtgcccctgtggttcctccccagctcagtcccctgtgttgctgagcttgcagtctctgcctctgcctctttcttcgcttgctctagtgacctgtctcagatccccactcccccaaccagtcagcacagaaataatcaaattttacttgattattagtcattactttctgctgctgtttttgtttgttccttaaaaaaaaaaaaaaaaaaaaaaaaactattctagatttaattgagttgattgattagcacaatcgctgattggaaggagatactctgtaaccctctcctcctccggtgccttttcccagagaggcaccaggtggactgcccgtggcctggaggtgcagtggcttgtggtggctgtgtgggctgggagcctggtcctcccaggcctagtgacctgaggcaagtccccggccctctcagggcctcatctgtaagaaggggattgaagtaaatgagcctctgaatcccctcacctttaaattctatgaaaactctacacctgagtgcccctagccttggtttgtgagtcgcccatccattcaatatcacagctacctctgggccagcacttctcagggtgctgtgggggcccagatgtgagcaagtcaagagccctgccctctaggagctagtagggtggggttggggactggcaagacgctaactccagcatttttaacttagtgtgttccaagctcagtggagtttcagaggggagtgcctaattcgaacagttgtagaggggtgatatttggattcagtctaagacaaaacaccttgtacaaactttaggggtgtggagagtgaactttatagaagccacctctatgtgctgagtacagtggtaagcacttaaattgttttaaaactttttatatcaaatagagataggatcgccgggcacagtggctcaatcctgtaatcccagcactttgggaggccgagatgggcagatcacgaggtaaggagtttgagaccagcctggccaacgtggtaaaaccctgtctctactaaaaatacaaaaattagccgggcgtggtggtttgcacctgtaatcccagctactcaggaggctgagacagaagaatcgcttgaacctggaaggtagagtttacagtgagctgagatcgtgctactgcactccagactgggcgaaagagtgagactccatctcaaaaatcaataaaaaattggtaaataaatagagatgggggtctcactgtgttgcccaggctggtctcaaactcttgggctcaaatgttgctcctgtttcagcctcccaaagtgccaggattacaagcatgagccacggcgcctgacaagcactttcttttcattttctttttaatccccacatcaaccctctaagtaaaaggatatgatatcacttttatagacaaaacacccaaagctcagagaggataagtggcttgcctacagtcaacagcaagcgagggagaagtagactttgaatgatgtcaaaccttatcctctttacacagtttcataccatattacagtattaaataatttgaaggtaaaataatcagctaatttcccaaatgtcacttctatgtccattttggaacatgatcttccatacataccctttttacattacataattagagtgatgtaccattttccctttttttttttttttgagacatggtcttggctctgtcacacaggctagagtgcagtggtgtgatcatagctcactgcaacctcctggctcctgggatcaagggatcctcctgcctcagccctccaagtagctgggctataggcgcccaccaccacacccagctaattttgtatttttgtagagatgggtttttgccatgttggccaagctggtctcaaactccagttcagactgcctttgtctcccaaagtgctgggattacaggcatgaacctgcgccccgcctctatttttttacttatagcattcctccccccgtctctgcttttttttttctctctctctctttttttgagatggagtttcactcttgtcgcccgggctagagtgcaatggcgtgatcgtggttcactgcaacctccaccttctgggttcaagcaattctcctgccccagcctcctgagtagctaggattacagataccctccaccacacctggctaattttgtatttttagtagagatggtgtttcaccatgttggccaggttggtctcgaactcctgacctcaggtgatccacccgcctcggcctcccaaagtgctgggatttcaggtgtgagccactattcctggcccatctctgggttttgttcattgactcatatatttaccgagcacctactatgtgtcttgattctgagataaaacaattagtccaagaccctgccttcagggaacttaaacttaggtggacagatgataaacggagaagcaataaaacaaataatagaatgtcagatattaagaatggctgtgaagaaagtaaagcaggataagatgtagagtatatgaaattagccgggcatggtggcgggcacctgtaatcccagctgctcaggaggctgagacaggagaatcgcttgaacccaggaggtggaggctgtagtgagctgagatcatgccacaacaatccaagctggccaatagagtgagactccacctcaaaaacaaagaaagaaagaaagaaagaaaaagatgtagagtattgataggggtcagggtgtcttccctgaaacatgacatctcagcagagacctgactaatgatgaggtgagctgtgtgggtatctgggtactccaggtagggggagcagtcagtgcaaaggccctgggatggtgatgcccttggcacacttggggaagagcaggagaccagtgtgggtggaatgtgggaaggtgggatgtgaagttggaaaggtggccagggtcaggtcacaggctttgcaggctatggaagagactggcttttgttcctagtgtgtttctctggtgtcttctagttcccattattccataattcaacccagtggatgtggtgttattaatcaacatcgatgttgtttcctgcagcgtctatgtgtgcctgtgtgcgcgcatatgtgtgtgcttgcagcgaacacacatttcaagcgtatttcaagcatgtgacttttgactatgttggggtaattctgtagcagcgaaataactggttggaagtgtttgctcatctttttggctcttgacaggtaaaactatagtgtgacttctggtgacaagagctgaaggcatggcaggcagtggatctgcggtgcaaaggtgcagaggcagaaagaacaagccttcccagaggcccgaggcatcacacagatagtccctggccataagggaggagccactggagaagcaggtgcctcgtgaggacaggtgggcggtgggccaagtgagcgcctcctctctcctccaagaggcagagccaggtggggcttttacatacttttattttttggtgggggatggagtctggctctgtcacccaggctggagtgcagagacacaatcttggctcactgcaacctctgcctcccaggttcaagtgattctcctgcctcagcctcctgagtagctgggattacagacgcccgccaccatgcctggctaatttttgtatttttagtaagacagggtttcaccatgtttgtcaggctggtcttgaacccctgacctcaggtgatccacccacctcagcctcccaaagtgctgagattacaggcgtgagccactgcgcctgacctttttccacttttgaaaaaactttttaatgaaattgttttttggctttacagaaaaattgtcaagatagtgcagaggactcctgtataacccttatctggttttcacttttgttagcttcctatgttaccatgatagatttgtcacaactaagaaacttaccttggtacgttactatgaactaacctccatactttattgagatttcatttatttttccattgatgtcctttttctcttccaggatcccatgcagaatcccacactgcatttaattgtcatgtctgtttagtctccccttgtctgtgacagtttctcagactttccataattttcataaccttgacagtttttgtttgattgtttgtttgcttgttttgagatggagtcttgctctgttgcccaggctggagtgcagtggagcgatctcggctcactataacctcccacctcctgggttcaagtgattctcgtgcctcagcctccctagtagctaggattacgggtgcctgccaccatgcctggctaatttttctatttttagtagaaacagtgttttgccatgttggccaggctggtctcaaactcctggcctcaagtgatccgcccaccttggcctccaaactaactgctgggattacaggtgtgagccaccgcatccagcctaaccttgagagtttttagaagtgctggccaggtactttgcttttccatttttcaactatctatttttatttggaatcgtgatgttgagagtctgtaaacttttttttttttttgagacgaggtttcactctgtcaccctgcctggagtgtgatggcacgatctcggctcactacaaccttcgcctctcaggttcaaacgattctcctgtgtcagcctcctgagtagctgggactatgggcatgtgccactatgcctggctaatttttacatttttagtagagatggggtttcaccatgttggccaggctgatctcgaactcctgacctcaggtgatcttcctgcctcggtctcccaaactgctgggattacaggagtgagccaccgcacacggctgagagtctgcaaaatgttgagatcgagcttagaactcaggaatcaagggtgggggacacggtgctgggttcagtcctggccttgccccctacccactaagtgacattgaacaaggaaatcttccatgcttcattcttatcctgggggtgagaatattcacccccaagcctcatgagggttagctgggataagacatggaaattctcatgaacttggggttccttctcagtttcattgctgggtaagcccctggtgagactgattacctgaagacattcacttcctctcacaggagctggggctgtgaaatgccagagtgaggatggcggggaggttgtgacaacttggcaggaagcactttgaaggtcgtattctatattgatcctcacaataactccatgagttatggtagtaaaatgggttactgtaggctcatagaaggtcaagaacctgctgaaggtcatggaggaaagaagggcaaagttaagacttgcacatgggccatgagaccctgtgctctttccagtttaggctggcctgagctgcccggcagagggggcaggcagctctggggtggatgtgggcaggaaagcccagagccctggatcctgggatggagagggtctgtctcatgggtcaggaggactggggttcggctaggggtctgactcacggggcaagaggctagagttatggattctcagtctttacacaccatattggtctcaggccattgcattacagcaagtgtttcattttgtaatgtagattttttttctctaggtaatttcatttttaacccttgagttacctgtgaaaccagcatgagcaaatgagcaaaaggctcatgactagcgggcagcttcccaggtaaatctcaggaccaatggtccagcttcctgccagagagccaactgtcttacctcctgtttcatgtatcttcaggcccccccagcagatggtgagggctctctgttttccaggaagggacaaagaatgactgaagccagacagggcaagtggctgtctctaggacacacagcttcagagcagacaccatatcagtcactgggctctttctaccaaacgtaataagaactcagaagacactcgtgctatttattatattttaaaacttgaaatgtaaactacaaagttgcagttccgacattaatgggagagttgggaggccacagttctaagtgcatgagctaataggtcttctcctacagggtgtgagtgtgtgtgtgtgtgtgtgtgtgtgtgtatgagagagagagagacagagagcaacacatttaggtcagtgcactgtgaggacaaaggacaaagcaattttggcacttgggccaaatggccaaaaattactttcaattcaaccaaaacacacagaggttggagggatggacggtccttttcaaaaaggggtcccctggaaccggtggccaccatgccctttgtatcaggggttcccatttcatccacctcaaagtttctaaattcagagcttgcagaccaccctcacacaccccacctgtgcacatggatgacatggccctgctgattcctctggctctaaatgatacctcttctgcctgtcccctgcagtgaggtgtgcccaggtattcagacccctgcagtgtctcactgagcaccctaagcactcacccgtcatcctctggttccttggggcccggtgctggccttggaacactggtcccagtactcaggcagtccaggaaatagtctgtttggcctgccagctgtcagcagccttgcccctcctcctagcctggatccagccggaggaggacagagcccgtttctcttctgcccacctttaaaggctaggctggccaggatagggaagaagtagccctgtctggagtcacccctccagagatgtgtaaccccagagtggttaaaatcccatacattagcatcaggatggcttagagggcaaatctttgcctttccatgtgcatggaaggtgtggggcccacctgacaatgtctggtgcctcgattgattttcccatgtataaattaggatgaaaaatccagagttattttgagaagtaaataagcttatatatgtaaagcgctttgcacatagcaagtgcttaaaaagaaaggaaatgtagtattgttattcggttatataatatagcagcatttgtgtctctttttcttccaaagagcttgcacatctgtttactccatgtacccttacaacaaccaagtggagtagggcagtttttcttggatccagtttactgatgcagcagctaagatgcagtgaagcgtaatgacatgcccaaggccactccacaaagcagcaggggcactgaggtccctggagggcacaggctaggttaggtgtgtcccagtctggctcacctgcagccagaattcctgcctgccacagctgcccctccagtccccctgtcactcctccctcccctccctgagaactgctgtcttccacaaggacccctcactacccagggagggagggtgtggttgggcactggtagggggtggctctacctcttcagccagtggcagggctctgccattgccagcagcatcttgcaggatgaaggttgcatcagtgagcagtaattgaaatgcaaaataacattttgatcgagccagcaggctgtttatttatcagatcaatagtcaaaatgccccgtctggagaagctagtgtgataagtgacagtcttgccaagggcagtcctggtggctacagtcccctccctcaaaggcctggattagaaggccaaggagcctgggagtgacacctacctctgcttctcccttacagaatgtgggcatgcacacgcacagcccttgccacatttccttcttttttttttttttttttttttttttttttgagatggagtctcactctgttgccaggctggagtacagtggcgcaatctcagctcactgcaacctccgcctaccgggttcaagcgattctcctgcctcagcctcccaagtagctgggactacaggcacgtgccaccacacccagctaatttttttttgtattttagtagagacaaggtttcaccatgttggccaggatggtctcgatctcctgacctcatgatctgcctgcctcggcctcccaaagtgctgggattacaggcatgagccaccacacccggccgacatttccttcttatactcagtttacagaggagacgactgagaactatgtgggcagggaccacccttgctgtggctgccaggacctgtacccaagattgctgagataacagcacatattttcgagcacttacaatatacaggtgcccaatgcttcacattattgggtcatttactcctcagaataattctgtgaggtacatatgtctatattacccattttgcagatgaggaaaccaagtcctagagaggtcaggcaacagttgcacagcgagtcagtgacaggccgggattctgacccaggcgagctgggcccagagccctcatgcccaggccctgtcagttccctctctcaagggcagggggccgtgaaacatttttgtttacacagtggggttgtggctctgaagtcaagcaacccctttccagccccacttcccacagtttctttacgaattacattgattttgtgttaaaatttagtttttagcattttgaaagcagatgtctcaatgagtggctctcagactagcctctctaagttgccagcccaacacattaagtggcttggggtacttacacaaaagcaaccaaaaccagaaaataagaaaaatgcatatatctttcataacctttttttttttttttttgagagagtctcactctgtcacccaggctggagtatagtggcgcaatctcggctcactgcatcctctgcctcccgcgctcaagcaattctcacgcctcagcctcctgagtagctgggattacagatgtgtgccaccacacctggctaatttttgtatttttagtagagacagggtttcaccatgttggccaggctggtctcgaacttctgacctcaagtgatctgctcactttggcttcccaaattgctgggattacaggcgtgagccaccgcgccatcctttcatagactctttaaaccaggatgatcagaattcgatcgaaactgatggcaaggtggatcctttaagaactttcgtgggctccactggaccccaggggctctgtgggttctgctcctggggcgctggtggactccttttctcggaccttgatcctgtcctgtgactcagaccggtgactgtcacatcctgagggagtgcaggcctctggaaactgtaatggttgtttgactgaggtcctcagatcccacctaaccctccttactcattcaacaaatatttattctgcacctactgtgtgtctattctagacactggagtaggacaggaaagaaaacagacagcctctgccatcatatacggggagcaaagaccctgaggtgggagcgtgattggtgtagtcaagaaccagccaggaggccagtgtggctgggatggagtgacctggggggagagtgggcaggagatagcatgacagaggttggggggcagatcctgaggccttctgagctgtggaaaggactcctgcttcactggagcccctggctgtcttcagcagaggaatgttgtgacttacaccccttcatgatgtaactcatgacagcactttctggctgtgtggtccctgccgagatatttagcgcctctgggcctcagtttgctcctctgcaaaatgggggaaatgatagtacttcaactagttgttgcaaggaatcagtgatttactaaccattgtcccgagcatagagcaagccctccatatgtgagcactgttgttgttacagagatcagaacagggttctcagctggctacagtggccagtctccatctgtccacctgagttaagatgcctctttgtcatctgcccaggctgcccatttgcacaaagactgaaaaattgagtcaggatgagccctaagcttcctatgtgggttctgctcctggggcgctggctgatcccctttcttggaccctgatcctgtcctggtgtgcacaaggctatgtagaaagggccatggccatgaccagggagtggatagaagtgtcgtccccttcgttgtgtgggcctgcacactgtcctttgggaatgcacagggggcagcagtgaggctcagtcacatgtgtgatcagagtggaggtcagcaacataagccaagcaccttaaacgccgattccatcctgggttgtataagcagaagtatagtgtctaggatgagggaggtgtcagtactgctctgcactgcactgggcagagctcacctggagagctgtgctcagttctaatgctcttttttgtttgtttgtttgtttgtttgagatagagcgtcactctgttgcccagactggagtgcagtggcacaatcttggctcactgcaacctccacctcccaggttcaagtgattctcctgcctctgcctctgaagtagctgggattacaggcatgcaccaccacgcccggctaatttttatatttttagtagagatggggtttcaccatcttggccaggctggtctcaaactcctgacctcaagcgatctgcccgcctcagcctccctgaggctcacacctgtaaatcccattataggtgtgagccactgcgcctggcctgatgctcttctttaagaagagaagacagagcagatgggttattctcagaagtgcaggggatgttgaccctggtgaggagaggggaggatccacagggagcaggagctgccttccgcagtctggagggctatctcatggaagggcttagacttgttctgtaggtcatgaggggtggggttgtataaactgtaactggaagctcagagggaagaaatacttttacttttcgcaaaaaaaccttttatttttatttttatttttagcattctgagcaagatgtaaatatttgcctcctgaactagtgatctccctatcactggggtctttataaggcaggtagccacatggctgggattcagggaaagggactcaagcatcggatgggggtgggttggatgccctttgaggtcctggcctgcctgagcgcccctggctgtgcgggggttctgcctgcccctccctcctcacctccttcctccccctcctcctcccttccagcaacagatttccctgctgtccctccaacatagagctttccctgtgcggcccctccctcttttcttcaggtatctgcttaaatgtcacttcctcagagaagccctctctggcagctctatctggacactcccctgacccaccacgctgtgtcctccctgctggttttttgtttgttttttgagacagggtctcactctgttgcccaggctggagtgcagtggtgtgatctctgcaacctccgcctcagctcactgcaacctctaccacctgggttcaagtgattctcctacctcagcctcctgagtagctgggattacaggtgcccaccaccacgcccagctaattttgggagcctcagcctcccaaagtgctgggattacaggtgtgagccaccacacccagccctccctgctgtttctcatagcactcaccactaactgcattgatactatttggctgtttacttatcatgttaggggggatgacacttgtcattatttcatacaatcccagtgtttcagttgcttaacacggcagaagcaggtcttgcccagaggacattttggtgagggcgtttggcagttggcctttcacaaggtgttcaggggcccaggctcctgctaatttgtggctctgctatcccccagggtcttggagccccctggcctgaagatgggggaagagagaggaataggagacaggaggggagggagtggagtggggaaggagggcaggagtctgtgggagatttttatgggccagataagggagtggcttatattactttgcccacatcccattggccaagacccagtcatatggccatagccaactgccagggtgactgggaaatgtagtcctcctggtgtctagcaagaaaattaattaacttttggtgaactcatagcagtctcagctacacttatttatcacatgtcattgaatttatgacatcatctattgcaagggacaccatgatttctggaaccactaattaaattaaattaagacatgccattgatttcaggtgaattctgattgccaagatggtaaaatgtggaaaaatggtacagctctgagtcaatgaaccatggtattgtctctccttgaggacagggacccattcaccttgctcaccaacgtattcccagagctgcaagagtgtcaagcatgcagtagatattcaaagaacaatagttgaggccaggcacactggatcacacctgtaatcccagcaatttgggaggctgaagtgggaggattttctaagcccaggagttcaagaccagtctgggcaacatggggagaccatgtctctacaaacaaacaaacaaacaaacaaaaaattgtttaaagacaatagtagttgaatgagtgacagtgtgtgagctactcttttgtttaagtgtgagaagcccccttgagtaaactacagtgtcagggaatcaggccatgctcgttcacctgagcagagatgctgcaggggcatgggaggaattgccaacagtaactggggcttctaggactctctgcctcaaccgttccttctctctgctgccagcttcgatattcttctctctcactgcacatgggagggaagaatgaccttgctcagctcttgagctgtccatcttactgcctctgtccctggagaggcagccctgacaccaaaaatctaatgggagagactcactggcccagcttggatcaggagcataccctgggtcaataagctgagccaggaaggcagatataggatgtctctaagaatatggcaatttctgcaggagctgtgtgtgtgtgtgtgtgtgtgtgtgtgtgtgtgtgtgtgtgtgtacgtgtacatgcatgtgcacagaaagacaggcaatgtatgttggggtcagacgtccttcacaggagagaagctagtgcttggcagtcagttctagcagtgcctgaatatgggacccctttgcctgaaaagggactgtgtcagtgaaagtaacaggcatgcaaatacataatgaaatgggtgggtgggaagatgcatggatggatgaatgacagaaggagagagggagcaagacagtcttacttgctttaggattaaacattttaaagaatctaaatggaagctgtctcctcattaccaaatagggatgctaaaaacaactcttaatatttattaagtacttcctgtatgccaggcattgttctaagctcttttctgcattaactcactaattcccaagaccatcttgtgagatgaatactacgatgaatactataattcacatccccattttacagatgacaaaactgaagcatctagaggttaaataaccccattcataaggggcagagctaggattcaaacccaaacagtccagctctaaccacaaagctctctggcccagcgccatggctactatgaggattaaagccatctggaggctactgagtgtgttcaatgacagtaattgggttatatatatgtttgagatggagttttgatcctgttgcccaggctggagtgcaatggcgcaatcttggctcaccacaacctctgcctcctgggttcaagtgattctcctgcctcagcctccggagtagccaggattacaggcatgcaccaccatgcctggctaattttgtatttttcgtagagacggggtttctccatgttggtcaggctggtctcgaactcccgacctccggtgatccgcccaccttggcctcccaaagcgctgggattacaggtgtgagccactgcacccagccatgagataggatatttatgccacatcactgcttgatatagagtgaaaataaaaacagatttaagaaaagttaagctaaatttacagatgtcagaactccaatagctactgaaaagaaggatactagaggtgagtttgggggcatattctgaattttcgatgtccttccctcaaacacacccctttgtggtggtcagagcccagagctggccaaggctaggtggactaaagtgagagctaccaggtaccattgggccctgcataaggacacttgactgacaggacccaagggagggctgaagtttcaaaaagccagcagcggccactctccgtgagcctgagctcatgtgtgctgggcttggccagtgaactgggatctcccagctgtcccagggcagccactctgcctccaattgtctcttcctgccttggtagagcctttcttttctcactgtgatgcctgcagcctggaaaatcatggataaaaagccctgattgaaaggcactaattacccatcattattttccatgccgcaatttgtgcggaatgagatttcaatcagttgtcggggatcagcctggttttgactaatctttctaacgacaagatgcttaattacagatttttacctgagctccagagcgtgcagagggaggcaactctcgctgaagccaccatgctcttgggtcatcctgcagccctgggtcccagagggcccccaaggggagaaagagaaagaaatcattaggaaaatattcccaaggaggccaaataaaatggcaccaccacagagagggggctgtgttagcaacatggacatagagggtatcggggggctgctttctaagtcaactcatcctccagaacaggtcaccacttgctgtgtctctattgcccccatcagccccagcctcccccaaagcagcctggcattctagttagtaagtttgagcaagtcattagtttcttagggctgttctattatctgaaagtcaccagggtagtcagaaaaatctctgagaacttatgattcagtgactccagctgtgctgaagtgtgtgtccagaaaagtgttacctattgttgaaagctgaaagatacacatacccaagattcaatcacacaggagtgattaaaaaaaaacaccatctattaataaaataggcagttcaggccaggcgcagtggctcatgcctgtaatcccagcactttgggaggccaagacgggtagatcacctgaggttgggagttccagaccagcctgaccaacatggagaaaccccgtctctactaaaaatacaaaattaactgggtgtggtggctcatgcctgtaatcccagctactcaggaggctgaggcaagagaatcgcttgaacccgggaggtagtggttgtggtgagccgagatagtgccattgcactccagcctgggcaacaagagtaaaactctgtctcaaaaaaataataaaaataaaaataaaataaaataggcagttcagattactcagagggaaggtcaatttgaattgatgaaaaatctgagcttaagttttgtgtgtgtgtgtgtgtgtgtgtgtgtaattaatggatctcagtgcacagaattggattcttcattatcgctggttcgtaacacttaaccattggcctacttgccccttccttccttccttcctgcctgccttcctgccttcctccattccttcctttcttccttccctaccctccctcccatgtaataagtgcccatgaatccatattcaacaggaaaactggaaccttgacagtaattcgcatctagccacatggtcctccccatcctaccctcctgttaggggcattctgcaactttaatactattttaaaggaaatttagttacagtatagtagttctaggtgcctgaggggctgatttgtgactcataaagccttgctggagggtctgaggatctgctttaatggatagctcttgatggcccctggttagcaaattaattattgaaatgtacataagaatctctcaagtgttcagaaaccatttttcttctgtggagtggattcccatgtcagtcttgtttatcctcttaatttgcccagctggcttctttccctcctggtctatggcaagttccttgaagaatcatcctcaattctaggtctgggggccttggatgagggaaggggtttgctgggtttaaccacaggcctgcccactgctggactttctcagaagaatcacagcctcaggcaacatccactgagtgcctgcttgtcacctgcgctgttctaagcattgtgccttcattggctcttgctcaactctgtgaaggaggtgctgtgattgagcccattttacagatgaggaccctgaggtccagagaggatgacctgattactcaaagtcagcagcaattagggatagaactggcacgtctgctaccagcatgcaggcttgtagccattaagtggcccagctgcttgttccagttcttaaatgcatggccccagcagggatgaggctctgggggccgtccttcagcctgacccagattcttgggtgtggtgggtagattctaccccatagaggaaagcaagctggacgcttatcaggccagtccattcctctgcctgctgccctctgaccagcagcaggccacctagtgtgggaaagatccttgagattccagtgtaaaaaacaatgagaggccgggcatgatggctcatgcctgtaatcccacgctttggaaggctgaggagggcaaattacccaaggtcaggagttcaataccagcctatccaacatggtgaaacccgtctttactaaaaatacaaaaattagccaggcatgggggcacacgcctgtagttccagctactcaggaggctgaggcaggagaatcacttaaagctgagaggtggaggttgcagtgagccgagatggagctactgcactccagcctggatgacagaacaagactccatctcaaacaaaacaaaaacaaaacaaaacaccaatgatgatctcttgttgataccctgaaatctgtcttcctctggaagtctaaggcaaaatagttcagcaatttgagtttcattcagaacttttaagattcccctggtctctgcattaggaaaatcttcaacctgctttgtagtccagcagagcaatgtccagccaaggcaggaagagccccccagcaagctcggtgtcccctggggatcaggctgcgaagggaacagggtcccacgctggctactgagaaggcccggggcagagctgagttggggcacgagggaggccacgtttaatcagatgggggtgaaattgaggccagggcagcgcttgctaagctccagttaggagatgaatcaaagggaaaatgatgccccaaggggcttcgaccactgactactgccctttaaaaggctgcttggatgggcgtctgttccctccccatgaagagtcaatagttatcgatccagtggggaactgggtcccagccaaccacagatgatggacttgacactccccgctcctccccagaacacaagggtcagctgcctcctgcctcatcctgcagcagctactcctcctagacaccggcttggccaccaccccatggccacctctgaaatctgaagtgccagtctcaggcctagacgccgtctcccaaccttccagctttcttgcttcttcctcctgctggacctcagcctcagcctccccaagaccaccatcgccgcctctccattttctcccaatcccgtcctttctgacatcactcccttgtccaccctcttccctcatacttctaagtcagtggttctcagcagttttgctcccagggagacatttggcaatgtctgtaggttttggctcacatacttgggggcagggtgctacgggcattgagtgggtagaggccgggggtgctcctgagcatccagcagtgctgggacagccccatcacatggaatcactcagccccagatgttagtagtgccgaggatggagacctaggtctcagctgctggagatggggcccgcttgcattgttgcaccagcatcatgagttaagaggcctggagaacctttgtgtcccagatttctgctcccgctttgtcccacagttactattgcaaacttccctccttctcctagtcctcctgccctccggcccttgccttcactccctgtccctcctacttcacagagtcactgcaggctgagtggaggtggtgtgggtgggtttggggggtaaagagggcctcactcaatgcccccctctgccacctacaaacttctcatctgtacagccaaccttccctctcactcttactgaataagctatttctctctcttttttttttttttttctgagacggtgtctcgccctgtcacccaggctggagtgcagtggcacagtctcagctcactgcaacctccgcctcccgggttcaagtgattctcctgcttcagcctcccagtagctaggactacaggcgcatgccaccatacccagctaatttttgtatttgtagtagagatgggtttttgccatgttgaccaggctggtcttgaactcctggcctcaagtcatctgcccaccttagcctcccaaagtgctgagattacaggcatgagctaccacacccggctggattccttgcaaactcttacaagatcctctcatgatggcatcacttcttccagtaggaccccacccttaagaatcacacccttaagaatcaacacccttaagaatcacagctgcaccaccaaaaccaaaccaaacctccctgtagatttcttgggccctgcctgcagagacgcttcttcaaaatatgacgtcagtgggatcaggtctaggaagccacctgttcaccaagcccctcagctgcctccgatgaagattgaagtacagtttgcaaaaagctgacacgtattttgtgtcttcagcctttaaatgttgattttgccctctaccactaatatttaacatcgggtagccatacgattcatgatctacttcagggagagaagtgggggcggtgatggtaatgacactgggccagcagtaggaccgagattgctcagggccaactgggaggtatggatacctaatttttaaatgtcttaaattccttacattctcaacacgcccgcttctcatcaaagaagctgacaattagtactgaaaacagtaataaaacattccttccccacgtcacagcctccaagtccaggagggcatgctttgtttacaaggtagctggtgctgcctgaatgtgttcatgaaggcacccctgctccgcccagtcctctacccttcacggccaattttcctgaaagaattgtctgcattcactactttcagccattgcaatgaggcttctgcccccaccatgcagtaacccggctgtgatgaatgtccccagccacttcctgactgctaagtgcagggatacttgccccttctcactccacctgaccttataggatggaatctgctgcccaccgcccttctagatggctctgctcatccaatttccatgacatgctctattttttccttttcccacacctctggttacatcttctctgtcttcttggacttctttccctctgtcctgcctttacatttttttttttttttttttttgagacggggtctctgtcacccaggctggagtgcagtggcataatctcggctcactgcagcctctgcttcctgtgttcaagcaattcgcctacctcagcctccccagtagctgggattacaggcacgtgccaccaagcctggcgtgagccactgcacctggcctgcctttaaatttttcattcgaatgaattaacacatgaggtcctgggggataaggacagatggagggagtgggcaggtctcccagagggtctggcctctccagcaactttcttccccctgcctggtgcatcaggaaccaggcagcccagagagcactgtgcctctctccccctctgcttccagagagttctctattctgacactttataggttaagaaataacagcgaagctgggggtggtggcctatcctgtaatcccagcactttgggaggtaaagacgggggatcacttgaggtcaggaattcaaaaccagtctggctagcatagcgaacccctgtctctaccaaaaaaaaaacagaatacaaaaattagccaggcgtggagtcacgcgcctgtaatcccagcctctcgggaggctgaggcaagaaaatcgcttcaaaccaagaggcgaaggttgcagtgagccaagatcgcacacctgcactccagcctgggcgacagagccagactctgtctcaaaaaaaaagaaaagaaaaaaagaaaaagaaaaagaaagagcagtgacaggattccagggtttggaactctaggtggcagtcagacattgtctgcattttggggggttggaaagatgaggtccctgcctggagcagctcttgcccaggcctggtagcagagaggcagagtgctgtgaagcaaggaacgtggacctgcggtcaggttcggactgcagcttctcccaggactcaagtgaatgggacaggctccgagctccagccttttccttctcccaggactcaagtgaatgggacaggctccgagctccagccttttccttctcccaggactcaagtgaatgggacaggctctgagctccagccttttccttctgtaaggtggggataggagggcagagcggacaggctgtgaggattaaataagatggcacggaagaaggtgtctcacatgcagctggggcctgatgggcagccgctagtatcgcccagcctctgagaggggaagctgggcagctcctgagagtgaggaaaacatgcagaagagcctggaaggaatttcaacccagaaaagaagcggtggccttctgggggtcttcatatagtgtgaaaatatgacgaatgagagaatgaatgaagcaagaccagaggcaccgcagcagtgcccccatcagcatggcacccgcagggccctttctggcgctctgtgcacttgtgttggcttagtgtctgttgttcctacgaaagtatgagcgtcttgagatcgtgagctgtgcctgttgtgttcccattatctggccagcacttggcacatagtaggtgcaaaaaatacacattgacagttcctggaaaaggcatgctgaggaggccaaaataatagttatggaaatgaggcggggtgtggtggctcacgcctgtaatcccagcactttgggaggccaaggcaggcggatcacctgaagtcaggagttcgagaccagcctggccaacatggtgaaaccccgtctctactaaaaatacaaaaattagtcagtcctggtggcgggagcctgtaattccagcttctcaggaggctgaggcaggagaatcacttgaacccaggaagcagaggttgcagtgagccgagatcacgccattgcattctaggctgggtgacacagtgagactccgtctcaaaaacaaaaaaaaagaaaaaacatggaaatgagaaagctggaggactaaaattactagatcctcctgagttgggactcaggctctaaattaatagcgggcttcctgtaccaaccctgatagttaatagcgggcttcccgcaccaaccctgatagagttaatagcgggtttccctcaccaaccctgatagaggccagcatctgctttgcttccctctcagccctgagggtcttcatccagggcctggaggtggggcccagacactgcaggatgcaggatgctttgcacccttctgaatcaaggaggggagcagaagaggaaaccaaggcttggggagcaaaccgccgcctgctctggtgtccttcagggttgtccagccgtgagacgggtgcagggaggcagttgggaaaactgtggcctgccctctcctaggaggggctgggagctttccatttactttccttggggcaaatgcctcttatccatcaaggcacagatctgaaacaggtgacacagagtacttggtcactacatcatcactgctgtaattactgtttatgtcaagtgtatctcctgagatctctggagccctctgcagcctggggaaggtttgggctgaaggcccctgggatctgggagctgtgttgctcagcagggtttttcacagtgccctagggtcttcctgtgaaaagcaaaacctaaagcagccatcaggaaagcaggaggggattaaaagttaggatgtggtcagctctattctgcctgcctcgtggaagggtgcctgaggagcaaggtgcgcccctgttggctcatcacatgcccctgcagctgatggcctgccaggctgatggtctttcctggggactccactggtggttgggaagaaggtgtgtggcagtgcccagggagatgatcacagagatgtagaagggcctggaggagattctcaaccaggggactggggcttataggagggtgtctccgaggactcagggacattccacaggaaacagaagagacccaggagtctctgtcttcacacactgcattttgggagttggtgaacttctggaaagtaggagctttatgttatcttttatctttgtgtccgtagcttccagcttctggtctacgggaaagtgagttccttgactccagccatagtcaatggcagcccctcaggaggggctaattaattaattaatcaatttttgagacagagtcttgctctgtctcccaggctagagtgcagtagcccgatctcggctcactgcaacttctgcctcttaagttcaagtgattctcgtgcttcagcctcccgagtagctgagactacaggccggcgccaccatgcccggataatttttgtattttttgtagagacgggctttcaccatgttggccaggctggtcttgaactcctgacctcaagtgatccacccacctcagcctcccaaagttctgggattgcaggcatgagccaccacgcccagccaggagggcttaatttgtattaatcattaatgagaccagggacagtggaggcctctccccatcataaggttgcacagacacattttgtggcattgctatttggccatgggttgcaagatgcgagtgggctctgtgggtgtgataagagggagagacagaccctctgtgccacccaagagtcgtctttccattggcaggctgtcctatgacctccctatcctttgctcctctgcaagatctttcctttttcctttcacctgctccaggcataagcatgagcctcctctctacctccatagggggaggctcagggagtgaggcagcctgtcaaggacagggacagatcaacaccacccaggccaccctcagacccaatcctggctggaatgtgacccacagctgggtttccctgaacacacaccttaatctcccaagtgtgagctcagctgtctttcttgtccacgttgagagaaggacaagtcctctcccttcatcctgggagctgggatatgggaggggaacacccttgcccgccttctcctccaccagcatggccggggtggaggggcttggtttacaggaaacattctgttatcccacacagtaatcttgccatactggtaattcacctggactttgtgggtgggtggggaggctcagtgggtagaaatagctgggggatgctcagggttggggttagaatgctccctcaagctttccaatggagacatgtctcttgggggacaggtaggctgggtagaagctggctactcagggtctaggaagggaaatgagagagggagggtttgggagccaccttccagacatgccttctggtaccaagcctggaccagtggcaaaacccaaagggcagccaatctggctggtacctttgccacaggattccttcttgaatcagccaaataacctgttgcctctggttccgatcttagtgaaggtaggggtcccagggaagctccaagccaggtcactgtacttaaagtctctgggccaaagctgtactgccaagactgttacattgtagccattggctgggtgcagtggctcacacctgtaatcccaacagtttgggagccgaggcgggtggatcacctaatgtcaggagatcaagaccagactggtcaatatggtgaaatcctatgtctctattaaaaatacaaaaattagctgtgcatgacggcaggtgcctgtaatcccagctacttcggatgccgaggcaggagaatcgtttgaacccaggaggtagaggttgcagtgagccgagattgggccattgcactccagcctaggcgacggagcgagactccatctcaaaaaaaaaaaaaaaaacttgtagcctttgtgtattattgttatgcaggaaggttggccaaacattttggctgactagtttccatcttgtgtcaccctcaaactagaaatttgcaaagcactagggtgcctaatctgaagattttttgtttgtttttgagataaggtgttgctctaccacccatgctggaacgtaggggtgtgatcatagctcactgcagccttaaactcctgggctcaagcaatcctccctcctcagctcctgagtagctgggactacaggcatataccatcatgccaggctaatttttttttttttttttaacagatggggtctccctatgttgcccaggctggtctcaaactcctggcttcaagcgatgatcctccccgctcagcctctcaaagtgctgggatttacaggtgtgagccaccacacctggtccgctgaagtttattgatcaaaataaagtttctttgaggcctccgaaggttttggaggtaatgccagaaacttgctcccggctgtgccgaggggagaccagctgaccttctccaccattgttttatggcaccgaagccttagcatagagcccttcccagccaccctacctgcggggctggacccgcccaccacacccaccgcaccttgctggggctgacttcccgatttgtgtccacaggctgctgaacaggatgtcctcggacgacaggcacctgggctccagctgcggctccttcatcaagactgagccgtccagcccgtcctcgggcatcgatgccctcagccaccacagccccagtggctcgtccgacgccagcggcggctttggcctggccctgggcacccacgccaacggtctggactcgccacccatgtttgcaggcgccgggctgggaggcaccccatgccgcaagagctacgaggactgtgccagcggcatcatggaggactcggccatcaagtgcgagtacatgctcaacgccatccccaagcgcctgtgcctcgtgtgcggggacattgcctctggctaccactacggcgtggcctcctgcgaggcttgcaaggccttcttcaagaggaccatccaaggtgcgtggtgggcctcaaggagactgggcgcagggttgggggtggcagccgtgcctgcgggtccggcagaagccctaggaattcccagagactgccaattctgggcgctgttggagcggtacttctgtggggcgccttttcccttgctcagggcttctcattctggcactggacagctgcaagactgttgttgagatgacatgcgttccccaccccctcagctcccccatgcagagccccagaaaaccaaaagaaaatccacaggaatgccaaaccctgggtgcttctcactggtatggagtacactgtcaaatgtgtgtccctcaaaaagtttattttgtgcgggggaaaaatataacataatttgccctgcgattccagacttacgggacatagaaagcgtccctcaccttgtttttgtcttacttatacaagtaaaacgccagatgtggtgactcatgcctgtaatcccagcactttgggaggccaaggccagaggatagctcaaggccaggagttgagaccagcctggacaacacagtaagaccccatcattattattatttttttttaattaatgcatggtggcacacacctctagtcccagctacttgggatgctgaggctgcagtgacctgtgatggcaccaatgccttccagcctggaagacagagcaagaccctgtctcaaaataataataataataatatgtgagtattttctcattgtagaagactcagacctgttggaatcaggacaggagctcatcctgtctggatcccagtttaacctatttttaagaccgaccttccttccttccttccttccttccttccttccttcctttcttcctttcttcctttcttcctcccttcctctctctctctctctctctctcaacccatcctgtctggatcccagtttgacctatcttttaagacctgtattttctttccttccttccttccttcctttctctctctctctctttctttttctttctctctctctttctttcaatgagagtcttgggccaagcacactggctcaagtctgtaatcccagcactttgggaggccaaggtgggccttgaggtcaggagctcaagactagcctggccaacatggtgaaaccccatctctactaaaaataccaaacaaacaaacaaaaaatcagccgggtgtagtgtcaaatgcctgtaatctcagctactagggaggctgagacaggagaatcgcttgaacccaggaggtggaggttgcagtgagccaagattgggccgctgcactcaggcctgggcgacagagtgagactccatctcaaaaagagagagagataagggtcttgctatgttgcccaggctggagtgcagtggctattcataggcacaattattgcacactgcagccttgaactcctgggttcaagccatcctaccatctcagcttctcaagtagctagaatgacagtcgctgccaccacacccataagctttttatcaatacatttacatatcacctgagtcacattccaatggccatgggggtggcagcctctttctgtgggtactagagtcaatcactctgacaaaggagtgcaagaaccctggtgggtcgctctgtaaagtcaccacgaggtgaattggggagaataaattggggagaatggtgggcctgcccccacagggctgttatcaaattcatggcagagagagaccactgggaccactggtgcacatcaccacacccagttaattttatttttaatagagatggagtctcaccatgttgcccaggctggtcttgaacacctgggctcaaatgatccacttgggcccactttggcctcccaaagtgctgggattacaggcctgagccaccgtgcctcgccgatagttgtgactgttaattgcatcaggccctgggtagagcactttcattcagttagtcaagtatctgttgagcacctacaaagcaccaagccaggctgtaggtgctggtgataggatagaaaaaatccctactcatgcaggtcactgcaatgagctggtgccatccaactggcacagaaactgcagaccagacaggagaacacccaggaaccacccatcctgcccctgcatcagatccctttccagggccctgcctcactgtccccagaatgtacctaccccattcatttcccttttagaagaggcaggctaagcttccccgggatgattctgtttattcaacaaatatttatgtgtttaagtttcttcagatggcaatctatttatgaaaccaattgaagacattaagattggatatatttccacttccacatatgagttgagatggtgtggtgcattggctaaccaccagggctcctggtcagagagttccctcgtccccttatagctgcaccttggacatgctccctgtttctctctgtgcttcagttacttcatctaaaaagtgagatatcagctgggcgtggtggctcacgcctgtaatcccagcatttcaggaagccgaggagggtggatcacttggggtcaggagttccagaccagcctggccaacatggtgaaaccctgtctctactaaaaatacaagaattatccaggcatggtggcaggtgcctgtaatcccagctgcttgggaggctgaggcaggagaatcccttaaacccaggaggcagagggtgcagtgagccgagatggcaccactgcattccagcctgggcaacagagcaagatcccgtctcaaaaataaataataaaactttaaaaaataaaaataaaaagtaagatattgttcctaccttatagagctgttaagaagcttacgtgagttaatatatataaagcacttagaatattgcctagcaccttttaagtgccaacaaatgtttgtaattattattttaactttaacaatgtgatttacgannnnnnnnnnnnnnnnnnnnnnnnnnnnnnnnnnnnnnnnnnnnnnnnnnnnnnnnnnnnnnnnnnnnnnnnnnnnnnnnnnnnnnnnnnnnnnnnnnnnnnnnnnnnnnnnnnnnnnnnnnnnnnnnnnnnnnnnnnnnnnnnnnnnnnnnnnnnnnnnnnnnnnnnnnnnnnnnnnnnnnnnnnnnnnnnnnnnnnnnnnnnnnnnnnnnnagacatattattatgaaaacaacagacacatttatcttatagaataagcttttgtaatctacatatatttaaataaaacaataattgttttgatctaacaggactcagattattttagctattttagttataaatttcttttttcttttcttttttttcttttttttttttttttgagacagagtctcactctgtcacccaggctggagtgcagtggcatgatcttggctcaccgcaacctccacctcctgggttcaagtgattctcctgcctcagcctcccaagtagctgggattacaggtgctggccacaacacccggctaattttttgtatttttagtagagatgtggtttcaccatgttggctaggctggtctcaaactcctgacctcaagtgatccacccgcctcagcctcccaaagtgctgggattacaggcatgagccactgcgcccggtcataaagtgatttatttcttaaatgagcccttttgaaaaaataaacatgataaaaaattctagcagtgcaaaacagtagagcacgttttcctgaaaccccagacctcagttttcttaactatcccagaaggacccctttaccatctttgtcaagcaaatattttttgagcatcgtctttatcaggcactgtgctggcctccaggacataaaaatgaatgcaccctggtctctgcccgctttatacaccctgagtctgagtctgggggaaggccctgggatctctgtatttgaaaagcactgcatggtgatgctgtctcttgcctcagccaagaatgagaacctccagtctgatggtttttacacaaatcatcagatatttgacaaacacaaaatgtttaagtcaactgaagttaccaagataacaacatttttctttctaaattggaaggttgtcttggagaggttgccattattttagactctttgaggtcagtttttgaagaattgcttgttagaagacagtcacattttcttctcaccatgttgttcttagatgggctggagagttttgaatcacattttttgaaagcagaggttaatgtgtgtaaactcagaaatcctactgcatgcttgacagaggcccaggtgtctgcgaatgttctcagcaagttaggagtccacatgaaaggttcgtaaatagtcttaattacttgctaccgcgaataggataatgatctcttcgtagaagtcaaaagacaaacagcagcatttgtgcagttggaactgaactgctgcagcctcttctctttccacaaggagagtttcaagttcgtaaccggaaagaggtttatattcaggacagggaaaagtaaactcaaggctgacagattgctgtggttattttattaactctttggttttgttctaacaaagatttagattttgttgttgtttttttttttgagacagagtcttgctctgttgcccaggctggagtgcagtgatctcactgcaacctccacctcccagctcagcttcccaagaagctgggattacaagcctgtgccaccacacccgactaatttttgtatttttagtagagacggggtttcgtcatgttggccaggctggtctcgaattcctgacctcaagtgatcctcccatcttggcctcccaaagtgctgggattataggcgtgagccaccatacccagccagattttgttgtttctaaacgtagcaactgtagaaaatctggaaaactaggaaaagtacagacaggagaaaaatgacctagaattggacaaccacagagacaaactcagaactcagtgagcattctttgagtccctctctgagtaaggtgcagagggggagcaggagagaaagggacgtggttctgtccctaagaagctggaatctgttgtgggttttttgttttgttttgtttttgtagagatgaggccttgctatgttgcccaggctggtcccaaactcctggcctcaagcaattctcttgcctcagcctctcagagtgcttaggattagagggaggagccactgcgcctggcccaggtagctgcaatctactgcttagtgcccatgagtctacaggcatagcactgtgctccaaaccaggacatagtctcctaagcacctaatattcaggtcattttttttttaagtcctattgtgtggacagagggcttaagtcatggaatgagccattcacgagtgcctgtaaatgcttggaaagctctgaaaattgggccaggtgtggtggctcctgcctgtaatggtagcactttgggaggctgaggcaggaggatcccttgaagccaggagttccagcccagcccagcttgtgtaacaaagtgagaccctcatctctacaataaattttttaaaaattagctgggtatggtggctcgtgcctgtaatcccagcttcttgggaggctgaagtgggaggattgcttgagcccaggagtttggaggctgcagtgagctatgatcctgccactatactccagcctgggcaacagagctggagtttctttaaaaaaaaaaagcggccaggtgcggtggctcacacctgtaatcccagcactttgggaggccaaggcaggtggattacctaagatcaggtgttcaggaccagcatggccaacaggatgaaaccccgtctctactaaaaaatacaaaaattagctgggtgtggtggcgcatgcctgtaatcccagctactcgagaggctgagacaggagaattgcttgaacccgggaggcagaggttgcagtgagatcttgccattgcactccagcctgggcaacaagagcaaaactccatctcaaaaaaaaaaaaaagaaagaaagaaaagaaaagctctgaaaatcatgttaatcgtgttacctcacaccctgcctcttccttagatcacttccttctgcgcaatccaatggttgtactaatatgggaagaaactttgcagaaacaaagatgtcatgatagatttagggagaaagactaagaccgagtcattccttctccaccaatcttttttttttttttttttttttttgagacagagtctcgctctgtcacccaggctggagttcagtggagcgatcctggctcactgcaacctcggcctcccaggcttaagcaattctcctgccacagcctcccaagatagctgggattacaggcgtgtaccaccacacccggctaatttttgtattttcagtaaagacagggtttcaccatgttggccaggctggtctccaactcttgatctcaagtgatccacccacctcagcctcccaaagtgttggaattacaggcgtgggccactgcgtccaatccaccaatctttattgagccctcactatgtgcttggctggtagtacaatggcgggggagggaagagggggaagatgggcaaactatggcctgtaagccagccacccttggttgtataaatcaagttttgttggaacacagccacacctatttgtttgtatattgtctatggctgcttgagcgttacaacagcagagctgagtagttgcaatagtgacggcctgatccacaaaacctgaaacactcctctgcactacattgaactaggcagattcagtcccctggctctcagagacctataatcaactcctagtagtgcatgttagtgtttattccaaccctgcccaattctatgctatgaaagggaggttttttttctgttgttcgttttttttttgttttgtttttgtttttgtcgctgggggctatgatgacactcactgagaatagatgagctcatagacagatgaaggcaccttcctgaaggaacagaatggctccaagtcagaagagatagacctcaacctgattgcatttactcgcatatctaaagaaaaaaaaatgccaattaacaaggattggctagccctggaggcatagaaaaaacagacatacttaggcaaagccaccactcctaggaaaagggagtcttagcctagggacagcctgatgtgattaaacattccgtttatctgattaatatctttctggttaggatctagttcccctgcaggtcttctgcaaggagtgaatttgcaggtcaggcagacagatcaatttctccttgtatgtgtgctctctttgcatggcatccctgagcttatacatcaggttcctgaatttaggcaataggagtgcctctgagagatggagccactttctgtggctggaaaagtcagctgcttctgggacttagggctgagtgacactgactccaccgtaatgaaaacctttgtaataaccttgaccctgtcaccctgtgtctctctcagcaatgactctgcctcctgttttattgagaaactagaactccctcagcttcctgccgccaaaccgacgcactctcttccatgttcgcagctgcttccgttcactgattccgcagctatttcttgcaactcactcactgctggaagagatgtctcctaccccaggctcagctcttctctggctttgaatcctacctccttccctcctcctgagaccctctcgcctattacctcctctcctttgtcttcccctgctcattttctaaagtctccttccttccttccttccttctttccttccttctttccattaacattcaactatctctagtatctccaatcttgtaaaatatatatctcctctaccttcagcttcctggttcttcctctcttcctcctctcagttcttgacccagcttctgcgcccagcatcttccttctcatatccatggcttcagttgtctctgaaatcaggatgaatgctaattccataggtcttgctgtcatcctcttccgcaagctccattcctttcacacctaatgaacatttccacttggatgccccagaagcaccccagttgcacgaagtcttaaacagaagcggttttccttccatcaccatttctccttgtgttcccaatacagtgcctgcatcagccctccatgttcaagccagacacctgggtcttacctttaactctgcttcctgtcccagcgcccaccccctaccaccccgaactaacatcccagtggccaagtcttgttcattctccctccttcagatcacttgacccggcagcttgtcttccttcccctgcttcagcgcaggccaccgctgactcccaccgcttcctacctgttctccctgctgccaggctcggccgttcccagcctgaacacacatctgaccatgtctcccttctttcttgtggggagaatcaaagctccagaacatggccaaggacgccctctgggattgccccacgtctcatgccactctcttttgcatgctgtggtcaccctgattgctctgttttctagttaccagattttattccatgctttcaatttctagattttgcatatactcttctctctgttgcacctactcccaacctctactcccagcttgtgtcccttaggtctccagttagtgggcatttcctccaggaaggcttctctgattctctcctctcattcctcctggatgccctgcaaaggttcgcccatcacgccacccttctcccactgtatggttattgccattttttttgtctgataccccaagaagagtacaagctcctaaggcacagggttacatttacttaccttttttttttttttttttttttctgagaccaagtctccctcttgttgcccaggctggagtgcagtgacgcaatctcggctcactgcaacctccgcctcccaggtccaagtgattcttctgcctcaacctcccaaatagctgggattacaggcacgcaccaccatgcctggctaattttgtattttttttttagtagagatggggtttcaccatgttggccagactgctctcgaactcctggtctcaaatgatctgccagcctcgtcctcccaaagtgctgggattacagacgtgagccaccgcgcccagcccacatttactttgattttcacttaaccccatgtcctctcacagtacctggcatgtagaaggttctcagtgtgtccgaatgcaatgcaatccccaaacaaagtgatctcccatttcccagggaggacaaactgaagaagttgggccagtttgcatatgcgtaaactttaagggatctaggtaaaatagtcagatgtctgcttataacaatatattatttagttacgcttgtatattttaaattaccttatggaaaacaatatattatttttgaaaagttgtttttctacacatattttgtgaaggaagtcttatcaaatgaatctttgatacaaatgtctttgttttccttctctagagttttttgagtcatttaacagtgtttcagtgtgctgccttcatttccatcagttaattgaaattttatgagaatgtatgcgctgctatccctgaagttttttcattttaagccataagtatatgtcctacaccataaggggagttctttttttatttgtgttgacttatgatcaggatatccacaatgtatcaggtacatactgcttttgacacccaacacttgtaagattattttcctgggaataactaaatttgtgttaaatttctttactcccaggccaggcatggtggctcatgcctgtaattccagcactttgggaggccgaggcgggtggatcacttgaggccaggagttgaagaccagctggccaacatggcgaaaccccatctctactaaaaacacaaaacttagcttggcatggtggcacatgcctgtaatcccagctacttgggaggctgaggtacaagaattgtttgaacccgggaggcggaagttgcagtgagccaagatcacacactgcactccagcctgggtgacggagcaagactcagtctcaaaaaaaaaaagaaaaaaaagtttgtttttatttactccctttgtagtgattcactcaggcaaggagcattgattgcggtcttcttaggaccatgtgtcttcccaaattttagattgttgttaggtacaaagtgattgacttaatagcacctctgatgtgagaacttgtaaagactcaaatcataagcaattttctttctttttttctttctttctttttttttttttttttttggttcttgggacagggtcttgctctgttgcccaggctcagtgcagagacatgatcatggcttactgtagcctcaaactcctgggcttctgcctcagccttctgaggagctggaattacaggcatgcaccaccatgcccggctaatttattttttaaaaaaattgtaaagcggagtctctctatgttgcctacactggtcttgaattcctgggctcaagtattcctatggcccccaccctagtgggcttgcattgtagggggaaagctgacaataaatatgataaataatgaagcatggtgacagactgagacaggtgttatgaaggagaaaaaacaatgatgagaccagagagtgactgagaaagggggggggggtctcatttagaaggaggattagggaaggttgtgctaataaggtgacttttaaaggaagctgaagctcatcaaggaatcctgggaccagcgttccaggcagaggaaaaagccagtgtgtttcaggacagcaggagggccaacatggctagtgtcagtgagcaaaggcaaagtggaaggggctggagaggatgggcaaagtctaggggccatggtgaggggtgcacttggatttttttccaggtagagtagcagccgttgactaacatgtgatacatggccatgaggggctgtacggttaggtaaagccagtctgcactcctccttgagttcccagggtagatggccaacttcgcacaggccactgggagtcttttgagcaattcctgggtctctaacttaaaacaagaaggaacaagtaagaaagaggcctggcacagtgcttcctccattcacctggggcccagatgcaggcttggaagaaaactcccctaggagaggggaagggggatgattgatgggttattccaccttgggtcgcctccaggtcttttgtcctggagaatgcagctggcggatctggatcctggatcccaggaggcacaagacaggggtgcagagacaagagcaggagagggcaggagtcaggagctaggtgctggtcccggcccagtcactagtcaactggctgaccttgggcaagcaaggactgagttcctctggcctcagtttcctcatctctacaagaagagtccattaaacccacaaaatgttagctatctgcagggcactggcaaatgacagaacaaatcacaattcctctttttggagacacagccaggatgccagtcagaatgtggtcagcctgtgacttaggtgacacatagagtccagagaaggtttataccttctggagggcagggagggcttcctggaagaagggacactttctcagaagtggaaggtaaacatgcttggcagcaagagaggagggggctcagtggtggatgatgggatgggaaaacagaatggcactggagtgcaccaggcttcacaggtcatggtaaggaacagttaagtaaggagtcatatttaagatttgagggctatttaaccaggcttagaatctcagcttcacaatttcttagttgtatcaccttgggcaagtgacttagctttcctgagccttaatgtccgtatcagtaaaatgtgaatagttcctgcccctacagtgttattgcaaaaatgaaatgagacatgcatgtgagggtgtaactaagtgcctggcacatgaaataaatagtatttgttttgttagttgtgcttggcaatgggaagtcattgaaggcttctgagcagggaattaatcagatctcctttcagcaagataattcaggcaacaataggaacgatgatgtggaagcaggagaggctaggggctgggagcccagtgaggaagcaattttattttatttatttatttttgagacagagtcttgctatgttgcccaggctggagtgcagtggtgcaatctcggttcactgcagattcttctgggttcaagcgattcttctgcctcagcctccccagcagctgggattacaggtgtgggccaccatgcccagctaatttttttttttttttttttttgtatttttagtaaagacagggtttcactgtgttggccaggctgatcttgaactcctgacctcgtgaccctcctgccttggcctcccaaagtgccaaagtgcagggattacaggcgtcagccactgcgcccagcaggaagcaatttttttttttcccccgagatggagtctcactctgtcacccaggctggagtgcaatgtcatggtcttgggtcactgcaacctctgcctgggttcaagtgattctcctgcctcagcctcccgagtagctgggactacaggtacatgccaccacacctggctaatttttgtattttaagtagaaagggggtttcactctgttggccaggctggtcttaaattcctgacctcatgatccacctgccttggcctcccgaagtgctgggattacaggtgtgagccactacatccggccacaggaagcaattttaacagtgcagttagggccgtccaaaccaagatcagggcaaaagggctagaaggagaagttaggcttgaggaactttcaaaagtggattcaggctgggcacagtagctcacgcttgtaatcccagcactatgggaggcagaggcgggtagattacttgaggtcaggagtttgagaccagcctgaccaacatgatgaaaccccatctatactaaaaatacaaaaattagccaggcgtggtggctataatcccagctacttgggaggctgaggctggagaatcgctggaacctgggaggcagaggttgtagtgagccgagatcaggccattgcactccagcctgggcaacagagtgagactctgtctccaaaaaaaaaaaaaaaaaaaaaaaaaggtggattcattattaaaaggatagtgactggattgtggacgctaagggaaggaggactcttagatttctaatttaggctactagggagatggcaaggccattagggggaaaacataaatacccagaaggaacaatttcgtcagctgggagagtcagggtgggaaggagcatgagataatggataaagttttggacatattgagtttgatcagttcacagagaccctggagagtttggaattacagcccagaagcaaaatcttgagtggggttttaagtctaaggagagcctctaagactgtggttctcaaagtgtggccctcaggccagcagcaaaggctacacctgggagcttgttagaaatgcaaattttggaccccaccccagacctactgaatctgagactggggggcaaggcccagcaagctgatttagcctttcaggtgagcttcattcaagctcaaatttgagaactggtgttctagggaaagctctttagaaggagaagggttgagggaccctgccgaacagaaggcgcataggaggggccttgaaaggagattgaggagtgccatatttcatcagttctaagacgcacattttctccaagtaacatctctgaattgggctgcctgtcacagttaccattgaccaggtgacagccgttccctggttgtcactgcactcaaatgcacctcaaaagttgcagagtaggggccagtggcctgagacaacagtgaacactttcttaacaaagcccttgatagtagagaggatgagtctgtgaaaataacatgaaaacaatgactgatcaaaaatgattcagaagagtttgagatgttttagcaatattttaaccaatctgtttttctcatattttctcttatgtatgtgtaagaaggctacgggatcaaatcaaatctgaaaaaaagctcttttttttttttttgagactgggtctcgctctgtcacccaggctgaagtgcagtggcacaatctctgctcactgccgcctcagtctcccttcaacctccctgggctcaagtgatccttccaccttgagcctccaaagtagctggtaccacaggggcatgccaccacactcggctaattttttgtatttttggtagagatggggtttcaccatgttgtccaggctgatcttgaacacctgggctcaagtgatccactggccgtggcctcccaaagtgcctggattacaggtgtgagcctattcagtggattcttttttctttcttgactgatgggtaaaataatggtacatcttaccactgaaagcatcttagttcattacaaaccaggcgactaaaaaaacaaaagaaagcaagtactccagagttgattaaatacacatagaaatagtcagagatgttgcaagagtccctgcagagagaagggagatgaaatctaacaaaacagcctgttttaagagggtggcaatgggtgtctgctgcttcaggaaggaccaggaggagaaagaccaagaggagacaattgcatttggtagctgaaaggtcactgttgtggaattctaggattctctgggtgggggctcttgctttcgattcatttgcattcattatctattcaacagatattaatcgatttccaggattgagatactgtacttgagatacagaaatgaaaaacataataatctccattcccaaaaaagcacgcagttcagaagggaggcccacaggtacacctgtgattatgaaacactaaggtagctgctttgagtgtggggatggggtggtggcgagaaacatgcgagcctatctggggcagaagggaagaaagtgtcaccaaggaggccatgtgagagctgtggctccaaggatgtggaggagctggccaggaggaccaaatgaggagtttcaggtagagggaggtatgggagggctgggggctccatgagatccatgaactattatacttactgacagttcagatctgctggagcctacaaactggaggcctcagtgagaggggattagggtggacaatttggaaatggtcagatcataaaaggcctggtaggctttgccctggagtttagattttgttctctgctctgggtggcaagagttggagaatttcttaaatttatactttaaatttatttctaattcttttcaaaataaggtatacaaatagtttaaagagtataaaagaaacataacttttaggccaggcacagtggctcatgtctataatcccagcaatttgggaggccaaggcaggcggatcaccaggagttcaagatcagcctggccaacatggtgaggagtttgagaccagcctggccaacatggtgaggagtttgagaccagcctggccaacatggtgaaaccccgtcgctaggaggaatacgaaaattatcccggtgtggtggcaggtgcatgtaatcacagcgacttgaggaggctgaggcgagagaattgcttgaacctgggacgcggatgctgccgtgagccgagaatataccgctgtcctcccgcctgggggacaaaacaagactatgtctcatggatctgtagatatgggtgttttataatgaaggatgatagtcggaggggctaccgcttctcctcacactcagagacagaggagtgcatttaaaggaaactcacttcaatggattagaaatattgtaatctcataactgtatttgctgacgacacttagtaccttctnnnnnnnnnnnnnnnnnnnnnnnnnnnnnnnnnnnnnnnnnnnnnnnnnnnnnnnnnnnnnnnnnnnnnnnnnnnnnnnnnnnnattcgctccattaccaacccatccaacacacacacacgatcatcccgctgtcccaatatggtaatatcacaaaattttctattttgcctgttgccatttccttcttgacatgtccttgacttttctcgtgggttgtattcccttttttctggatcctacctcttcctctttttagttctttccttctttggggaaagcatgtagttcatgggcgtccttaaaaggtataggagaggtaaaatcggcaataccttgtatatgtggaaatgcctctattccatcctccaaccttcacattagattcatgtcttggcttggtacagaattctagttgaaaattaattattctcagctgggtgtagtggttcatgcctgtaatcccagcactttgggaagctgaggcgggtggatcacctgaagtcaggagttcgagaccagcctgaccaacccgaagaaatcctgtctctactaaaaatacaaaaattagctgggcttggtggtgcacgcctgtaatcccagctactcaggagtctgaggtaggagaatcgcttgaacccgtgaggcggaggttgcagtgagccgagatcacaccactgcactccagcctgggcaacaagagcgaaactcgcacacacacacacacaaaaaaaaaaaaaaagaaagaaagaaagaaaagaaaagtattgtccctcagaatttggacaccattgctgctttgtcttgtagctcctgctgctgctatatcttgagtcttcaatgcctgacactttctgaggttctgcagtgtggctagcttatttcttatctggatcccttgctttagctacctaggtttctactttcctcattctctgagacagttcccactcccatcctgccagttattggatttttgggatgacgcatagacaggtgtgctccatgtgccatgatgggccagagaacccataaacttgtctgggaaagttattaactgacctccagggggcagtgtggaggatagattggaaagggaaatggagacaggctagtgcaggatgatggtcgcaaggggtgatgagtgtggaactaggactgttgcagaagggagggagggagcaggtatcaggaagtaggatgaaaaggatcttaggggtagatatggaaaaatccaggaggccccttcatttctgacaggttgcaggtggctagtcgtccctttgatgagacaagggatacagtaagaggaacaggttggatgagggatgggttcagtttgagaaaggtgagggcccaggggannnnnnnnnnnnnnnnnnnnnnnnnnnnnnnnnnnnnnnnnnnnnnnnnnnnnnnnnnnnnnnnnnnnnnnnnnnnnnnnnnnnnnnnnnnnnnnnnnnnnnnnnnnnnnnnnnnnnnnnnnnnnnnnnnnnnnnnnnnnnnnnnnnnnnnnnnnnnnnnnnnnnnnnnnnnnnnnnnnnnnnnnnnnnnnnnnnnnnnnnnnnnnnnnnnnnnnnnnnnnnnnnnnnnnnnnnnnnnnnnnnnnnnnnnnnnnnnnnnnnnnnnnnnnnnnnnnnnnnnnnnnnnnnnnnnnnnnnnnnnnnnnnnnnnnnnnnnnnnnnnnnnnnnnnnnnnnnnnnnnnnnnnnnnnnnnnnnnnnnnnnnnnnnnnnnnnnnnnnnnnnnnnnnnnnnnnnnnnnnnnnnnnnnnnnnnnnnnnnnnnnnnnnnnnnnnnnnnnnnnnnnnnnnnnnnnnnnnnnnnnnnnnnnnnnnnnnnnnnnnnnnnnnnnnnnnnnnnnnnnnnnnnnnnnnnnnnnnnnnnnnnnnnnnnnnnnnnnnnnnnnnnnnnnnnnnnnnnnnnnnnnnnnnnnnnnnnnnnnnnnnnnnnnnnnnnnnnnnnnnnnnnnnnnnnnnnnnnnnnnnnnnnnnnnnnnnnnnnnnnnnnnnnnnnnnnnnnnnnnnnnnnnnnnnnnnnnnnnnnnnnnnnnnnnnnnnnnnnnnnnnnnnnnnnnnnnnnnnnnnnnnnnnnnnnnnnnnnnnnnnnnnnnnnnnnnnnnnnnnnnnnnnnnnnnnnnnnnnnnnnnnnnnnnnnnnnnnnnnnnnnnnnnnnnnnnnnnnnnnnnnnnnnnnnnnnnnnnnnnnnnnnnnnnnnnnnnnnnnnnnnnnnnnnnnnnnnnnnngaagtgcactggggtgagcatcaacccaagcccctttcacaccagcagaatagagtgggtacattgagctcggtcattagcaagcagccttgagcccacaggtccccgagaagctattgtccgagattagcaaccccttctgagccgtggcagggctgccctgctacctgcagctgttcatgaacagctgatggggatgcccctgggatttcttctctccgggaagcacaggatcaaagagagctgatggtggtggttacccctctgccttaaggtcacggagaagtccaggtcaggttctaccagtgcctgcctccttcccacaggcaccggcagcatccactctgaggtctagggaccggaggcagaccttaatgttctcaaatatcacagttggtggctagcctcagatccaacacctagaaaagacttaccctggaatcctttggttgtccctgtaagacaatcttgtccaacctgtggcccaggatggctttgaatgtggcccaacacaaattcataaactttcttgtagcaggatgagttttttttttctcatcagttatcgttagtatattttatgcatggcccaagacaattcttcttcaacgcggcccagggaagccaaaagattgcacactcctactgtaagatctgcgtaaatataaaaataagcggagcagctgtggtggcctgtttgccagtgccggcacttcattaagacgttcgtatgcgttctgtcactgaatgtagggaacttttatttattatgtatttatttttgagatggaatcttgctctgtcacccaggctggagtgcagtggcatgatctctgcaacctctgccttctgggtttaagcgattctcctgcctcagccttccgaatagctaagattacagatgcccactaccatgcctggctaatttttttatatttttggtagagacggggtttcaccatgttggccacactggtctcaaactcctgatctcaagtgatcctactgcctcggccacccaaagtgatgggattagaagtgtgagccactgcgcctggcctgaatctggggaacttttagataagaactttatgagatgggggctgtacccgtttcacagattaggaaactgaggctcagagaagttaggtgatgtgcccaaagtggagtctgcacctgtctatactgaatacactcccaggttagaacctggaatttatgctaaccattggctatgtccctgtcctgagagaactcatccccaaaactgccacacctcagctgcacgtgtgtgtgctgccaatgtcctatccctgttcctacacgctcctaggcccgcctcaagagaccacaggaattctgatgaattaatctcatcactttatcgaggaggcacttaaaaaaattacaaagcaaggccgccagcctggctttgctggcagctagccgctggggccataaaataaatggaaaggaaccgaaataaataaataattaggtctctttctctgacacacaccaacacacacacacacacatgcaggccaacccctaaagggtgaagagcctggttggggacttgctgttagcacttggtcgtcttgtcctgggagagcaccagttccagctctgcacacacacttcctgactccttgctctgagcagcagcctgtggccttatccttcctcaaaaagtgacaggttggctgagcagctgagagcaaagcatgggaaaagtgaagagtgtgcaaagggtgtcccaggcagctggaggtatgaagcccatggagagccctgtgagctcccagcacagtggctcagagcaggctggagctgacaggctgggtcccagtccttactgtcccataccctggattctgttcaccttctccttttttttttttttttttttttttgagacagagtctcgctctgtcacccaggctggagttaagtggcgcgatctcggctcactgctacctctggctcctgggttcaagcaatccttctgcctcagcctcccgagtagctgggactacaggtgtgcactaccacacctggctaagttttgtatttttagtagagacagggtttcaccatgttggccaggctggtcttgaactcctgacctcagatgatctgactgcctgggcctcccaaagtgctgggattacaggcgtgagccaccacacccagcccctctatcttacagatgagaaaaatctgtttacctccggggttgctgggaacatgaaatcctcgggatctgtaaagcagagctgtggctgctccctgacaagcattcgccagtgtgagctccccgtgtgtgcacattgagcggctgggtggcccaggcagtgggactagagaggagctggagtaggtggaggaggcagacagatacaacacaggggacattaatgggttatcagcagggagaaggagcgcctccccatgtgggacctggagaaacagagggtggagggagcatagagagtctgttctaagctgcaaagcaaaggcctggcggcctaggagaccatggagttccagaaagtgatagttatgcagagcgaatggagggaatcagcacgctgaggctgcagagagagggtgggcctgggtgggaacgggccaaatcctccagcgccttctaagccaagataaaggcttgaatgaattagctttcatatgtgttttcctcctttctgtttgtcttttgaattttaccgggcttacatgaatattgaaattattccccaagaaaccacccaagccagaatgctctaagaaatagggctagacaaaagcagggaggggtacacagaatcttcatcccttccccttcccatcgccttccaacctccagcacagagcatgacctccagctccctccctgcaagaaatgggatggggagaaaggtggtgcctgctggacttgagacagggagagagagggagaggaggagagagggagatggggagagagggagggaggatagctagccttcacctgtagatctctgaggtgctccagaaatagttttcctcaccagtaaaaagggatgagaatactcactgagcctttgtgagtactcgatacagttaggcacattgagtaattttgctacctcaaagcactttgttaatggtagaacatggttcatgcttgtttccagaaaatccaatagaaaaggtttccatccatatcccatgtggggaggtggtgacacagggaagcccaaggccacccttctcccctactacccaccaggcaacctcagccactgggtcagcaccaggcgcctgtcctcaggggggcagcacttccaatttccccatcctccttgtgagatacagggtgggacaggagatctgtgtggccttgggtaacctgcttcagctcccagagcctcagtttcttggtctatgaaatgggacactgatgtgccttcagaggctgttgtgaggactgagggagctgtgcagactatgcacacagtaggtgcacaataaatcttagctgctattcctctgaagtgggtagggtttggtgtggaggattcagacaggcaagcctccagctcctccctgctccctcaggaggtggggctggaacgagagatgtgttctagttgagagattctgttctggaaaaccctggctcaggctgacctcagggactttgggacaggagtcgaagagacacaataacaaaacagcacggtgatgtgctgttcttcgtttgtacgttccagttacatttttttttttttgagacggagttttgctcttgtcacccaggctggagtgcaatggcgcaatcttggctcactgcaacctccgcctcatgggttcaagtgattctcctgcctcagccttccgagtagctgtgattataggtgcccacccctacgcccaactaattgtttttttgtatttttagtagagacagggtttcaccgtattggccaggctggtctcgaactccgtacctcaggtgatccacctacctctgcctcccaaagtgctggattacaggcatgagccactgcgcccggccactccaattgcatttctttacctccctcacctgctctccccccatcgcctttccctccattaccaggcacattgtaggtgctcaatgcatattcgttaataagagtcagcaggtcagcatgcccagggcagatgcctgtattagaaaggcagtcacagcctctcctgactggactgtcaaccctcccaggaagagcactggaaggtcagttcaacctaaataagacctctgtgttcacactgcatagaaacacttggaaaactcatctgtaaaatgggaatagtattagtacttattttctctttcatggaattgctattgggaggggagggactctgtagatcagtcattcactgcattctacctgcctgtctctatattgtgggggctgtgctaagtgctgctggacactggggagcagcccaaggtcttggcttcgtggggcctacagcttaaaagagcatgggttgggtttatggtagccattcttttgttttattttgttttgttttgtttgagacagaggctcggtctgtcacccacgctggagtgaagtggcgtgatctcggctcactgcaacctccacctcccgggttcaagcaattctcctatctcagcctcccgagtagctgggattacaggcacacgccaccacacctggctaatttttttttgtatttttagtagagacggtgtttcaccatattggtcaggctggtctcgaactcctgacctcaggtgatccaccaacctcggcttcccaaagtgctgggattacaggcatgagccactgtacccggcctggtagccattcttataacccatgaaaggagtggcctgaaaaatttatcacagattccctctgctgaatgaactctgctcataaaatgaccccctcgcattgaatagtgtttaaagcagttgtccatatgtggtcttggttaattcttcatttagtagattatctcactgttttgaagatgaagaaatttcaacttggtcagaggaaagtatatcctcaaggttagcaaagccaggtggcctgggcccctccagtgggatgcagaacccgggccttgatcctggtggacgcagagtttccaggaggcttttcccacacattggggtcccaggctggaggctggaggagcctgtggtggtggtggtggtggtggtggtggtggtggtggtggtggtagtggtggtctgcactaatgttctggtcagcatagggggcgttctcctcctggagtaaaaggccagcttagtgagttttgatgtccctgcccaggagtggcttcaacactgtgggtggccatcctctggagagtgtttccccaagtagctgcctggtccacccagacctgccacctggagtctccatatggaagagttcgaaatgttctgacaagcacctcagagcacttgctttgagaacactaggggggagtggcagctctggcaaattaaaatccccatccatccagccctgcgctggcaggtgggggccctgggcggccagcacccggcaaccctctctgtgtctggttgcagggaacattgagtacagctgcccggccaccaacgagtgcgagatcaccaaacggaggcgcaagtcctgccaggcctgccgcttcatgaaatgcctcaaagtggggatgctgaaggaaggtaagagaccccaccgagtcggggttcactgtgaggctctgcttgctggggagtttttgtcccctgtgagacacccacaagctgtggacctgtgtcccagggtgagacccagtctgagcgcccatctcctcccacaccctgccagcctgccacgacgcccgcatggctctcctcctttagggaggtgggaattggaatttcttcattaaggatccttccgaacccctggccccacttgggccccagtgggcctggcactctgggaaggccctcctttaggggcaaaccccatgtctaccctaggaggggtaggcttaagaggctgttatatcacctagcaccctcaagggctcgggggtgaaaaggacagacacattaagtccaggaatgataaataatgttcccttcacctgtgaagaatggcatttgttttctggtgggtggacaggacatggctcttgccttgggaacgctgctcccttccttgttccctctcttcccatcctctcccttccctctcctttctctccctgcgtcctctgtctctagagctgtgctgtctaatatggcaaccaccagccacacgtggctcctgagtgctggtccaaacagaggtgtgctgagtgtacaacacatgcctgctttacaggacttaataggaccataaaaggcagtgtaaagtctggtggtgatccttttaaaaatgtgattgcatacagaaaggctaatcttctggacatgttaaataaaacatattgtgaaattagcatcacatgcttttttgttttttttttgtttttgtttttgttttttttggagacggagtcttgctctgtcgcccaggctggagtgcagtggcgcaatctcggctcactgcaagctctgcctcctgggttcacgccattctcatgcctcagcctcccgagtagctgggactacaggcgcccgccacctcgcccggctaatttttttgtatttttagtagagacggggtttcacggtgttagccaggatggtctcgatttcctgacctcgtgatctgcccgtctcagcctcccaaagtgctgggattacaggcgtaagccaccgcacccggccttttatctattcgttgatgtggctactagaaaatttgaaatgacacgtagctctcattgggacaactgctccagatctcctcttcctcactttctctactgatttgctcctttttttatattaaaatattattgatagaggcaaggtcttgccatgttgctcaggttggtctccaactcctgggctcaggcggtcctcccacctcagcctcctaaagtgctgggattacaggcatgagccactatgcccggccgatgttttcagtttgaggaaccttgttcagtaccattttggggatgggtcgtgagtgtatgtgtttccctgcttctccagcttccaaggggagccagtgaaaattcttagagatcaacttttaagctccgggcctggaatccttctagaagtgggaggaaacaggaaaagaggtgtgtgggggtgatcagaaggggctacagagagaacgaagggacagatttggaatccagacccttcctggagggggaaggctaggagtgggcttctggaagcccagcccaaccttgggagccccagggcactcctgctaccccctctcccagggccctctgaagataagggcccagacctaagacgctttgtcaatacaacttggaccatcatgtgctatagaaattggaccttccacttccatttaccatttccaggtcccccacttcacctcagctcagcccagcacctgtatccataaaacagaagctcttgaagcaggccctcggcggcctttgtgtcgacatggcacactggcttttaaaatgctcctcattcagggcttcatttaacccctttgtgatggagtggaccactcagctcttagacaggccagctgcttcgttaggggctcaaccgaaaaaacagtctcctttccagattaaaaatgggctacatcgagcccgcggaaaggctgtctgttggttcatttttgactctatataattttggtcttgctcctggataggatgacccaaactagtggctgaactgggtcccctgactcctatgttgggccctttctgctccttcagagcctcctggtattcacagatgggaaaattgaggcaaaaggcccatagaagcatgcctgagtgctggtctcttgactttctctccgtgtggtgctgggaatctgagggtttctaagccttggagactcattcattcctcttaagcccaagagacagagctgcttgacctgttgttctcacatacagagctggatgtgagaacagcaggtcaagcagggggccaggggccacttggtcgcagcgtgcagcctccctgcctacttaacagtatccgcggcacttagagcagccagaagcctcattgttttcaatatagccctgaattttacaggtgacaaaatggagccctacaggggctggggtgagatgactcctaccctcagtcacacattcatttgaggggagctgggcccagaggctggaactttccttgccctgttcagtgtctgctccccatggcacagcacagggatgggggaggtcgagagggaacctcccactcaattcctggaccaccttgtaacactgaacagtctctttaggggctatgcactgctgggaagagagaagggcactttctagtggcttcccagaaagcaggagatggtgaaggggtgcactgatggcagggagggaggtggtgaggcccacaattgaccagtgaccactcagacatccagactggcacttgtcagagaaacgaggtggacactgtgtgtcccaggatgatggtattgggggctgggaggacaggggcatgagacccctgctgcctcaagtggggaggatgttcaggggaagcctcagtgttgacacccctgccccgctgcaaatatagccctttggttgatggtctttacccagggtggcagctggggcctcccaggcagacatgctcggcctgaaaaggccctttaaggagctttgcctgaaggaggaagggacagccactagaacgctccctcccctactccccaccagtgctggcaggtccagatccaagagcggggatatgacacaaaggctcctgagtatggacaaagcagggagccacgtttagtttctgtcccctgcagggccttggagagatcctgggatctgaagctccgtggggaccgacccccttaggaggagcatcctccttcaacagcctgggcccctgccaggtgggggctcttggcagctgcctggcttggcttttgtttgggtgtccctcctggctctgcaggcaaggcccaggccccccgagaccagcgtgggctcatcgccagcctcagactctgacgggactctaaaaggcaaacttcaccttccccagggctgctctctgctttagggtcccatagtgggcctctgttgcttggggggctttgggggtccaggggcttggggagggctgcagacggagagatgtttgtgcctccgccctctctgctcccctggcctgcacgtctgaacaccaccctcctgccctcatccagccacattctccttgtgttttatgatttttcctttcttaggtaaaataatcagagatcgtttcccagtttgggggcccagcaacagccacagaagaaatcagacttggggcttcctctggctctccctctctcttaagactgtggccagctcagggatctaagcttttcagattcctcacgtggctggggacagatcctatggccacgtccctgtgactttctccctggaacatccagagcagaccatggaaaacaggagatgtccaaaggcctatcttgctttaagcaaatctagtacataaaaatctgtattttcagagaaaaagtaatttttctcttttaaaaactgaacacgaaatctgggttaggagttgatggcctgtgttctgcccctggttattaggtatttttgcctgcgtaatttttttttttttcttttgagaaagaccaaaaaaaagcctcactctgtcgccaggctggagtgcagtggcgcgatctaggctcaccacaccctccacctcctgggttcaagcaattctcctgcttcagtctcctgggtagctgagactacaagtgtgcaacaccatgcccagctaatttttgtatttttagtagagatggggtttcaccatgttggccaggatggtctcagtctcgaccttgtgatctgcccacctcagcctcccaaagtgctgggattacaggcgtgagccactgcccccagctgctgtttaatattattactcacacccacatgcttccatttcttcactgtaaaacggggatgttgatacctgctttccatcaccaggtcaaagtggggacctgggacagatgggacagctcctcttggcagaatccactgtgggattgctttgcaatgtcagctcccttgatgcgttaaaatactccagtgttggattcaggctgggtgcggtggctcacgcctgtaatcccagcacttggggaggccaaggtgggcagatcacctgaggtcaggagttcgagaccagcctggccaacatggtaaaatgccttctctactaaaaatacaaaaattagctgggcgtggtggcacgcgcatgtaatcccagctactctggaaactgaggcaggagcattgcttgaaaccaggaggcagaggttgcagtgagctgagattgtgtcactgcattccagcctgggcgacagtgcaagcctctgtctcaaaaaaaaaaaaaaaaaaaaaaaaaattctagtgtttgattcaaagacaacctcatttacactcagcttttcatcagtctgccccttgtgtttggggaggcagactggtgtctggccaccctgattttcttcctggatttgttggcgggaatcttaaaaggcggccttgtcttgggctggtccccactgtgggttctagaatcaggatgggcagctcccctggtagtcagcctttgcagcctggctagggtgtggactgactctggaaaaccactagctgcatttcctagggggctccccgaggcctcagtacagctctgggatttcagcaattctctctagacagcctgtccccgccaacttcacctcctcctcacctcacctccctcatgtgaccagcctcccaagcccgctccatttctcccccactcagcccctgcctgcctttccccaagtgttttctaaaagatatttgatttcagtgaaagctgggccgacatccatgcaatatgctctcacttgctttgtgcttgttgggaaggtggagggctcctccggggattctgggtaattgtgttagtggccagctcatgtcaggaaattaaaaggaggccctgatcaggttcccactgcatgggatttaatggccttgtatttatagagtattctgcctctagcccatgccagaaatatcactttttttctggccctgtgaatgaagaaagagcatgagagatgacttgcctttaaaaattctttttcttttccaaaatatattagtgttttgaaacaaaccaactctttaccactttatagaatggtattgagctacagcctgagaatgccaatgtgtgttgcatccctttcgagccactttacattctacacacactgccccccccaacaccaccacccccccacacacgcacacacacacatacctgacagctcacaggatcttcccaggcaccctgaagcctttgggccactcagccacaatgacctctggttggagaagtgttgattgaatgaagacgcaggagatgatcttgtctgtgctaaatcgttcttactgttccctgcaggcttttggataacggtccggtggtcacgtaggcctggttaaacctcatcttcaccacttatcgactccttgggccagttacttaaacccctgtaagcctccctttcctcctccataaaatgggaatcataatagtgcctatcttcatcttgctcccaatcttcagggaaagctcctagagttatactgtgaagtctgattgttgattggagatagatattcttcatgtacaaaatggattttcttctgtgatccagaggcaattttgaatctcccgtagcctcactccctactcttgtaatcttgcttcacattttcatgaaaaaatagaaagtcaaatgggaaacatcttaccctcctaccattgaatccacaaacctaccagtttgtgcacctgttttctgccttcttcttggtagaatagaggtattcccaatcctgacaaacgctggtccccctcctgcccttctgtgctctgaatcgctctcttctttaccaaggacttcattcctttatttatttatttttctgagatggagtctcactctgttgcccaggctggagtgcagtggtgggatcttggctcactgcaacctctgcctcccaggttcaagcgattctcctgcctcaacttcccaagtagctgagattataggcatgcgccaccatgcccagctaagtttttgtatttttagtagagacagggtttcaccatgttggtcaggctgttcgtgaactcctgacctcaaatgatctgcccgcctcagcctccccaagtgctgggattgcaggagtgagctaccatgcccaaccccttaccaaggacttcattcctatagtattttttctgcttccagcatcatctaattctctctcactactggatcatttcattagcacacaagtatacttctgttctcccattatgaagacaaaattaaatttattttttaacttttaaaaaatgttaaaaaaaattttttcacattaaaaaaaagagacaggctggtctcaaactcttgggctcaagcaatcaacccaccttagcccctcaaaatgctgggatgacaggggtgggtcaccacgcccagccaaaaacaaaattaaatttaaaaaaatccacaactatattttgtcccttcatctccatctagatattgctacctgatcctactgtctttctcaacaaaacctccaaaaggaatgacagcacttgctatgttcatttcttgtcccattcacccctttctttaaaaaaacttctttaaaaagtaaacattgaatagatccagaaatacacttataatatagtacattaggtaaagactaggctgtgttttttgtttttgttttgttttttgtttttttgtttttgttttttgagacagagtcttgctctgtcacccaggctggagtgcaatggcacaatcttggctcactgcaacccctgcctcccaggttcaaaagattctcctgccttggcctcctgagtagctgctattacaggcatgcatcaccacgcctggttaattttttgtaattttagtagagatggggtttcaccatgttggcccaggctagtcttgaactcctgacctcaggtgatccacctgccttggcctcccaaagtgttaggattataggcatgagccaccgctccaggccacgctaggcttctaaaagaaggagactccctttttccctccacaaaccaaaccaaaccccaaaaccacccagaagcctaagcaggatagcggtttcattcccgctcatttcttacataacagtcagaaggtcacaggcaatcccagactggctggcagctctgccaagcttagcatgtggcttgcccttgtggaccccagttcttcccatctcacagacatctagaaggaggaaaagctccatgtgaagggctggaccctaagtagcacacatctgttcttcccactcacagcccagggccacacttttctgccagggagtcttggaattgtagccattatctgggacgctgtgtacccagctaaaacgttgttggtatggaaaaagggaatgacatattttcaaatacaagtattgtttttttgtggggattttgttattgttgctgtttttaaagagacaaggtattgctctgtggcccaggctggagtgcagtgacatgatcatagctcactgtaacctcaaactattgggctcaagagatcctccccacctcagcctcctaagtagctggtctacaggcatgtgccaacatgtggggctaatttaaaaaaatttttttgtagagacaaacgtcttgcttatattgctcaggctggtctcgaacccctggcataaagcaaccctcctgcttcagcctcccaaattcttccctagatattttagacctgaatatctaaccaccctattggcattgccacttgtgtcctttatgagacatcacagattaaacatgtctagagaggaactctaggtttgaaccattcctccttctaccgcttccagtctttcccatctcaggaatggtgatgctagtcacctattgctcaaaagaaacctggaggtcatccttgactcctcccaggtcaatgtccaaagtgtattttagattctcctacttttcttcatctccatggtcatgaccctggtccaaggaagcattgttttttcctggaccactgtgacagtttcctaactggacttctgattccactcttagtcctgtttaatccccctagcagtgatcttgttaaagcactggtaagattctgtcattttgctttacatcaatcagtggctctccatagcacttaaaatacaatccaaacactttgctttggtcttcgagaccttgcgtggtctacccactccctacctcttcagtatcatctcataccattcctttcctgtctgttcactcctacccactctgctccagcctccctggcttatttttgaccctcaagcatgacaaactgtttcccatcttaggactttcagggccttccctctgcctggaatcctctccccaaagctggctccttcttatccttccgacctcaagttaaatgttatcttctcagaaaggcctccctatccactctattacttgctatcatatccccttgtatgcttcttcattgaacttctttcagtctgacattatcttatttatttatttgtttatttgcagacgtgtttgcactggctgcctctaacacagttgttcttaattcaggctccaggatggcaagttgcctttagttgcactcagctggagtgcatgattgaaaggcttcttaggcagtgtctgggatcagcaggtaagagtgccatgattgattagcaatgtctgccacagactaagaaatggaaggcaggggcacaggtgataagtctttgccatgcctgatctggtcaactgagtttcagcgatttgaccaaggccagacagctagttaatgacagagctgggtggaatctagtctccttggctatgtggaattccttctaagaagcctattcgaacctcacggttgatgccttggccagtagtgaagcctgtagccctttctcaaaggggaaaaaagaaaggaaaggaaagggaagctgggctgaaataacttctctgtgtcaggcgtacagttttggagacttcttggcagttgggaatgcaggcgtaacatagttttgtcaaaatgcccttggggacatggtggcatggtaagaagtgtctagaggagcccagcatgatagcagacactcctttaataggcagaattctgagagctcatcactcactaccacttatccaccgcagtgcccggagcccacagagcagctggcaaaagccccggaatattaggtgtcatgtatgtctgtttagctacaaggctctctctctcttagcttttaggaagtcaggtgtgaggcactctgcctttacggtgtgtcactggggtaagaggcagcccaaatgagccattgtgtctgaggcagcaaggcaagcttgcctgtcacccagaaacccgcacaggacaggtggctgaaggaagtccagtgtatacaagggttgtggctgagagttcagggcatcgcactgggctggaatgcccatcagcatgcccacacaacttccagaacctcaggggctcatgatacccacatcaccttctgggtggttttctcctcctcctggagatgggtcagctatagtttggtagaacctacaggcagggagttcacccccaagtttcctgggaagaacactggccacataaaagtattgaaaaaacaggtttagcacagtgctccccagacctggcacataattagaattagtagaggagctttggaaaaatactcattcctcaacatctcccttgacctactgactcagagcctctaaatgagtaagtcctcaaagtctgtgctgttcaaaggcttcctagggcattctgaggttatatgggactggcgtcacaagtttagggcaaagaagataggacttggagatctgaaaatcaaggttcaaaatttccctgtgacgtttcttggctgtgtgatcctgagcgagtcgcctgacctttctgagcttcagatcttgcatggaactaatcataatcatgtatattcttcctcctcaacattgttgggcagcttaaatgagatacgggtatgaaatagatttgtaaaccatgaagctgcttatttcgttaataaaccagggatgttgaatttggtgatgggggaaagttctggataaggggaagagaagggtgttggtcatgaaaaccttgcaatgccagtggggatcttgacctcagacctggatagtagctggtgggagggcagaggcctttcccccgcctgccctgtctgaacctttcctgttggaagagaaatatgatgtgggaagcgcctgggacaggcttagggccaggtgcagggccacgctttgcagagctttagccagctatttttagtgcccgggtataaaagaaagaagcttaaagtggccccgctgtggctgaccctgcacactcggctatttttacttccgaaagactgggatcttgtccagcttaggcagggaagatgagaagaaaggagggaggtggagggaagaaggaattattttacttccattaagaaaaatgtcagaagcctgatcttatcaagtcagcaagtgggtatccaatcccggatgtgtaaggtgccggctgtggacgctgtgacgtgcctgcagtggattggagaggccagcagagggggagccccgctcccctcctctcaaggagtttctgtcccagagtggccccgaagcttctttgctatttttttgtgccctgagctgggaagtgggcttggccaccacaggcacgaggggcaccagcctggtgacgaggccggtggaggtgggagcagttatgactgcagccaagggtggaacctctgttctcaagttggacaaaggcagccatcagacccgctggcatattccagagagtcccagtgttggggctgtgtgccctgggcacaatatttaacctctctgaaccttaatttcttcagggattttgtttaatacatgtgactgacagtagttacaactgtggggatgtgtttctctcttccatgaggaaggcagttcaagctagactctatgactttcaacaggcagatgaaaggcaagaagttactactgagtgcctactgtgtaccaagcactctgttacgtttcaatattttatgttgttaattccactaacctgagaaaggatacatattttttaaaaattttaacagctttattgaaatatagttcacccatttaaagtatacagtttgatagcgttttgtattcctatatttgtaaattgtggcaaaatatatgtcaagtacaacttggcattttagaaattaagtgtacaattcagtgacatcaaacacattcacaatattatgcaatcaccggccatgtactgtggctcatgcctgtaatcccagtatttcgggaggctgaagagggtggattgcttaagctcaggagtttgagactagcctggccaacatggtgaaaccctatctctacaaaatataaaaaaattggccaggtgtggtggcatgtacccataatcccagctattcaggaggccgaggcaggaggatcacttgagtccaggatcgtgccactgcactctagcctgggtgacaaactgcgaccgtctcaaacaaaacaaaacaaaacaaaacaaaacaaaccattatgtaatcaccatcagaccaggagttcaagtccagcctgggcaacatagtgagatcccccatctaccaaaaaaaaaaagaaaggagggggccaggcacagtggttcatacctgtaatcccagcactttgggaggctgaggcagaaggatcgcttgaggtcaggagttcgagaccagcctgggcaacatagtgagacccccatctttgcaaaaaaaatttttaaaaattatctgggtgtcatggcatgtgcctatggtcccagctacatgggaggctgaggtggaaagatctcttgaagctgggaggtcaaggatgcagagagccaccctggcctatagagtgagaccctgtgtcttaaaaaaaaatggggtgtggtggtgtacacttgtagtcccagctcctggagaggctgaggcaggaggatcactggaacccagtagtttgaggttgcagcgagctgtgatggactcactgcactgcagcctgggcaacagagcaagaccttgcctcgaaaaaaaaaaaaaaagaaagaaagaaaaagtggaatcacataatatttgtcctttggtgtccttttggtttattttccttagcgtagtgtttttaaagtgcattcatgttatagcatatatcagaactttattcctttctatgactaagtaacatttcatgtatataccacatttgcttctccactcatctgtccacggacacttgggttgtttccaccttttggccattgtgattatgctgcagtgaacattgtcctacaggcgtctgttcagattccttctttttattttttaaaaatttgcttcttttccccacactacacagatgtatgttcagattcctcttttcagtttttttgggggtgtatacctaagagtgggattgctgaatcatatggtaattctgtttagctttttgaggaaccatcaaactatgttctacatggttacaccattttacttttccagcagcattgttttttaagtttttaattaaacttcttattttgagataattgcagattcacatgcagttgtaagaaataatacagagagatgtcatgcatcgcttacccagtttcccctaatggtaacatcttaaaaaactacagtacaatatcacaaccaggatattgacattgatacagtcaattgacattgatatggtcaagatgcagaaaatctttaagagtgaagtgggttttttttttttattaatttttttttagatggagtctcactctattgcccaggctggagtgaaatggcgtgatctcagctcaagctctccatctgcacagggtcatgtattccagggattatcaatttttttctattcatggagcactcagaaatattaaaattttgacctgtacacattaagggattaaatggtgttaatggtggttaaaacaaaggatctgtatttattgcagtatttggaaatatgtgacactttacatttgagcattattaatgcttttttgcattcagaaaagtatcaataagatgataaaatctaataatcctagacagtaattgtaagttaattagtattttaatgtgtttcctgagtctacttttagatattttactaatataaggacacaaacaataaggcaactctcatttcaagttcaagtcttcttgtttatttccagttagtgtttgtaagtcttaagcatcctaattttaaaagtaattgcccattgtatcagtcagtgaaaattgctttctgctgcaagttacggagaacctgatagctagcagcgtaagcatggataaatgaagttggtttttccaccttacaagaagcctggagatgcgcagctgctgtattgcacaaagttctcagccatggcggcaggggcgctccagctctttctttcttctctggtgttctttggtgtcctcagacagccatgtcatggctgcaaggtcgttgccacacctgtaggcttcaccttccaggctggggcaagagaaaggcaaaagagctgcactgaacatggctgtcccttttctcagaaaagcaaaaccgttccagaagtcccgccacggacttaacctgacatcccattgccgtggtggcacgcacctgtggtcccagctactcgagaggctgaggcatgagaatggcttgaacctgggaggtggaggttgcagtgagccgagatcacaccactgcagtccagcctgggccacagagtgagagtctgtctcaaaaacagtaaaaaaaggagaaggccgcttcacttaggtgggggtccatcttccccaaccccaggctaggggtgcacaggtctgtgtcacaggaccctcccactctaaatggcctttagcaagccctgagtgtgaggcagtgccagagcaggggagaaatagagcaagcctgggtcctgtcctctaagaacccattgaatcaaagagctgatgggtgtaaagggaaaccagcatgaggtggcctgtgaggtatcagatgaatgttgaagtgctatggcttggcaggagggtggtagaagagatggcctcacccagcctactggaactgctttccagcttaccaagcattttctcatcattaagtcatacaattgtcacaaaagcgatccatcttgagcagagttggttttaccatcgctccccagacctgaagatgcagctgaagcccacttgtccaaggccaaataacctgaaataacccgtaagggacagagatgggtgtgggaccttcattatcgagcccatgggctgcagtgattatgggctgtgcttagggcaggctcagaaaagcagacaggaagcaaggggaacagacacatttcacatcagctgtcagtttgtgcataattaaacccaacaggctactttttttttttaacagcataacctgataattgatacacgtattgattggagccattgaccactatgctgtaaagatcaggaggagaaaatttagaggagaatttaacatttgctgtgccctgggaggtcataccatggaatggcaaagagctcgggtcttttattggggaaattactgaatctctctgagcctcagtttttcttatttgtaaaatgaggataatagcacctgccttatatttttgtgggttaagtagggtaatacatacagacagtcctttacaaattatgctgttatcattatcattattaatgtgatttaccaaaagcttggatgcaatgctggggaacagtaataataaggatgatgataataaccataataatcccattttctaagcacatggtgcatcttgggtaccatgacagactttggggcaggactgtgagccacccctggccttaacgggcgcctagtcagtaagggaagcccagtgtgctctgggagcccatgaagaagcccccagcccggcatggggatgaggaggacagaggtacatccacccctgtattcatcaagtctttcctgaacatccatgaaaggtcaggccctatatcaggacgcagaacatcccagatggagacatcggcagaggtggtggctgcccatctccttgccttaccaagggacagacacctctttttattttgtgttgagcatgcctcactctgattgacagttgcttgctgggaagcaggctggatgggaagcgagagttcattccagtggcgtctaggagagaaggtcagtaaagtggggaaggggcttgtcctggactcaaggagagtatatgtttaagatcctggcatatagtaggtgctcagtaagtgggggctcttactgtctcttatggatgaggtggaccgttttcactttcggtcctgtcaccattccaaggggaagcagagcttggtggagggtttggtttggcctggatatagtgagcagaggaggcttctatgtagacatgtcacaggatagagtcagaaagcttttctagacagggaacgtttcccaaaagacttttacaggaagaatcatccttcctgtgtttgtgtctgctccttatgctgtcactgaaggggcttgcagggggtgagggagcaaatgtgagccaaagtgctagcagcacataggttcaggtctggagctggatggcatctagctgtccctttagggtccaaggtacaggcagaagttgatggtacagctgcgtttgctaggatgccttagtgcagtgctcctcaaactctgttgtccgtgcaaatcaccttgtcagattcctctgtggccaggcctgagattttgaagcatctaacaagcctcaaatgatggtgatgatgctggcctgcagaccacacttgaggaggaaaacagcggagacggctcctgcccacacctactcagcattgtctgtgtgtgtgtgtacgtgtgcatgcgtgcgtgcgtgcgtgtgtgtgtgtgtgctgatctgacgcctaggctttctttggccaccagagtctgctcagcctggacctgggaggcaggcaagaagcgccaaagcagccggtagctgggagcctcagttgcccacagcagtactgtcctcaggaacacatttgttattggctttcttccctccttggaaactgctcgcatgcacagccttgtctcagattctgctcctggagaagtcaacaacaaatgtcagttacaaaacctgatcttctaggcagaaggggagtttattggaagcctatcagaaggctcaaagagtacatttagaacccagacaagaaccaggagaatccctggagagcccaggagcaggaaacccagcagccaggacatactggccaggggctgtctacactctgctggggaggcgctgctggtctgatcagtcctcaccttcgctctgtccttgtgcctccgtttgatggtgcacttggctgagcctgtgtcacgggtccatgccttgacctccagagagcagagagaaggagaatatgtacttctcagatatccattgaggggtggggcacagacttccaacaatttccatatcccaataggggaattccatttttaaaaattttttaatattttcctttgagatggagtctcactctgttactcaggctggagtgcagtggtgcaatctcggctcactgcaacttccacctcccgggttcaagcgatccttgtgcctcagccacccgagtagctggaattacaggcacgtgccaccacacctggctaatttttgtatttttggtagagatggggtttcgccatggtggctaggctgatcttgaactcctgacctcaagggatccatccgctacggcctcccaaagtgctgggattacaggggtgagccaccgcgcctgaccaggggaattacctttaaacaggaagcctgggtgggctgctgagtagactccccctctccccgactaaaaaacatttagcaccaggtacaaatacaccaggttgtggggttgaaaaagacattgctgacaaaaatgaggagttgtgggctcactcagtgaactcacagcacccttgccctccagggctggagtcctgaactgaaaacacctggggcagcagaggggtggggggtagtgtccttagcatcccaaagttcctttagggcaatgcgcacttaaaggagttttctccactcattcagtaaacaaagtaattttgctttcagttgctctaggaaacttcctccttctcagggactgaaatttagtagctgaacatcctaacaaagaaacagccagaaaatagccccaggcatgaatgggctctaaatcatcattccattaagtaaccattgttctgacttccccttgcctgttctggagaaaggcccgaatccgggggactggcagccaacactctggggctgaaggatggacaaggctgggacaggaaggaagattctgtttcttctgctccccatctaggaagtaccagagtttattagaaaagggaaagacagggccctgaaggtcaactgactgaggctccgtgagggtgatactcactgcctttggggaaaagaacagaagttgaacctggcctgtcgcagcagaggctgaggtggcaacccagctttcttctctgaggactctggtctccgtgtctgacttcttgtgtgtttcagtcaaggcccatttcatgatcaggaaaagggagctgttcagtgagctcaaggtaaggactccaagaaggaacgttgtctgaggctggcctggaagagccacagcaagaaggcagaagtggcttccaggccccacagggccccagcagcatgcttggggcacctgctctctggtgctttttgtgttggttcatactttgtaaccaatttgttgggattcatccttgcaggccaggccacattagtgggtagccagtctgagctgtgtgtccacctgaggccctgtgccttcgatctgctggtggggggcatgaaatggtaccaatgtgtctgtccaggcagcaggagctgtgggtgaggcaggcttccggaaggcaagttggattcagtgacaatgacagatctctccagggtaaactctcactcctggaagtggctgtctacgtggagtagccacagctgcttttgaacctactttcaagatatttccaggcactgattttccagtccagaggtggccagtccaactgttgcattcccatcccctggggacttgtgtaaagacagactctaaagctttatgctagaacctcagagagtggggtctagaaattgacatttgtaatgagtgcctcctcagatgcttcttgtgtgaaaagtctgaaaacccttgaagtgcctgtgaatgaccgggattcctttcttttgttggcaagttaacttaaccctccctggattcaaagcagatctaacatagtatgacttcttccgccaacacttggtagagtgcctttgttgacataaggagaaccaagggctgagggttgcttgggatgaatttcagaaggatgctgaatccagagagacaggaccaggcctggggcaacgggatgcgccgttactgttagacaattattttaggattgtccagccacctggcctgaggctggccgtggggcagctgtcgaaggtcatccgagcaaggccctgaaggacccagccagtgctgaaattccaaagtcagtgcttctaccctggtgatgttgaacaactgctgagatcttttccctttcctccccaataggtgtgcgccttgatcgagtgcgtggaggccgtcagaaatacaagcgacggctggactcagagagcagcccatacctgagcttacaaatttctccacctgctaaaaagccatgtgagtgtcagggcagtccctgccccttttgccagcatctgtacctggaacatcaggcatcccttagggaaacgtcatcttcccaccactgggtcatgagacaatgtggatcttggggaggtgacatcagtgcctggcacatttagaacgtggctccaaatgaagcatggtcctgacaagccacaggccccaatgtccagaacatgctccccttgccacccacccaaagttgctctgcaggttgctcctggagaattcatcaggcaacttcccttggagggatatttctcaacagcccagatcaccactaccagcaacttcatggagccagaacaggaggggagattatagccgctttgaccttcctggagctcttaggaacccaactttgcttcccgacccatctgagcctccaccccggcccctttcctcttttcccagcgtttacctttccctctttggttgttgcagtgaccaagattgtctcatacctactggtggccgagccggacaagctctatgccatgcctccccccggtatgcctgagggggacatcaaggccctgaccactctctgtgacctggcagaccgagagcttgtggtcatcattggctgggccaagcacatcccaggtgagcatgtgggaccaggggagagtgtggccagggactctcagccggtatctccgcagcctacccaatggctgtgcttctgatgcccggatcctggaccccagaaggcctgtgaaatcctggcaggcctgtttctctgagctcctcttctctccttgtagcattggagaggaacaggtagttagaagacccagtgaggcttatacactgctgcaggctcttcagaattagttatcattcgaggcggggccatgtttggatctacaatcagtgtaatattcaaagaacaagttccttgagcccttaaaagggcaaagagtagggttttcttgtagaccttattggaaggatgccggaaaacaacagaagaaagactgaccctctcttcctattggaggcagcagaatggagcagtgaagagcatgggcttgggaatcagatcgggattccaattctgggtctgcagcttactagctgagtaaccctaggtaggccacctgacctctctgtcaaatgggaatacaagagtcccccactttgtgagctttgatgtgagcatgaaatgagatcctgtgtgtgaagtgttcggcacagtgtctggcatgtgctggcatcagttgcatgcccactattgccatttgcctgatctctaagggaggcctgtctctggattggcttctgagattttaagggcctttctggtgcggaaagtgtgtgttacatgtttcaggctgtgtggacttctcttcgctgtgtgtggacccaaaccctgctttcagcctctctaggtctgggcagatggcgggagtttttttatttttgtagacaccaacacccatgtattctacattacatacacattgggggcctttctctgtgcaatttattcctcaactcctttaagactctaataagttgactcagagtgtggtagaaacatccttttatccttctggtaatgacccaccatgaacatgggacaagtcagcttcctgtctgtagatccgtttttggtttgtcatggctctgaaaggtgattacagcagacgatacagcaaaggtgacctagactttagatagcaagacccacaattgtttgtttgtttgttttttgagacagagtcttcctctgttacccaggctggagtgcaatgacgcgatcttggctcactgcaaccttcgcctcccaggttcaagtgattctcaggcctcagcctcccgagtagctgggattacaggtgcccgccaccacacccagctaatttttttgtatttttagtagagacggggttttgccatgttggccaagctagtctcgaactcctgacctcaagtgatctgcgcacctcggcctcccaaagtgctgggattataggcaagagccaccatgtctggcccaaggcccacagttgattgagggaataaaaaatgtccttccatgtgagaccttacatgcccaagttgcaggaaggagccttcccgtggacagggacgcacagagacatcagatggcccagaggctctgctggcagggactgcctggtggcccctgggcattctgaccagggatctgggctggtacgcccttactaaggagctcaacctctcggggattacacactcagtagtttttgaatctgcccagtgctggttcagcacagatgtggggtcaggccactgcttaagacacttcagcctggattgctccactaacccagggccaaattgggtacgggtacccctgcccccgccccacactcctgttccaggttgaacagatcctgcatcctagcaatggctcacgagtggcgcctggcggtcccctgggtcaatgcttccttcttccacaaccccacccctgcaacaccacggaggaagtagataagaccaggagaccctgtctcccctgcactcatttttctctgtgcctttccacctcccagctccatctcccatctgtgcccaaccaagagggcagggctagagcagagtgagtgctaaaggcatagactttggaatcaggcagcctgggctttcatctcagctctgtccttactggccttgtgcaagatgctgaatttttcggagcttcagtgtccttgtctgtaaaatgggaatcacgataaagctccttcacgggattgccgtgaggatgcagcgagcttagtgtgtacactgggtgaatggcagagacgcttaccagggctgttgtagttgctaatagtaataaaagcctcctttcatggcttaatttatccttgtccaaagccggattctttttggtaaaaaaataaaataaaataaaaacaggggctcagttgtccatcttaaatgctaatttgcctattttgcataaatctgcatgctgaattctttgcctcctgaccttccagtgtttaaggtaaaattaattagtggagtctcctgccactgcatgtagactcatactaagggcaatgacacaatcaaatgcctgattttttttttttttgagatagagtctccgctctcttgcctaggctggagtgcagtggtgcgatctcggctcactgcaatctcctcctaggttcaagtgattctcttgcctcagccttccaagtagctgggactacaggcacgtgccaccacccctggctaatttttttttctatttttagtaaagatggggtttcaccatgttggccaggctggtctcaaactcctgacctcaagggatccacccgcctcagcctcccaaagtgctgggattataggtgtgagccaccgtgcctggccaggtgcctgatatttttaaactaatcaacttaatcccatctcagattagatggaaaatgcatctgaagatgggctccctctccctgaaagagagagagagagaaagaaagagagagagagagagctggttgagtagggaggataaaagctggggcccaccctggggcctgtgttggctccagtccatctagttcctgcacagacagaaagagggggactggccactgcaggctgctcaggagtagagctctgaagaatttaggccactgtccttaaacgcaaggtaccgcatctcacgagagggcattgcacacttagctttgcatgcacatattgagaagtcactacacatgaggtcccctgataggagttgtggctgagacaaggaatttattttgccccaaggatcccatttggaacaaggctgacatccagggggaacttggttcactcagaatctcagccattgttcaagtcagtctgacattgtcctaccccaaatgcaggttttttaccttgagttgaatgttccaagtattgggttccccatagggcaagcccaagtcttcagagtgtccacttcttattccatgagatcaagagctagcagactttaataggcagtggggaattacttgatgaattgcagcctcctccaaatgacccgagcctgccatcctgcctccctcggcagcctcatgcctgtgccagccaggaaagcctgcccagggagtttccaccaccctgtcctgcccaggctcccatgtgcagggcatccccagaggcctcctcacaaaagtccctcagcggcgctgctcccaggtagcccccgtctgactcaatgaaatatgagctgccgagtgacagcagctgtgtctgaagtggccccagatcctataattacatctccctttattacctctgctaatggccctccaggtcgacagaaacgatcataaattaacagattatgaactccacttgccacaaattacgtgctttttttttttttccttcaattctaggagcttgtggtgccaaatcacggatggggggatggggagcttggggagagcctgaatgttattagatgagttggtgcagataaaacaattttcctggggcagcagagctccaagtgggagcatgaggagccaggagctctgggcaggcccgagagccttgagggggcagtgccgcctgcagtgagcccggcacagggacacccctgcactcccaggggcacggggcatccccagaccctcccggtagcctcttcaggggccttttggtcccagagttactaataacttgagaatgagacccagcccagctgagagaggcaggggtggaaggcgctttactgaagggcagagaggagtgcctgggctccttctgggttttaaataaaagaatctgtggttttagtaaagacatcagatgggaccaatgggtcgaaattaagagctccaaattccccatcctaaccttccttctgggaatttcctgggcagatacaaccactgtgtgaggtgtgtgtgtggatgggggttgtgtatgtcccccagtccatggcgcttataccataacactgctttacacctgctttttccatttaattatacaaaatagtagcacttacctggcaaagcagggttctaagtgttccacatgtcagctcatttattctgaaccccatgaggtgagtgctgttacgatttccattttacagaagaggaaaccgaggcactgagaggcagacttgccagggtcacagctagtgaacagcagagttaggaatctgatctctgtgctcatacgattacaccctttttgcccccttgggtgtctttccacgtccacacagagttctaacttatttggcacattcatttaactaaaaattacatctatataataatcacatgtattacattagttacctttttttttttctattttgaatcatttcaagcagtgatctaatacccttttacatttatctctatgtctttattcatacttttctttctaggataaatttctttttttttctttttgagccaggatctcgctttgtcacccaggctggaatgcagtggcgtgatcttggctcactggagctttgaccacctgggttcaagcgatcctcctgctgtagcctcccaagtagcagagatcacaggcatgcaccaccatgtccggctaatttttaaattatttgtagagatggggttttgccatgttgcccaggctggcattacactcctgggctcatgtgatcctcccacctcagcccccaaagttctgggattacaggcgtgagccaccgtgcctggccactaggagaaatttctagcagtagaattgctaggttgaagggagcaggccttttattttatttttaatttaattatatttatgacttacttttatttttaagcatcttaagcactgactgggttcagaagccaaatgtagacacaaacgtatgtaacagaagtctcacctctatccctgtcccctcccattctgacctcctagaagtcaccactttttctttctcaattttccttctggtgtttctttttgcaaatactagaaaagatttgaactatttcagatgttaaaagatgtcaaatatctccccctcccttccttgcacaaaatgaagaaggctctatcaccattcagcgccttggagtatacctttggattatcacagctattttcagggctttttgaaaatgttcagggaggaagagagtgatcaggggctgagtccagaactcgaagcagcctatcagaggtttgggaacaggcctcccgggtacatcctcccatggcagcacaaaactttccaagtccagtctccctcccaccacccaagggcagggcctgactcctacaagataggcaaaggcagctaaccctgaacctgagtccaaagatcttagagggtctaaccaagtactgtgggcatattttcttgtctcctgggagtcaaagcctgtggcatttgtccattctgtctctccttttagctgcaaagttttgtcgggcagcttctttgctgtgcccagtcgtgggggtaggggaaggaacagctcagtgactgtgcaccctgggaactcagagctgggatgggccatccaggggcacctgggcatgtgcctcatcaaaggtgccctcaccaccccgcttgacagctcagccctcaaggctccccttccacaaagcctccccagactcttgtttggaccaccttccccagtgcgtgctctcagagccctgcatttgctgtagctcttcttatattgcaactttgtgctgatttgtgccccttggtgtgtgtcttccccttcactgtaaaccgttgaaggcagggagcagttctggactgagcacaccattctgtccccggtgcctagcacaggcctggcacttagtaggtgctctgtaagtttttgctgaatgtctcaaagggcagaaaagcattctagtaacatcctaatgattgtacctgcaggatccactgcacaggggacttttcccctgcgtttccagaagcctagtccttacctcatcctctctctccaccaccttccaattcagttgtctgctaatttcgcccctgccctcctcctccatctcccctccagtctgtctgcttttagactccctccctagagctgtccaacactccccccaacacactctccggtgctggctgattggtatctgttaattaatgttgcccaaggcctctctcctactcaaagacctgataagggaaattggatgtccatttctatctatcttttattacctcccagctcccccggccaccacaggcagccacacaccctctcccatgcagggaatctggacaacccccccccacacacacacacacacacacaccctgatcccctgtcacagcctctcccctgagaaggtgcatcaatcaaagctcccccgtgtcagtcggtgtaatcactcctgctcttttgttgatcacccatggattccgttagccagtggtgatctgaggcccaagttgtatagatcagtcttgggaactgtgataattcacttggagaatgctcacagggtaagggtggtagggtggtctgcctggtcagggaccttcagctccaggagtgacccctaaggttcaactgccatgccctgtgtggaagccagggaagaagcggcatttggagacaggacagcagatggatgggggagccacacaagccaaagagctgggtggtccagaagctcaggaccccccaggcctccaggcaagtccagagaggagaagtgagtgatgccaatggtgtgccaacaacaacaacaatattaatagtaacaacagccacagccatcaccagcaccctagcatgttgagtgctgatggcgccgggagaggtgcccagcactttacatgcatcttctcttttcgcccccacagcaccccacatcagaaagtggcttccagccaaggatggggtctaagtcagcaaatgaagtagaaagtccttcctaggcaaaattacccctgaaaaaaatcccttcatgtcagttacccatagtgcatggtgcaaacaactttgtggatgcccttctttctttgaataaatccagcatgtccatgttagaaccaatcactgagtttctgtttgaatctccagtgaagttactgccttgtgtttggtggttaagatgcttgaaaatcagctgacttatttatttacttactctctcttactctcctataaatcaagatgttaattgactttgcctaatttaagtgcatgtataatgcaattccagtacattatcattgttctgcagtgagaactttcatctcatcattagtaataatagctcagtaaatactttgtatgttctggaatcatcgtctcatttagacctcacagcaactctctgaagtagaccctactattatactatttcctagatgaggaagctaaggtttggagaagttgcatggttttcacaagttcagcctacagctagtaagtgggagtcagggttcaacccaggcaatccccacagctcattgggcaagacagtgtcacaattctggagccttctccatgcccaactttattttcactgtggaatcagcctcctcaatagcaggcaggggggaactagcatgattccaagctcccagaacaggcctgctgggtcatcgttaagcaaagagtgatggcccgggaagaggggctctgaccctgggagaacaggctgtcctgtgagaaagtgcccctgaccccgggggctcttgatctcttagcagccccaggctgtggtcactggggccttcccctgtggctttgaacagctgcgtcctcattcttggtcaggcctgtgggtctctgcacagctgagactgcatcaaggatcaggtgtcattttcaaacaccaaagcctcccctggtttgagcagagagtgggccctggaaactccccagagtggccgagagcacgtactgctgcctcctggttccagtatgtactcagtcactcctttaactacaaatgcattgaattaatcaaaaagcctctacagacgtttggaaaataccatagagctaacaatcataatgataacaacaactgtcaacattgactgagctctcgttttgtaagtcttttccgtgaattccaagtctgaggcattccccaaggggaggacagtgagtcttacactacacagggaaagcctgggggcaggatccaggggtgccagggacaccccgcaaccagccacgccctgcaacctctgcccccagcaagccccagggaggcccctggtccgccctcctgacctgctgctgccctctgtgccccctcttcctgcaggcttctcaaacctctccctgggggaccagatgagcctgctgcagagtgcctggatggaaatcctcatcctgggcatcgtgtaccgctcgctgccctacgacgacaagctggtgtacgctgaggactacatcatggatgaggagcactcccgcctcgcggggctgctggagctctaccgggccatcctgcagctggtacgcaggtacaagaagctcaaggtggagaaggaggagtttgtgacgctcaaggccctggccctcgccaactccggtaagggtggcggcggggcctggaaggggagcttctagggctctgcatgggcctaatgagcccatccctggggcctgtgggcagggctggctgccatggatagagatgaaaggaaaacactgaaactttttattactgaagattgtccaaggggtggcctgcagataaaaagctggtgatgaaggctgacactggctgagcatttcctaagcctcagacatccagactggcacactggctaaggacatgggttctgaggccacattgctaaggagcaaatcccacgtctaccaactgggcaagttgcttcactctgtgcctcagtttcttcatcagtaaaaggagggcagccaaacagtccctactctacaaggctattgacaggatttctttatacataattatattgcttgcaacatgcttggcacataaaaagcactcaattatttatttatttgtttattatagacgggatcttgttctgtcgcccaggtaggagtgctgtggcttgatcctagctcactgcagtctcaaacttttgggctcaagccatcctcccacctcagcctcctgagtagctggaactacaggcatgtgccattattccagctaattcttatttctattttttattgagatagggtctcactatgttgcccaggttggtcccaaactcctgggctcaagcaatcctctcacctcagcctcccaaagtgttggcactacaggtatgagccaccatgctcagcgtcaacttattaaattagctaggagtttactgaattcttacaaacaacccaagagtaaaattcttattgttgcaaccccattttacagatgtggaaactgagacctggaaaagtaaagaaaatcacccagggtcacacagttaaaatgtgtcagagttaagagtcaaaccaaggtcctctgattccaaaatcaacctgaacctatacccactccttgaatctttcagtcaaatttcttgaacacaggaggataaaaccttcccaactgagtggtttaagctggagttacaaaggaggactcactccatttcattagcatccaccaacttctggctagattatctgaggagagaggcaggcgttgggtaatgccagtaagtgaacttgaatgtaaccaacatccacacttagagagcttccacactattcagggaatggtgctgggtgccagggggctgcaggagaaggataaatacagggtaccctccctaaagagaacacatgccaggaatcacacacatgattctgctgcagagcagtgtgtggcagagttaaccgcccaggtctgggtcagatagacccaagttcaaattctatctctgacacttcctagcagtatgaccttgggtaattcagtgtccttgtgtgttcagtggggatattctgagcacctcttccaagcactttttttttttttttttttttgagacagagtctcgctctgtggcccgggctggcgtgcagcgatgcaatctcggctcactgcaacctctgcctcccgggttcaagcgattctcgtgtctcagccttccgagtagctgggactacatgcgtgcaccaccacacccagctaatttttgtatttttagtagagacggggtttcgctatgttgcccaggctggtctcaaactcctggcctcaagtgatccacccgccttggcctcccaaagtgaggggattacaggtgtgagccaccacgcccagccccaagtgcttttgtgagtattaaagatcgactgacaataaagcactcagcctggtgcctggcctagaggaaatgttcaataaatattaattattatcattattattaatgatagaggatacaaagtgctattagcatatggaaaagggagaactggctcccagatgcagacagtacacacagggtaaccaactggtttgctcaatactgtcctgcttttactgaaagtcccatatcccaggaaactcgtcagtccctggcaaactgggacagttggttgccctagcacatggcttcatggcgcatgcagggggtgctgttgatgacccacttggatcccttttactgggttagtgcatccatcccccagctgctaacagttcagaggtacccctttgcagggcctaccctcctctgccttgcccagagggttatgtggccctttccttggcaccaccaggcaatggtggacccacatgggtacaaaagttcggatcagagccctgcatgggatcaggctgaagccgaggtcccatctttgccttgctttctccttccctgtgcttcctgcctccccacttcctttctcctgaacacatgccctccgtaaatgtctgtacctaaacccttgcctcaggctctgctcccagggaacctgatctaacacagaaaaggatgccacttttttagttcaaatcttttattaataataaatgaatgcaaaataatattaaaaattttacatacgtccacagagaatatttacacattgaattccaaaattgtagtgcattctttgttagagaatcctaatgctgtttttttaaagtatagttttagatttacagaataactttttttttttttttttgagacagaattttgctcttgttgcccaggctggagtgcagtggtgcaatctcagcccactgcaacctccgcctcctgggttcaagtgattctcttgcctcagcctccttagtagctgggattacaggcgcctgccaccacgcccagctaatttttgtatctttagtagagacacggtttcaccatgttggccaggctggtctcaaactcctgaccttaggtgatccacctgacttggcctctcaaagtgctgaaactacaggcatgagccactgcgcccagccaattttttagaataattgagcagatagtacataaagttccaaacacccactccatccatgtcctccttccctagcagtttcctctattattaatatcttgcattaatgcagtaatgtgttacaaatagtgacctaatattgacatattattaagtaaagtccatagtttccatcaaggttcactctttgtgttgtattgttcttcttcttttttttttttttttttgcttttgcttttgttgcccaggctggagtgcaatggcatgttcttggctcactgcaacctctgtctcctgggttcaagcgattctcctgcctcagcctcccaagtagtatgcaccaccatgcccggctaatttttatatttttagtagagacatggtttctccgtgttggtcaggctggtctcaaactcccgacctcaggtgatccacccacctcagcctctcacagtgctgggactgcgggcgtgagtcactgcacccggccgactgtgttgtattgttctataggttttgacaaatgcataatgacatgtttctacaatgacatatacaaaatagcatcaaggccctgtgcttcacctacacagaggggagcatttgaaccaggcattgcagagggcttcgaggttccgtcgggtggaggaggagcaaaagcagttcaagcaggggaagccaggtgcacaaagccaggtgcaggaaggctggccaggccttggagctcaagccctctattctgggctctcctaacttacaccagacacagagctcaatcttgcctgtgttgggagaggagagtaaagaggtagtgtctcctccactcttacttggtcctcagtaccggaccacaccacaccagctttcagctgctcttcccttgatctcacatggacccgcacacatacacacatgcacatgtatacaaacacatgcacatacatacacacccacacatacacacacatgtgaacacacatatgtgcatgcacatacccacatatgcagccacatccatgtgtctatagacatacacacacacccccacctgaggacccatggaggtttgtcaatatgaatccatactgaacttctgttggcatcaacagaacttctgttggcatcagactttgcctgagtgcactttgtcccatggtatgaggattcaggtctccggacttcttgccccagcaacatgtagagagccatcctgcagctggtgcacaggataagaagctggaggtggaggaggagtttgtgatgttcagggccttggctgacccccaagagggaacacacgttgcttattccagagagccgcaggccttgatgaggggaatgcttccttcccagcatggaggggttgagcatgaggccctcttgctatcaagtagatactcagaaagcaggctggctagtctttttttttttttttttttttaagtaatggttttccagcctaggcaacagagtgagaccctttctcagaaataaataaataaataaaataaagtaatgatttaaaggagtgcttgccaaagtacctgtgatgaaggacccatttttaaatgtttcaaaatgttcaatccattatggacagatcgttttgtaaaatacaacaaaaataaattattaaaaaaatgaaattaaaaaccagatgtacaaaacatgagccaaatttttaaatttttatatataacagacataaatataaatcatccttccaaagtgctataaagtttctaaatgcttattctcagtttcttatcacagaccagtaacctccagagggcaggcaggaaccagtctgtgtaccatgctttgagcaggctgggtttaaagcgtgtacttcagggtcagtgagacctgggttcaaatcctgcctctgccacctgctggctgagtgtctggcaacctgacctttgtgagtctcagtttccttatctgtgaaatagggagaacagcagctcattgtgaagaatgtgcagtgacgcacataaggctgtggccaccgtgcttggcacagatccctcctagctcattgtgtttctgttgggctctgcggggtatagtgggtggcctggggaagaggagccagttggatgtagctcctgcttccaagggagataagacatgagcctggatgtggcagaaagagccagtgattcctggcatgagagaggatcatgtaaagggctcaaggagggaagagtaaattgttttcagctggggaggtagaatctgagtggggtcttaaagcaagggacggttcggtaggatgggaagagggagtgtaaacttctgtagtggggccatcagctccaggcaggaaatggggaaagaacaggccagttgcagggagaggctagaaaagcaggctggggtcagaccagaagctcaagggctgtgaagggattggataatgatggggtcagtacagggaggcaggaagggttgtgcgggagtgacctgcctcagccttgagggagaaagatcacccaggcatcatagagaaaatgtgttggctggaggagggatgggtgccaggagaccattgaggtgtcctagcagcagcccccagggccgccatgggtgccactgctgaggctcagtgcacgggatgactcaggtgtgggtccagtggctcagggggctgacgctgggcagaagtgcccaagcacatcagaggcagactgtgaccccacaccacggccccctgggagcctgctggctgccgtttaccccacatcccagccatccccaaagctccctgacagcaggaaaaattcatagccattgattttgtaattaacagtttatcaatgccatcgatacagaccggctgatggactgcaaagaaattaatcttgcaatgttattttatttcatttttggtcgaaggcagctgccaattttgtcctccttggggagagtcgggggaggatggagagggcggggagagggagctggcaggagtcaggagcccacatggcaatgcccagccatgtcaggtacacactctgtaagtggccgagagtgtaggattggggccttgcttcatctcccacctgatgacgaaggagtgctcactgccttggtagcagggagcagaaaaatgtggaggaggcttgggtgtggggccagtgaagacccagccctgcaaggacactcacccccagcctgagtccccacaggaataacactacctgacactgaccaggtgctgaccaagctctgggtaatgtgctgcttcagtcaccctcaccaccaccctgtgagtcctcactcctgtgttttacagccggctcagacccagctgtaacgtggccgtcagcaggtgcctccctgccgtgctgggatgtaggtaaattttgtttgaacccctaggtcatggcctaagttcaaaacctttcccaagattttagagaactccctatagctccctccatcaccgtgcctcatgccgccaccctgacacagagctcagcccctatatctgtgcctatattctgtgtcctataaccagaattttgtcaggttagcgattgcactgaagacttggggagctggtgcctggcagcggcagctgcagtggttgtcatggtgatagtagtgatggggctaggggcggtggtaggggtgataccgctaccagggcactgacttgtgacaagttctgttataaacccttgacctgtttaactcctttaagcccttgaggtaggcatggctattatcccattttacaagtgaggaaaatgaggctcagagaagttaataacttgccgaaaatcacacagcctgcaagtaagggacacaggattccaacagtctggctccagggtctctgctgccaccccctggtgacctcttgagaaatgtcccctgtagacgccagtctctccctgggtttgagtcccagctctgtcattagcttctgtgacctctctgggcctcagattggctctctgtgaagagagggttctgaagatacccctgcctgcctgcatgctgcctcctggaccccaagatggcccccacgccaggcagcactccctggccaagcctgctaatgctcgtccttgtgcctgcagattccatgtacatcgaggatctggaggctgtccagaagctgcaggacctgctgcacgaggcactgcaggactacgagctgagccagcgccatgaggagccccggaggacgggcaagctgctgctgacactgccactgctgcggcagacggccgccaaggccgtgcagcacttctatagcgtcaaactgcagggcaaagtgcccatgcacaaactcttcctggagatgctggaggccaaggtgtgatggccccgcacacggaccaatgcccacctacagacggacaaatggacagaccgaggtggagacctccacaaccaccagcctccaccttcaacccctgtatcatggctctgagctgtcccagaggtgggggtttctcacctcctggctgtgtgcagactcccgggtgcagtggggcgggggacggggatgggggggcaggggtgtggggctcgactgtaactggctttttctttggtatgtctttccttctccatggacggtgcggaggcctgggccagggctgactcccttcaggagtggagaccactggagcaagtgccctctcccctccaccgagccaccaagaggcagcatgtgcatttcctaactcccttgccccctcccccatctgtggcctgggtgggcaccgctcaggctggataccacctggaggttttccttccgcagagggcaggtacgcaagggacaacagtatctttcttccagaggtcctacctgctctgagatcctctggggccggtcaagaggccccataccttccacagtttccactcagctttcagcgaggggggacccacaggagagcagcggctagagctcaagtgcttcctgggcaccccacccctcggggcctacccccctgcctgtcacccactgcgccggtgtccacctgtcctcctcctcttctcctcccctggggagtcccccgctacttcctgaccctacctcagagctcactcacccagtgggttcagccacccacagcgactccaggggctgtagacaggaacgcactggcacagagaagagcagggaccacaccatcttccccagaaccctctccctcttcctgccttccccctctccctgaagggcaggtccaggccaggtgagcctgtgagaagctcaggagcctggctccatccaagagcaccccggggggaggatcaggacaggatggacagaggcccagactcatctttgccaagtacagaaaggctgagcagctgagataagtaggtaggggagccccaaagggagggagttcagcggggtggcctgcctcatccttcctggcttcccttccctgcacccagcatcatgccgcagggccagtgtaccagtgccacaggaggggtgccctcctaccacacttgggcgaccagaggtttggtgtagttcccctgggcaccgcgagcacgccagctctctggcaggacccctgcagtccccctggctgtgccaggtaaccaaccgtcttggtttgtccaggacgtttctttatcccaggaaactcctctaccccaggcacacggggccagtgggtcactttatttctgtggatggccgtgaaagttttcactaactcaaggggcagccctgaacacccatctgtgctcacaggttggccaagagcagcttagaggatctcccaaggatgaaagagtgtcaagccatgatggaaaatgccccttccaatcagctgccttcacaagcagggatcagagcaaccccccggggatccccaatccacacccttctagtcctacccccctcaatgagagaggcaggcagatctcacccagcactaggacaccaggaggccaggtaactttctgcagcctttccatagaagccctggtcccacctccctagctctaccccaggaacctcccggcctgggcttctgggctgggatgtgctgaggtcatcccagataggagggagggctggctgaaatccacaaactgcagagcagctctctgatggtgtcccacacagaaaatgttaaggattccaagagccctcccagaccagtgatgtgtccctccggctccccttgcctgtggggaatcgggtctgagtcacttgatgagtaggcactggagccgttacccaggatgctgcagccctagccctccatgcagcccatcttccctcatttgggtgtaggcacacatttggggcaaaggccccttcttggcatcaaggaacaccagctacaaaccaagtctagcacagtgtttagaggctctgccctgaggttctgctccagggaaaccttcacagtagagaccttggggtgtgcgctttgggactccctcagtctctcactgtgctgtgtccttgcagcggggccgaggtagcaccctgctctgtcacttcctgctcaagctggaggacccaggtggcagggcatcatgcccagctggcatctgctgtccgtcttttctagggaaagcatttctggctcaccatgtaacatctggcttggagcaagtgggtgttctgcacaccaggcagctgcacctcactggatctagtgttgctgtgagtgacctcacttcagagcccctctagcagagtggggcggaagtcctgatggttggtgtccatgaggtggaagctgcttttatacttaaaactcagatcacaacaggaaatgtgtcagtaacaatggaactccatccaatgggaaagttcctggtactgaaggggtccattggacactcagaaaagaagttcaggggccaacttcttagctggaatcctggccagatgaggaccctctccggggaagggagaggactgacttagtggaaggtggtgaagtgaggagagtttaggggacccttcccccagtggaacagatctcaagtttaccctaaacctgccatttctggaaaatctgtaaagaggaaacagcctgtctcagctgtactctcatgatacaggtcatttgaaatgaaccaagaaataaaacataaaaatccaaccatggagaaggtggtatggctgggttttgtttggtccccttgtcctcatacgttctaaagtttccagactggctttgtcactttgtgaactcgtcatgtgtgaaaaccaatctttgcatatagggaacttcctcgggccacactttaagaaccaagtaagaggctctcaagactccagcagagtcgggaggccatggcagcgccttagaggagctggaacctgcacccacctgtgtcggtgggggggggcctcctttccccatagactctgccctccctctgtgcagatggaagtggcaggggagggtgaccagcttgtgacaagaagaccgaagggtccagagtccatgctcacggaacagcaccaaagaaaagcactatgtggaaagattgttttattttctaataatgataatatggctggaatggcttcttaagatgtatatattttttaaaatggcagttccccattgcagcatcacctacttgtacgtctttctgcctctgtatatgttctcccagaaacccccatgtaaatcaaatgccctaggatgcttccatcctggtcccatgtatctggaatctaataaataaggaaaggaact

SEQ ID NO: 52 - DNA, 160512 bp, Mus musculus
gtgcccagtgtaagctacgccactcaagaagccattgtcttcccagctcccacagtacttgctaatcctggtcctccccctttgcccatacatgacacgtcccctttctcgcgcccctaggagactacgaagcttgcatggggctctgtggagttggaagtccagaggttttggctgttttgcttgagacctggttatggttgtgggatttttttttcttttctgtcagctgcctgttatatcaatcacggagtctggatctatttatagtttgagagtactgtgtccttagtcacaaagagacacagacaggggactgtcagctggtgttggaggagccaagcaacgagtcatgagccgctggaacacctgagggtaacctttccttgcgcgcagccccgtcctccagccagcccaaccatgtaagtaagctaacttctcctctccctcctccccagactgccctgtgccttctgtcctcccgacacatcctcctctctcctgtgtttgctctctctttttaatggataaaaatatctccccacgcccgctctttcatcctagtttctgtgcacgaaagcatccatccctgtgtggctgagaggtaactgttgcctctctcagactgtcatgggaaggtcagagggtctccgcgtggctggatgggatgattacacagactcgtttggaatcagtgggtccccctccggtttttatttgttttcatggagagaaagtgagtcaatcaaaagggcaaagaaaagttcgtactcggctcagtggggtggttatgtctcccagcgtgaaaacttttatttgctagcagctcctggcatttggtgagagaggaaggtgataaagggggccggcctgcgtctcagggtgatgatgtaggggtgctgacagacttgggggcaaccctgggagcgttcaggttcccctagagtcatgacagctccaataactatcttatttacagagactccaagaaaaaagcacacacatacacatgcctttccgtggagtgattctactttgcaaagtggagacaaaagctgccaacccgatttatctatctatctatctatctatctatctatctatctatctatctatctatctatctatctatctatctatctatctctatcatctatctatctatctatctatctatctatctatctatctatctatctatctatctatctatctatttccttttttgctgcctggggctggcttcattgctgggtgtattttctcaattctggaaggcgttaggaagcttggtccggaaagagaaggtattagaaagtagagggccagttgtagagggctctgcacccttcactgaggggggtggggggggaagagttaccagttttgtcaaagctaagctcagtatgctcaaagtgggcaactgcgcattaagtggctgtggagcacacgccttccacgtctccacccccacccccatcactgtcctgagtgagtcttagctgccttgagtttcatggatccttgaaactttaatttttagataatgggtcatattttccagaattcctgttcttgggagagactggctttatagcatttctgaaagagaaggccttaaacttaaaaaagaaaaaagaaaaagaaatctatatgttggtatttaatgtatacgatgtacaaccttttaaatagacttcattctttttacaatgagtttctatttacttatgcattggttaccagatgctatattgctaaggactactcctagatttgtttaggaaaacagtatccgaacaaagaaacaatcctctctacaatgtaaaagcattaaacaaagcaaataggcctgaattggttttgattacaagcagaataggtttgtcagcaaaactgttgaggcaagttaagtaacttgcgggggggggggggccacacataggcttccaggagccattccatcccatttccattttgactttccttccttttggctccttatttttacatttgatgttgggttattaatatctttaatttgcttttgtagagggagggttgggatgaagaaggaaaaagaaaggagaaggtgaacagcgtgtggtcaccagtggaaaaaacccagaataaaaaaaaaaaaaaaaaaaaaaggagatagcctggtgtggtggtgcatgcctttaatcccagcactggggagggcagaggcaggtgggtctctgtgagttcgaggacagccaggacagccagggttaccagggtgctgtaggtacactgtctcaaaactgagaagaaaaacagcaaacaagaaaggaagggagggagggagggagggagagtaaaaagagtgaatgtcattattttaaatctagtatcaaaagcataatcaagaacccagggaaggggaagctaggcatactgtccatgtaaggctactgttatttcctattccaaggtctgtgtgacaaaccaatcctgctaagctctcccctccccgtgttggagtgggattttgtgggttgttgttaattaaggctcccgtgaatcgcgtgattgagacattgtgcacagaaatctgagcggtcggtccactgtttgtaaaactgaacttcccagacctcctgagctcagtggcttttaaaacagtctggaatctttttttaacctttcagtgtaggagcaaatcctttcccccaccccaactccacacacacacacacacacacacacacacacacacacacacacacacacacatacaccctctctctgagaccagtctggtggggactcgtgactaaaggtaataaggagagttgtgttcttgttagtgttcactgtccagagaggagagcgtttgttgaaacatatagaaaccagccacccttcccccttgacctgcagaaatgtttggatgggcttgggggttgctgggtatcataattgagcccttggcattggtcccagtttttaggatgtggtttgtccctctttgggttccctatgggggatgcagttgggggaaacttcaggaaatttgcatacagcctctgattacttagtttctgcttcaataaccgttaattttatgtggtctgagctcccatcagactcattttcccccctaactgatttcttaaatgcaattggtcacggagctgtctgagacttcctatgagcagactctaacactgttcttggaatgaccactcattgctgtgcgtgaggacaagctgactcctatgtgagtgcattgtggtttcatgggccctccttccctggagcacgcaggaatccattctgacctcttcccgaattggggacagtgaggccaatgagcaggtgctttggaatgctgcaggctcaggtgcaggcccatcaatctccaggagaaacgatgacaagtgccagaaagcactcccctgactcaaacaattcaagtagttgaggtctctccaaataccccatgaatagaacctggcagctggcagggactttaaaccaaaggctgtggcagagcttcctccctgtcggtacagctccactgtatctctgtccatctctttcttatctctagttttacatctcattatctgttccctcttcccccaccccaccccccatcctccatcccccaacctctcgcctttcctgaaaacacatttctatctggcacagaaaataaactcagattgtgggtagttatgttaatctaattcaatcctccgagggttaggagcaagattctaatagtagagctgttgagggcttttttgttaatggcttggggattacattgagttaaaggctcatttcctaatcaaacagagagggagagagtgattccgaatatttatgagtctcccagtgagagtttaaaccttcaactccaaaagctgggttttctgcgggaggaaagagttaaaacccctcagggctgctggggagaaaggaaaaaaaaaaattaaaccagttaagtcgtcagcatttccaggcagctgtagaacttctgggctcttcaaagtggaaggtgggatggaactggggggttgggggggggggactgaaaactggggccagagtctgctaaagagttcccaaagaatcctacagcagactgggttgctgggtccgctggaggcttggaggaggagttagttgaacaactctggcccctcaaatccatctttctccagtctggaggtgagaagaagagactggagtgcagctcaatttgcctctcgttgcctaggcagcgcagaggaccagcgtctgtccctgtccctggaacgcgggagccaccataccagccagtgccagggttctccactgggtctggtagcttgatttctcccccgcccccaggctctctgggcctctctggcttactgtaccaggtgcaggcaggtagggaactctggatctcaagccagagaaagtcaggagcaactgggccaaggttgagtcatgtcaaggtcaatggaggtcaggtgtccaaacccaggcaatcctggccttgatctgctggctctctggagtccagtaaagaaaggagatggcagagccatgtgacctctgaataaaccctgggtccctgcagagagctgtggcgggcagcggcccctgagtcgtgcatttgctttcagggtcaaggaatacacttcatgtactctcagtaactttccgtcaagtctaactctgcttgggctttcactctccgtgactccctctctgctgcattcatgtccagtggaatgcttgacacaccattagacctggagcgtctacacttggctcccacgttggcctgatgcaccacttatcagagatgccctaggtacctctgctgactcagacagctgggactctgataccaccaatctcctttctcatgtgacactagaactgcgggaccctcacagtcactacctcccagggaagccctggatccaaacagtgtatacacttttttttctctcagtccagtgtgctggcttctgcacatcttggaggctaacccaaggagcaggttgcacaccttcctaaagggctgctatccctgatgcattgttaaatcctgagtcagaggcactgtcagctaacagccaggacagtcagcagctgtccctccagtggacaaccccctgggagcagagctcaaggtatcctagggaggcctttggacctcaaaagaacttggagttctaaatcaccatgagaaagcagagaggacagcggggcagccttgctcagtcagggataggtctgactctccagaaattgattttttctccggcctctgggctctagttcatactccctggagaagtttggttcttgggtctcaaggccttcctgcatcttgtcctgttcctcacactctcagagaccagtttctgttgttacatgcagaaaggctgatatgtcagggtaaagccagcattcctgtgaccacagggccacaggtgactgtcagatccccatttctcctgctagaactgcttaactgatcaattctagcaccaagtgggtaccactctagtctcaggcagggttatcctgttgtatgatactccaatcctcagagccctgtgtgtgccagggctgtgtgtgcccagcccctggtacagtgccgggcatacaataagtgtccaatgaatgtatccaaatgaatttcagattcccttctctcaaggggcctgtcctattgcctaaccgcaggaggagggacctgaagctttatccatctatattatccatccagatcagtgcttctcagcctccttaacactgcgaccctttaatgaagttcctcgtgttgggatgacttccgcccaaaccttaagatcatttttgttacaactttatgactgtaactttgctactgttatgaattgtgatataaatattttttggagacagatgtttgccagaggagttgtgacgagcacataggttgagaaccacggtctgactccagccgtctcccctccctgaccctcccacttcagaaagagagagacacacacacagagacagagacagagacagagacagagacagagagagaaccagcttagtcaccttaagaagctttatccaacttgatgtcagattaattgctgagcaggtgcctctccttcaccagtttctctcctcctttctcaggctgtctcctctctcctttctcagtgcccttccacccacccccaccccagcttcctctgactgttcagactctgtcaggccccgtctctggtcccaggggtgcacataagagggagcccttctctctgaggccttgcagagggtctgcttccttaagcacagacaagacctttgaaaggtggtgggtcatgtgctggattcctcccagaacagcatctctgtcgggaagaagcagtgcagaacctcgggctgctgagggttaaatgtcagcaatgaaaagtctggacatcccttggggaccggtggctggctgagacaattgattagcttgtcgtagtgatctttctagcaatattcaggagcaaaattcttgctgattaggctctgtgtgtggacgtgtgagtattttagggtttctgatgatgaagggggcaggatcagacagcagaaagagcaagtatgggtgcattggttgtgtgccagtctcaggcagggccctaatgccccttgtatatgccaggtcaggtctcaacagcatgcttttgtgtgtgcacaattcagttgagggaggcaggaggaagggatgcaagacagtttgttttttgttttttttttttttagtcttctctttgtgactccctgggaaattatagttactttgaagttcaaaggacaccaaagggctgaaatgatgtgggatgtgggggtggggagaggaggtgttagcatagtgacagcatttatagttctggaactacagaaatggagagaggcagacccctggtgctcgtggggaagctagcttaccctaatagtgaatcccaggccaataagagactgtcttaagaaacaaggtgaatgacactcctgataaacatgaacacacacactaatacccatgcacactcaataacatgcacacacactctctctctcatgcacacatggtcacatgcacacacatactcacatgcgcacacacacttatatgcacacacatactcacaggcatacacacactcacatgcacacactctcatatgcatacacactctcacaggcacacacacacactctcacatgcacacatgcatgcttacagcatcgttgaacacttaacgtcagctagagagagagcctccaggttgagggagtactcttccatttgatttgcagaccctggtggtccaaggatagcctgctgccgtgggaggagatagatgtcaaggggttagtccgtgggaacataggtgctctgcctgtccagaatgtggctcccttggtcaggacagggggtctggcaggaggactcttagactctagcttaagtggttacatgttgagaaacaatgattctaatgaacccgtgcctgtagagtaagttaccagtctcggttgggcagctagctctctcatccaaagtcttggaccaagatgaggtcttgcttgagttttgtgagtttgctctaatttccttggcttcctccctcttcagtctcatactctgctaccattaagcacactagagaactactagaaaaactgggtagagccacctgtccaaacacacagatacaaaggttttaatgtttgtcttcactttgcagagactacaattctgtagcttgtgggcctcatagctcccgtcccttcctcccgctcaatggcgcctgtgctttctcacacttggagaagcccccacagcagcttcccatctaccagcctttcctgggcatcagctgaaggaagggagggagggagggacacagtggggattccggaaagaagttagctcctggggacttctgcaaggcttagcttctccatagcaggctttctttgcctgccaattggggctggtctctgctctgtgtctcctaagactattgagaagctgaaataagaatcagagaagaaacagcccctgagaagtggaagcacttaacagttttggactagcccatctccccgcatggtgtgtgtcatcctctgagatgacatctgggttgaaatcaggcttcagagtcacccatggttgtcatggttaggttttattgtcaacttggcacaaactaaagtcacctgggaagagagaacttcttcctaacaattgcctagaacaattgtcctgggaccctgtgtccaggagagattgtcttgactgagggttgatggtgttcccatcccttggcaggtgggctgggaccgtgtgaaagaaaaatgtctgagaaagccagtggtccagtaagtagggctcctccgtgttttctatcagaagttcctcccctgactcaatgatgctttgtgatctggaagtgtgaacaagggtcatactcatctcccatctgttgtaatgatggacaaaagagctgctgtcctatcttaaccccgactctcaacatctacaaatggaggtggtgagagcccctccttaatagagtgctgaggaccacagcagccacgtaaaggtcccctgggcagtgctcacagggtagtaagtgctcagactcattgtggtggaggagacgacatggtggcggctgaggctttgtagatgcctacaatccttccagaatcttcctggtcagtttacaaagatcagggaaggtgttactgctgagatagtttcacgacacacccggtcctgcactgcacgtggcagtgtgcacggtgcgatgcgcgtggcagtgtgtgtttaagctggctgcatgtgctgacacctacctcttttttataataacttttgttattttttgaaattataatatacttacatcatttcacctttccctttcttccctcagacccttcccatgtatttgctctctttcaaattcatgtcctctttttctttaattgttatgatatatatataatcatatatatgattatacatatgttttgaatgacttaaagatggaaatatgcttagggtcttggactgatcgctaactagattaccaaagcatagctgtagatatttctgtgaggacctttccagagaccatgggggctttggcctaatcaatggcttaatccattgatcgaattaaaatctgaatagactcttgggaggctgggccactagaaatgtgcctttaaagattaccttagccctggccgctttctgtgacttcctggcacaaccctaagcagatgtcctggctcccatgtggggaactgctctatgcccctgccccggacacttctgctgtgagattctgcctcttcgtggttcagaaaagcagtgcccgccaaccgtggactgacacctccatgcccatgagccaatgcaaacccttccttccccaagtcttcatgttgcgccagggattttgtcccagtgactacaagtctgactaacatggtgactgtattacctacctggggattgtctgctctgacaaaccctttcaccttgtgtgcaaggctgctcttccataggccagcgtataggactgctcggatgtagacgtaaaggcagaagatgatttgcataagttgccttgtgtgtctgtgagtctaagtccccacagtgcagttcctgtgtaaggccaattcttctccgctgtaaagagtaactaaagggggattgcttgcttcccacatgtttgatgggacgtcttctgggagtactcaacaaggaaagaaaaatgggaacagggaagggcaatttctagtgcctaagtgtgtgggggtgcacgatgtgtgtattccacagaatggcagaactgccatcctgctcttaagggaaaattccgaagccaggcttgtgaccagactgcgtgtttgtgtgcacgtgtgcacgttcggggtattgtggtcagccatccatgactcttcttctccatctcaggctgagagcaatctagaaggaacgtgtaattactatttactctggggcactcaattgagaacactctcatgtaatgactcttgctaattccacgttcagccgcccatctgctgcagttccttggcaagcagggagtgaacactgctcttagcccagaggaagggatccggagatggaaactaggccctgtgagatgctgctcttgggccacagatagacggagatggcatctttcttggcagactctgaactcagacctcaggcatgggggtttcaaagcaaggccagctatgactaatgggctctgctgggcagtcagtcacattgatcagagaatcatagtttaaaaaaaaaacaaaaatcttagagtcaggcagatgccacttatataaagttataaaatgtgtaaacgaggttgttcgtcacatagagatgagagaaaagatgagagtggggtgagaaatgccaccctcaggagggtgggggaccatctgcgggcactctgtatactcatccgtggtatccagtaactttggtgtttcctgtcacctcctttgctctcttgacttaattttgggagattttttccaatcatttaagatagggaatggggagagcgagtgagcgagagagagagagagaaagagagagagagagagagagagagagagagagagagagagagagagagagagagaacaagtgaatgcattataattaaacccatggaatctgtttgctaaaaatatcagaaatattaccttgaaatatgacaccctagtgctgtagcccggcactgttgtggaggcgaccaaactgtgtacggaaataaaacagagttttttagatcagcacattgagcaatcgcttacattagcttccagaggctacctaccgcctgttggctttctacaagctgtctccctttgcctctgtgtctctgtagaaaggataagaggggatggacgagccccaaggacttctcagcatcctgctctgagtgtctctgtctgggtcccaggcagggaacttcttgtttcacagctacctctagggtgaaggactctgttgtaggaatagggggtctacttcccagtagtatctggatgtgacaggcacccaacacactttgcatgtactgacaaagccattgtatagcacaggtgtgtgattctagccctcgggaggctgaggaaggactttgtgagtttgatgctagcctggagcatggagtgaggccttgtttggaagaagggaaaaaaaactgtctgtgaaataagtgatgccagctccccgatcctacttcacccagcaggaccacaagtgttacaggcctggctgcctgagctcagcacctctggtttcttctctctattcctctgtgggccaggaatcaagggccttgctctcatggtttgaacaggagcatctttcagtaataatataaattgagctgtgtggggaaagcccacaccctggttggtgagatggctcagtaggtaaaggctcttgccatgaaagcctggcaaactggattcaatccccaggacccacgtgaaaaagtggaaagagatccaactctatctacaagttgtcctctgacttccacatgtatgctgtggcgcgtgtgcccgcccccggtggtgcacaaacagtcacacacacagcaatagtaataataatagttaataataataataataataacaataataataataaattaagtaagtggagctgccctgtttaggaaggctagtccacagggctgtcctcttgtctctttctgtcccctctctatcttactctattaatttaaaaagtattacatttggagacacgctaaataaagagtcctcagagcagagtgcgtgtgcctcatccattttctctgtccccgtgtgcccctttataaagattatctctcagttcttactaaatggccttgatttttatcattaatcgctgagtgataattcctttttccgtgtctaacttatttctaaaatattctcccctgggtcctgcagtctacttttaatggtctctgtaccctctttcccctgtttctgccattttagaagtcgcttcaagagattccttcacacattggacccttgatctccagcctttccctcttcctccactgtatttcccagaagagcagtccttgtggtttgatttctgccgttcaggtggccctgggtctctgtcttttccacacaggacctggggatgtgctttgctctccagcccccaaagcttcatcttttcttgaacctgaagttttctcactggggtgaaccacatcataaatttaaagcttgaaaaatgtctattttttccttctactttatattgggaagcctttagctcccccacccccattctctcctcacgtcagctgcgggtgctgttacttgagacctaaccatgacatctcctgaagatatttctccactgtccatggtttagtgtctcctgctgtcttggcttccccatgcattcttttcttcggtgactcttctgagtgtgggaaagggacagacatttctaaggagctcttatgtgatggagaccttcctctatttgtcctactcatctttgtaaggactggaaggtgtaggtgtcatgatccttcccattgtacagaaggggaaactggggcactgaggttagggaccttgcttaaggccaatcaggtagttacaccatctaatgttaccttgcagattcctgtaagattcagtacaacaggcaggcagtagaaaatgtgtgtgtggtgtggtgtggtgtggtgtggtgtgtgtgtgtgtgtgtgtgtgtgtgtgtgtagtatgtgtatgtatattgtgtggtgtgtgtgtgtggtttgtgtgttgttgtgatgtgtgtgtggtatggtgcatgtatgtggtcttgtatctgtgtatgtggtttgtgtattataatgtatgtgtgtatgtgttctgtggtgtgtgtgtgttggtgtgatgtgtgtatgtggtgttgtatctgtgtgtgtggtttgtgtgttgtggtgtatgtgttctatgttgtgtgtatatggtatgtttgtgtttatgtgtgtgtgtgtggtgtgtttgtgtgtgtgtgctcatatcagttcattttcttgttacttgaccaaatactgacaagaagcagctcaagggaagaaaggtttatttcagtttgctgtttgaaagtatccagtcatcgtgatggaaaaggacttcagcaggaacgtgaagcagcgggtcacaggtcatgggtcatgggtcacaggtcacgggtcacacacacgtcatgggtcacattacattcccagcctggagccagtgggagatgagtgcggttactcagagtactttgttgcttttactccctgtttctttagatgggatcccagcctacggggctgtgttgcccatgttcagggagagtcttccatcttcagttggagcacctcacagacaggcccatcagtgtcccccaggtgactccaacccagccaagtagacaatgaagattaaagcacgcagttgctctgaggactgttgaggccccgttcatgccaggcaagctttctatcagttgcactcccagccttttttacttttattacttaaaatatgtgttatatgtgttcactgattttgtgttgatgagtgcatgcaaaggtgcacatgtggaggccagcaggcaacttatactagtgagttgtctctctgagtctcggggatcaaatgcaagcaactcagcttagcagcaagcccctctacccatgcagccatcttgccagcccactttcattttattttaagataagatcttgctaagtagctcaggctagccttgaattcattctgtagcccaggtaagccttggacttttggtccttctgcctcagtctaccattttgtactattgacatagacacagaacttggcctaacagtttcatattttcatttattttatttgaaatgtgccctgtgtttcccttcatataccatgagagtcagcctgaagctctgttacttattcacggtattacgtcacagtgtaacattaagaaagtccccttcctcccccatagctcttgtttgtccctctcacagactcacttttccacatatcatgtgtgtttgtgtatacatgtatgtgtgcatgtgtgtgcacatttttttgagacagtctctcactggcccatagatctccaaataagctagactggttgaccagcaagcactgcctgtctctgtccccctcagtcatgcacaggcaacactctcccctttatgtttcctgtttgttttccacaccacactcttttaatgtttgatctttccagaaacatgaacctggtgggccatcacctttcctatacgaatatcagcacacttctctatgagaccttcctctcttgggggctatcccttccttctctaggtactgtctctttttctctctatgtgggctgactccactttagcccactaccaggctttcttatggaggagggagggagagaaggaggaagggagagaaggagggagggagagaaggagggagggagggtctcttgccaaggccacagcacctgcatctggactccttgcccactctcctgtgaccctgatctcctttttatccacccaccttggctctcaagatgctaatcacattcccaaggcgagtcagactatcttcctacattggaaggcgtccaacatgtgctcaccatttgggacaaagcgtttatcctctgtgtctgtgaccttccacagacaagagtccactgggctcctgctgttctgccttcctcttctctctagagctgctgagagaagacctccctcccagactgcggggcaggggtgtgggctgaggagggcagctggcatagacacagaggccatccgcagggtttggcacctcccccttctccctaagctgaagtgtcacattgggaacctcagggacactgatggggacatggggacactggaccgttctgtgggggccgctttccctgcttctctgctgtttgtatcattcccggttctggcttactgttttgtagggaagttgctaagatgctccagcagaggtatagagcacggataacagtactcgtgttgtctctgaaacctcccaaatgccaagctgcagcgcaacaggttatcagagtaagctacaggctttgacagctttcccacagctggcctggccttgggctctggttctctagcctggagcacactggggaatccagaagaaccttcctagattctggacccattgcgagacctaagggctctcctcagactgacacagtccttgcttacctggcttcttttcacctgctggggttgtgtaaggatctctgtcagatgggtttaagcaaataaatataccttggtgggttccactcttgctgctatttgagggaagctcttaaggagctggggagataaatgccttaggtcaggttccccagagcaaggatggaggggtgtatgtgtgtgtggggtgtatgtgtgtgtctgacctcaggaggaacttgggaagggtagagtcagccaccaagcaaactcatgggtttagctatgatttgtctgtcctcatggacctctctatggaacttcccatcttgaggcagagagactggctagttctactcccaaatcagttggcaatcagatgacagttgtcctagctgacagaagaacctatgagactcatctggactgactgggcacttctgatcagggaaaattgtcagagatggccgttttaaatggaaaggaagcactgtggggcataggaactgaatggagctgagtgaagccgagtggagctgagtggagctgagtggagccgagtggaacctagtagagctccgaccggttatctacatttaggcagaggatgagaagtgacctatcgtggcttctttcctttcacattcacttatacccttctagaatctgaatttctgtcactctccaggttggtccaatttagagtcaacataggtgagggaaccactcacctcctcgtgtttccatttcatgaagagctggaccatctatggcctcaagcctggcttctgaagatgtgttgggcaaaagtgtgaggagtaaggtcgggtttgctttatctacccggagctgtctcacgcagcaaagtggcgaatgtgtgtgtatggagagcaagcacagaggcagaggacctcaaaatgcaaagaatgatgttgggtggaattcctggtgtgtgactgacatcttctccaacagttccttgacatgggtggcatctctcatgtactaccaaggaaacagaggttccccaatctttccaacagagaggatgccggtcctaggaaacatcaaagacaatttcaaattcagttactgaactgtgtggctgtggctaccctgttcttggggtactgtggagcagggatgggggcaggtccatgacaacatgctggctcagtgactcaaagtggcccaagctatctcatcccctgccctaccccaaccaaagccctctatttcatgaaggaacctcatcttacccctctctggaggagatgtaaagcccaaaaagcaaagtatattcagttcatgtacctagtaccccacatgtacccatgtacctgtggctcacagtggctcaagtccaccccccaggggctggctggaacatgtgttcattctgtgttccccggccaaatgtctgctcaacagccccttgtttacctactcaacgccactcacaagcgtctctgatacctgccttattatcccactgcctgagtccatgctggtggagcccatggcccacaggaacctggtggccaccaccaacataatagatggaaaaagtccagacttgggcagatctgggttttctctctggcttattaattttatggccactggagagctcaccctatccgtgtccccgctctcagggcactggctttctcatctgctcatagagtcattaaaaaaaacagtcctgtgggagttttaaggaagatgggagatgaagcacgatgaagctctagctctgggttggctcagagctccgctttccctgtggcttcatggctcaagctcgtgcgtggactgtgaatgctctgaatgcccatgtagaagagagatgaatacttagcctctgcttcctaggtctctaccagactttccatttcccacaggatgatctggaaactcatccggagatgtctacgctcacacaggcgaagcaggggtgaggggtggacaagaactcagaaagcaagccttgaaagactaaatggatatgggcagggagtttctagctgtctccatggaaccatgtgtagctgtagtgataccagcagctgtgggcagtaatggtggtgatgaggaagagggagaaggcattccttgccctgagcacacactgcggagcaagctctgtttctggttctattcctgacccttcccatgttccgcaactcaagaaagtaggtgctggaaccaccccctcctgtgtgtgcgacagatgagaaaaacaaggcccagtagagttttatgacccagaggctcctgaattgcaaccctggaatcccagccaaggctgtactcaaatcctatgcttgtggctactttctggcatagtgaatcaaaccctgacaacaccatggaatcagaacactggagctgcagaggagggcctctaaacaggcaaagaacatcttcccattttgtaggtgggaaaatcgaggccagggtcagaacagtctcagtctagcagtgctccagtcaagaaaggaatctgaggaactttgtctctccctggggtgagctgcagtttgctgggtgttgagtatttatttcagctgtcacttcatggaggcaggagtgtgtgtgtcattgtgtgttttagtctactttagcacagggaggtagaggattgaaaggaggcaactagataaagctgtctgaggagtctgcataagctgaaaaacctgccttcaatccccagaacccctgtaaaggtggagagagaaccaaatccacagagctgtcctctgacccctatacatgtgccatggcacaagagccccattctaaacacacatctcatacacacacacacagagtaatgaaagggtatggagaactattgaatgacgtcaatctcaggtttaagtgccctttgagttcatgtccttgtcaccacccctgggaaagcaagatacctctgtgcgcctgtttcccacctcatccctccacagtgagctggcaggctctgtgcatctccccactgatgctggtgatcccaattggaaagagctaagactgtggatgacatatcccagccccagctgacctatgcaaacacgggcagaattacagccacccataaacaaattagcatcctttaaaaggtgaaaagcaccataaaatgtctgggttttgtttacggctgtggccaggagctggattaaatcaccgaggtgtctgcaaggagcagcagactcccttctcatcctcttagcttcccccagcaccctgtaggggcacatggccaggcacaccgcttgcacgtacacactcatacacactcgtgcacattcggggccagcttgcaatggccgctcagtccatcctggtcctgcctccgttcctgccagcctgggtcccagcaggtgttccctaattagcaatctcttcatttccaatcaaagcacaaagcggccccaaaagcccgtctttatgagggagccgagcagcggctagggatgcgaggagggggggataattgtcttcgccagtggcggcagtaagcgggctggctaattcattattgtaataactttgcttgtccttggggaggagtgagtgggggaggagagcaggagaagggggaagggatgagagggcctgaaggtggggtggatggaggtctggggcaaagggtaggagatggaagaccatatgaatggtgcccactcctatcctccttgatgacctctcagactctggcccatgtgcagggcgtgtcctctgcttcagctgtagagctgtctaggctgtgttccgttccgcaggggcaaggaccaattgctgccctctgaagcagccaccttgcagtagcgagaagtccaggctttgcactcttgggactctctttactgagggagacccagtgggtacttggggctggcttctcaggctgtggatggttgtggaagaagtcttagggttgagacttagagctctggatgctagttttccaaagactcaggtcccacaaactagaactagcccctgcttcttgcctcgtggacagagctatcactaatgtctacactgcggctggctggctgactttagaattcggctaacaactctttccctcccacccaaatcaggaattcccaaggtagtgcagagtgttattaaaaggggacatggtagtggtggcctgagctattggtctgtcctattatacttgtatactagtgtttgtctcgcagagagcaaggcctcctatatataagaggtgggggagcccgctggctggggaagaacaagcgactaagcccaggcagggaagacagctgtgtgggctgagtggtcaggtggccttgtgagggctttgggtgaggtgcaagggtgaggtgtagaggaagggtagaagcgtggcatggaagatcagtatgtgccaagggctggggtgacctggtgacaaggacagaggagtagctgagggccaccggggaagctgggactgcaggttaagactgcctcaaagcctgaaagtcaggctgaggttgtctctatctcttcttcccacaaaactagcaagagcaggccccctgctagtctgctacccttggtccctggagaaaagacatcagttctctgtttggggtcagggcgaggtgtcaatcagccaaggcttgctaggactaactgtgcctaatagactgccgaagcagaaggctggccatcacagcccctgcacggctgcttatcttccttgggcttctgaacactcagtcccctggccttgttgtgtggggaccagttggtgcttccgactggggtcaggcgattcagaggtggaaagacctgggatcagaacttggctcttttatgatcatactgctttgtgcctcagtttcctcatctgtcacatgcactcagtaagagtggctgcctccatgagctcacacttgtgacacgcatagcacaggctggttcagagtgaacctctgaacagaggtacactagctcctcggttcatggtgtgagtgtagctcagtggtagggcagttgcttagagcgcacagggtcctgggcacaggctcagcactgcaacaaggaatagatgtggggaggaagatgtggagtagagaggggagggagagtcagaccctctcctcttctctttacctgtgttccccgcacttggaaagtggaatggggaagttaaacaccccactcctctctctcactcatgtggtgtgatatatgtgtgcatgtgtgtgtgatgtgtgtgtgtgtgtgtgtgtgtacatgtacagagagggtcttcctcagttatggtccatcttactttttgagacaggatctctcagtgaccctggagctctctgattggttagactggctggccaagaatttcctatccctttttttgagcacacatacacacgtatacgcatacacatgtacacacacacacacacacacacacacgcacacacactagcatacccccagatgcatgcacatacacccacatacacatgggcacacacacatatacacacacatacacacttgtgtatacatacatggccacacacccagcactgaggctgcagacagactaatgagcacagcttttctgtgtgtgggtgctgggcatctgaacccgggtcctcatgctcccgtgataagcactttacagactgagcctctccgtggtctgtgttgctgttgtctatgtttgtttcgtgagacagggtcccttgtaatcccaagctggtctcacgtttactgtgcagcaatgggtgaacttctgattcccctgcctccacattctgagtgctgcatggtagttttataggcctacaacactagaggggtacttgaatcctttcctggttgaagaacaggtgctggggtgagcagcaagcagcctgtcacacacactggcttaccttggagaatcagtcttgaaatgcatctttctccccagcagggaagcccagctgtgcctctccttggcccactctcttcctatttggtctgtgagagaagccttgcagcagaccctggaccctaggcacgagcctgcctctactctccgcttggtctggttcatatggccatttggtaggatgggggcccaactctttcagtggtcaccttcttgggacattgtagccttgatgagtggctgtcatactagtttaagagagagaaaattcaagctgggcgtggggtgacacacttctttaatctcagctgttaagaggtagagttaagtggatctctaagtttgaggccagcctggtctacagtgcaagttttgaggacagccagggctacacagagagaaatcctgtctcagctcccctccctcccagccctgctcctgctcacagatcagactgcagaagcctatggaaaaggcttctctgaggagtagcatttcagtttccagatcaggctaggtgagaccaaacacagtaccagccgccagcgggcagtgcgcactgctctcaatctctagcagctacgcctcttaatgatgaattgtctttaacctgacagatgaaatggagatcatttccaatctagccaataagaagaaaggcttctactgaatcactctgccttctttttgttgacctgagtgctctgtagttcacttctccccctcctcctcccccacccctccccctcccctctccctcccctccccctcccctccccctcccctccccctcccctcccccaccccatgacaacatcaacaacatcctaagtggccagtagccacaggtgcgagtccagagatgaagggacacaaactctggagtcactttatagctgtgtgttgttggccaaggtgtggaagttctcagtgcctctcccctttcctatctgtgcaaatggagttggaatagaacacacacacacacacacacatagggctttgaattacctaagttcatacacataaggcagctcaaaaggcaactggcaaaaagagagcaatgcctaagtaataagaagcaaagatagatagatagatagatagatagatagatagatagatggatggatggatggatggatggatggatggatggatagatagatagatagatagatagatagatagatagatagatagatagatagatagatagatagataaatggaaatatcattgctatcaccttgaggaaaaaaagctgtcaaggcaggaaacagcagaagagaaggtcggaggggcagggtcggcatcaggagggcagagagaccaggctgagcacatctagccccccaagagcttggcttccctttcagccctgaacagagcccaagatagagaaaagttcagagagcttttgcctgacacctgttcctgtccccaaagatggtgcaggagccctgggggaggggctggtgcacactccgtctcccccacttgccaggacttgaaactgttgcatgcctgcctctcagctgcatgggaagcgccgggcaccagctgcagggggaatattaatgattcaattttcaaccgggttccactccagggcctcgcctgcgacatgcatttttaatcataacaaaacagaatgacaaagggagacatttgcagcaaggcagcccctgctggctgccccccccccctgaagggtctgcttgtgagaggggtagctggttcttcagcaccagggctgtgggatgcagcctctgcctctgtctctctgcttctctttctttttgcttctctgtctgtctccccatctctctgcctctttgtctctgcctctgtctgtctctctgcctctctgcttcctgtctctctgcctctctgtctccccatctctctgtttctttccccatctctctgcctctttgcttctgcctctctgtctctctgcctctctggttcctaactctctatctctctgcctctttgcctctatatatctgtttctgcttatctctgcctctgcccctctatctctctctgtctctctctttgcttctctgtctctctgtctctctgcctctctgtctcccaacctctctgtctctttcctcatctctctgcctctgtgtctctgtctctctgcctccgtctctgctggagtaagacttttttctggagctgtacctcctttctgggttggggaaaagaaaaacctgggtaccatcaggtgagaatgttggtctctggaggtgcagagctccaaccagaccctcagtattcctggttaccagcaggcctgaaagccagaaatgaagaggatgtgagcatggagtttgtaacagacctctctcggcatcctatgaagccagagttcatcttccttcctcctgggtctgaatatggcagggtcttctgtatggcctgcctggagctcccggattccctaactgtgggccctggtccatcctttttagcaaactgaatttgcacagaatcagtccagagtgttcttcttcaccttcctttttgttttatttatttgcttgttcgttgagtgtcactctacatagccctggctatggaactcactatggtaagtagaccagactaaccttgaactcgaagagatcctcctgcctctgcctgctgagtactgggattgaagaggtatgccaccaggcctggctgtctttagcttttcctgattcccttgagaatccagcttgaatacctaccaccctgattctgcactgttcccttgccaggctgctgccttgggccattagactgttcagattagggcctctgaacatgcagtatactttaggcagggtctgggaagagctggaggaggtggccataggaagggctgattgttattaatgtgtatactacttactcatctgacatttgtgaatgacttactatgtgccaagcattggggattgtgggtgcaatggcaaagaggatggacaggctggatctctgccttcccagagctttcttttaggcagagaaggttaaacaccactgccccttgctccttcccatggcttcctgtgcctcgtgcagagagaatgttcaggaaatgttcattggctgtgggttctcagttgactgttctctggctcacacacacacacacacacacacacacacacacacacacaccctggcttgtatttgtgagactgactctgacattaggcctttagctgctttgtcctggttcgtcatagcttggtaacggcagtggacagcatttacggtgctcatcgtatggtgggccaagcacttaactttggccagtccctggcatttgtttttattgctcaacccatttttatcaaagagaaaagggaaacaggagacgttaagtcacttatttcaaggttgcacagcaaatcatgggctgggcatgggatataaacccagggagtctagccctatgatgtctgctctgtggctctgtgtcatttggtaaccacctcttaatcacatggaagagcaagtcagaaagagctttccaaccccatcttcacagtcttatgagtcagcagaaggaaggcctggcctgaaggcttgtggccgcctcacctctaggtagcacccaagcaccgttctctagggctcagcagaacctggatagcatgtgactggtcttaggtggtcacacaaaggggcctgtgaccttgactctgcaccttgttccaggactctagcctgttgttccctaacacctctcttcacctggcacttacccctcccctctatgtcatacaacccccaccccaccctgggaagtgaggagtggcagaagctggaggggtggtgcagtagatgaaaaggtgagttggctccagggctcctggaggcctccactccctcactcagttcacagatgaactgggtgtggaggacctcacaatgagcagacctccatccccaccaccatgtgtcttctattaacccagcgagcaccagggggctgagagtacttagtgtaggtaagtacagtagataggaggtgaagctggagggtcagggagtcactcactctgctacactgctcctgaaggaggggagagagtcaccaaatctgagcagctcgagaatgggaaagacacaaaagatgcaaaggccctgagttggaagtgagctcagtatgtgcaggaacagcaaggaagcacacagtgggaatacagtgggcattgagggagtgtggacagacaggtatgggagtgaccccattaataaaggcgtctgtgaaaagcagaaatcactagtagtagactgaccctgtgggggctgaggcgttgtgcttccataatgagaggaagctagagtggagatctaactgtacaatggggccctctccagccagagcagacttctctcttagttaggatttccattgatgtgaagagatgccatgaccatggcaactcttataaaggaaatcatttaattagggctggcttacagtctcagaggtctagtccattatcatcatggagggaagcatggcagcacacaggcagatatggtgcgacagaaggaactgagagttctacctcgtgatccacaggcagccaggaagagactggattccacagtgggcggggcttaagcattaggacacgcacacgcacctgccacagttacatactttttttccaacaaagccacatctaatctaacaaggccacacctcctaatagtgccactcccatgggccaagcatttgaacacatgagtctctgggggccacacctattcaaaccaccaccacatctaactgcagaagccctctgcagttgccctgctcagcttaggacccatcagtgatatagacaaggtattagggacagtcaaccgtaggtgtttctggtgtcgcacccctacttcctgagcaaaggggtccaattgctcctgtgacctctctttcctttgtagtaatacaggcagaagctgtagaactttctagagattgggttataggggccaacaaggagtactggaaggaataaggtattagattattactgaaactgtcattggaatgccttacaggtgacaggattctctcttcttcctgacttccctccccccttccttccttccttccttccttccttccttccttccttccttccttccccacttccttctttcctctttcagtattttacatgacctcactatataaccagggttagccttgaacctgtgatcctcgtccctcagcttccatgttgagtgctggatttacaggtgtgtgtcaccacatccacacaaatgtcctttggctccagtaaacagctaccctggacggaggcataccagtcatcggactttcctaggactgtagaagagtcgttctgacgggagttgtcagggacggcatgctaaataaatgctgtctcatttggtcctagttcctgtgtggtggggagctcctgctgcgcttggaatcttgtggcaacagaagccatacagctaaggccattttgcctggagggtccacagcctcagctttctgttgtctcctcctgccttcctaccaccgcctctctctctgatttaagggcaggttttattcccaagctgcctcagggctcctctttctgattgcattaaagtctccgtaattctcccctcattaatgattggcatatttttacctctcacgaaaggagcttcaaggcaactcccagggggccctgctctcagaatgaaacaatttcatcttgctccagaaacgcattaaaaagggtttgtcaggatcttatcaccagttagagaaagctaatcaaattacttctatttattagttggtacagcaatgtgccattccagcaagcccctggctccagcagggtgggcatgcacccggtaccctggcaccctggctccttggttcctgaagggatagtactaaagggaccacctactgcttctgctcgcactaagatgggtgatcggaagagctaggatgagctctaccagctactcagcaaaggcgaccccttgaactcacctgtgtgtgtttccctcagccacagggcaaatctcgagcaaggctgtctgtccttcacagaactaaataggaacatcagagttataaggcacagcccaggagttggggtgtgcgccaccttgactgggtaccctttgcatcctgtttcagctgcttagggaagcatggctcatggtgttctaacaagcagccggtgtagtcacacatctgttcttcccagcactctgaaattttgcaatccactactcagagtggcctataaagaggcaagactcacttgaggcccccatcccctgagcagactccagctggagcaacagtgaacacccctacacacacacacacacaaacacacagggccagcctggagcaaggggccatctcagctgtactgcctctgtgactcccggagtggttcaaaagactgagcctcgttgccccatcacgtcgcacaaaaggacatattgattgttccgcagaagcatttcctggggtcctttatatctctctccctcgtcaggcgtaatgaggaggctgaggcacgggggtggagggtgggagggggaggccagcacacatccatccgggtgggatttcttcatcttatcaatcaggactttaattagacacgtccgagagggcagttccatctcggggcaggcggcaatctttatcaagcacgccacatctctaattactgtgtactgacagataacaattggggagcatgtgaaaggtgggggaggtgggaggcagagaaaggacggcggggctggggatggccatttgcccaaggagaatggccttcaaagacaacctggaccaagttattgtaaccccgatgtccagggacagggatgtggccccagataacacccttcagagtgacagcggggagtgtggagaatggccaggctggcatctgggcagatgtgaggatcatgtccccagcccttaatccgtgccctgatacacatagctttcttttcaatatatatagtctggagagggcacaggggtgtctctacacagctctggctggcctcaaacttactttgtagaccaggctgacctcaaattcacagagatcctcctgcctctgcctgatgagtgctggaactaaaggcatgcgctgccaccacctggctcttttcatcgtgttagaactctgtttttgtttggtttttcgaaacagggtttctctgtagccttggctgtcctggaactcactttgtagacgaggctggcctcgaactcagaaatctgcctgcctctgcctcccaagttgtgggattaaaagcgtgcaccaccactgcccaacttagaactctgttattactcagggtttttagtagtctagtagaaatatcaagaaagaccaggtccagggctatacagagaaaccctgtctcaaaacaaacaaacaaacaaacaaaaaacaatcaaacaaacaaaaacaaaaaaagaaagacctaggtttggatcctacgggttggatggattcttcggtccatactaaccagcttatgtgacctcagacaactgtgtaaactgggccccagctgccttccccaccaaatgaaatggttccatccaaggagttccttgactgtgtggaaatgatgtatgtggcgctggggaggttaagtcagtaaagtgcttccatacaagcacgagaacctgagtttgatgcccagaacccacacgagaagtcaggaactatgcatggcacacacttggaatcccagcgctgggaagtataaaccagcaaatccctggagcttgctggccggccagcctagcctaattagtgagtctcagatcccagtgagtgatcttgtctgaaaacacaagatggactgcagctgaagttgatccctggcctgtgtgtgtgtgtgtgtgtgtgtgtgtgtgtgtgtgtgtgtacatgtgtgcatacacacatacgaaatgacccatgtgcaagagcgtgtgtgtatctgcttagcctcccgttagttagagaatagtgcctttctgggatgactcttctctatagtgttgacctagaactaagactcacaggagcaagccgggtgtggtggcgtgcgcctttaatcctagcacttgggaggcagaggcaggcagatttctgagtttgaggccagcctggtctacagagtgagttccaggacagggctacacagagaagactcacaggagcatggatcaccggccaggcagcaggtacgcacactgtcttgggtcacggctccttagcgtgtattctctgtagtggtcttgagttaagatgcccattctcatggtgataaactgaggtcaacagctggttttccctgagcctcaggttccttaagagcacaatgagtgtatcatgtccccttgaggactggacggtggacacatgaagtactcagactcagtcctgcccctggttgctgccctgactggtggattatcaagacagactgcatggatcacactataatgggtgtcgtagctgctaagtgtaacatttctccttattctgctctccctacggagacagggcctcctatacatggggactcttacccaatcctagtgcccctcaaaaaaaagcagcctgaattgtccctactgcagcctcagtatttacacactcagcctgagggctgtgtcccgccatctgctcctccccatgctaccatgttccattcttcagagtgactcagttctcaaaatctattctccagcactctggaggtggaggcagaggaaccaggagttgaggctagcctgagctacattagcccctacctcaaaaaacagaaaccaaacataaattcactcccctctgtctagtctccagtaacagttgctccctgtagtttctgtcctctataaagaccacctggtcctgtctgacatccctagagtccttgtgcccaggccccgggtgccaatatactttttcctgggagttgacttgatagtcctcagtgctctggtctctagggtctcatgctagttggctctatgactctccatgggcagaagcaaaaatgagcttggtctcctcatgcgatagacagagaactcaagtctcacttagaatggttaaaacgatgcttgagccagtatttgaacccacttcagggtggtgttggggagggttaactagtgtggaatgtatcaccagactgagaagagggtaaagctgagagccgtggactgaggaacacccaggggtgtgcctacaggagagttctcataagctttgacagatttaaaagcctggatcttccggcaagtggatgcttgcattctatgatgaaaaggttgaaggggagaggacgaggctatgaggcaagagagcacatgacctggggaatgcccagggaagactgggctgaggagcccagacttggactgatggcgacccctaggtatagtttcagaatgccagccacactgggacaccacatggtattgatgaggacctgtcccacctctgagatgtctagtgtagatgaggacacgaagctgtcacacagattttattttgctggagacaatggagggctctgtcagtctcacagtgggcgaggcaggggtgaccctgggcttagagtcagtcagccttcctggaaagacccagacacccctctctatctctctctctgtcagatacagctttctggagagatgaggatgagagatggggaagcaagaatagcatgcaccttcatctgagggcagcatagatgtaacaaatcccgagatgacctgtgaacaatgcctagttgtgagtgagagtgtcccctcacccaggacatataaaacctttccttggctggatggtggtggcacatacctttaatcctgtcacccaggaagcagagacaggtggaactcttgggttcattcggggccagcctgatctacagagcaggttccaggacagtcaggactataaagagaaatcctgtcttaaaaaaccaaacacacacacacacacacacacacacacacacacacacacacacacactcccttcccttgaagctgatgtgggctcagctcctctgatccatatgaggcctcagacaagcggagtgagcactgtgcatgggatctagggagccagtggagcctggattctgtccatgtgagccttgctttctttgtctatagaatgggaactgtgccatgtcgcagagttgctggatgcatgtccatctctgagggtatttcctgatgcggatcttggtagaatctcagcaaacagcaactgccttggctattgattgatttatttattcatcaagaaaatgcctctgccagattctaggatcacagagcttggcagctccattcctgcactcagggcacagatgtcccagcagccaaggactgaggaagccaaggaggaggccgtgaggttattgcaaagtgagtggggccaggatgtctagattctaatccaacaaatgtaaccaactccctgaaaaatgtgatgttttaaaacaacaaaatccacttattaaaaatggaactaccaacagagttctgtgagcatcgatctcagtggcttgtcacagcgtctgcctgggtggcttggccagggctggctctgtactggctatggcacttgtcatggactggaagctaggcgaggagactcacccagaagcccccattctttcccactagggcctctctcagactgggcttccttacagcatggtggctgcttcagcatctggtgttgtcaacgacatgatttcttctggcctgatcttggagattgtgtgcagggccttctctgactcaactgactgagctggtctctaaggcaggctacgtccaaggggacaggaattatgctcagtgtctctataagtgcagcagtgcacttacaggcacgttcaacctcttgacattgcgacatgacattgtcatatacacttcagaactacataatcaaatactttttaaaaagagtcatgcaaaaaagtctcataacatttatgttttgctgttgttgttgctgctggtggtggtggtattttccactctatgtagtcctggaactcattctgcagaccaggcctgccttgaactcaagagacctgcctgcctctgcctctccttcctgagtcctggcattaagggcatgcacctccttgtccagcccatagtttatgattgtatgttaggctgcattcatagttattctcggccacacgtggtccggggggtataggtcggacctgcctatagtttggtcagcaagaaactaggcaagatcttgtaggtcacagtaaggagttctcatactttgatggttaatgtgaggtcactgatagtaattcatgcttggggttttctgaggttttaaacaggatccttcccatccccctacagtcctggctagcctgtaactcatagaaccagctggccttaaccgcaaggcaatcctcctacctctgcctcctgagtaggggggttgcagggacacccccccccccgctttattaatggctttaaattccatggaaatggaatgggtttggggatttgatggctgagatctaaatggtgcctatcggtatggttttcaccattttctacatctttgtgtgctcagttttcctatttgtaaaatagaattgataagagtacttacctcggagtatttccctccgtctgaggataaaactaatccaatttctgtgaaagacatagcatagtggtacccggcccatcttacatactcagagcttcactggggttgttaaaggtttgcatttatttagagagaaagagggtggtagtggcatggagcacatacggagatcagaggagagccttagctgtctgttcgctgcttccaccttgtttgagacagggttcctattgtttgctatatatgctgagctaactggcccaggaggttccagggagtcgtctgtgtactggggttacagatgtgtgctaccaggtctggctttacatgacttctagggattggaactcaggtcctcatacttgtatgcaagtgcctcacccacggtgccagccttaaaggtgtaaacccttgacatagccacttcatagaatggcttcaaaaggctcttagctgacagagccaaaccttgaactcaggccccactcactcagcctacattattttgcttcctatggctgtgtgcagctgtaacagtgtttgcgttacttttgccgtgacaatttaaaaaaaaattttttttttctgtaacaaaatacccaacaaagcagcttaaggaagggagggtttatttggctcacagtttgagggtagagtccatcgcggcagaaaagcatggccgcccaagtgtgaggcggctgctgacttgaagcactcaggaagcagagagcgctggacgctggcacttcctcttttccttcagtccgagacccgctggaacgaacgcttaaggtgggtctttttaaacctcagttagcccagcctagaagttctctcacaaaaacatgcctagaggtctgtctcctaggtcactagagatcccatcagttgacactcaacagtaacatgtcgcaagcagccacaactgggttgcttcaaacagaaggaatgtatttcatcccagcgccttccctggcttagagttaatccctcccatataagtctcccttctatgtgtcaccgtccagagcgtcctcttctggccatgtgtggtggtaggtgcccctaatcatagcaataacataggggactgccaggagtttgagacaggccttagctacattattccagagcagactggggctccgcgatacaccataagatcctgtctttaaaatgaggggtcattttttttcttttcttacaaggacgtggggccctctcaatctatcatggattcggtaacaacgtctagtgacactcatagtggacacgagtttggcagactactttttaactcaggataagatcaggtcttatcagagctaacaggaggggttgaagatccggcccctggggagatgggaaactctaccctaattccggaactgtctggtatggggcttctggctgtcctgagcaagagccattgacattcctaatcactgagtcacctagatttagcctctgctaaacgcagaaagccagccctgaaaatgaccaccccagggtgccttttcctgcctccctagggtggtacccttgttttaaaagaaaacaagatgcagagaatgagggttcaacaagtgtttttgtttacccggggctagcctctccatccccacctccacccccagcccctgcacgcacgtcccctgtgcttagagctggcaaaactgtccgaagcttggtagagctggagtgcctgtggcctagctctctctctggcaagcaggacctcggctctgcccacgcacttcctttggtggctgatctgggccccgtgtggccaggccgtagaggtgcccaccctggctaatcctaatggctggccctaaccagcccagctcaagccttgaggggttgaggaggatgcctgggatcaacggggatccgtaattggactgttgttctctcattttgctgcgacgcagcgtgtggattatagacaccacttgctatagatttcctgtcagagctcatgaatcaaacgccactgacttatttactgcggccagcatctgtgtgtgaataacccggtgccagcacacactcagaggcacacactcacaaggacactgcctaagaatccaggcctgagagctcttggattacctatgtggtggcccaatacactgagacgctctccccaccctggagtattgaaaccagcaaggggctggtcaccatgccacagcctcgcctcatggtgactgctccattctttgcccatcaaacttaaggtggcttctgtgaacttagggagaaggacagattctgactgcactaggccactgccactggaactgagcagtgggtattgattcatacttgggatacaaatcctggggaggccttactccccatgcatgcctgggctagcatctgggtcttcagtttccacatctgtaaaatgggatgattaacaatgttaacttgtggggcagagtggagaaagagaaagggtatgaaatgggacttcagatgggacctttgacactgtttgcaggcccaaactcataaagaaccaagttacggcttagaaggagtaggcgatttgcccaacactatatgcacctatagtacataatgaagcaagaactcaacgccagctctgcctggccttagagaccagagcactgagattacactttactgcaagtcatggaccctgagcaaaccattcctgcctagtccatgcaggagcttcaagagtggatttttatcatctttatgaaatgtaaacctgatttttctcattcagtgcttattagatatttgcctctttttttggctagtgtttcttttttaatttttaaattcattttaattgaagtagaattgcatcatcttcctccttccagcactcactctggtcctctcacgccccatcccaaattgataacctctttttatttgattatcattattgcatacccacacatacacacatatatgcacatatacatacacatacatatacacagatatagcctactgagtctgacttttggtgtctgcgtgtatatggtctcaagggtgatgttcctgagggaggatatcaacaaagagtctcatcccagagagaggctaattgccctctcccagaagtcattagttccctacagttctttgtgtgtgtgtgtggccgggggggggggggttgtcccatgaatttccctccttcagattagcatgtcttttgatattgccatggccctggtcaggtttttatagccctttctaggagagctactttctgctattctggctcatacaatctttccagatgttccctgagccatagatgctccgatgcacatgtgttcattgaaactgggatccctacaatccattgatctttagattgcggtttttggtaacagtctccattggatgtgaagagaaacttctttgatgaggatgatagccacacttctctgtgggtataaagataagatttagaaggtagtaagagaattatgctggtctagcaaagtggctatttggagtctcttatctcttatgtcatatgctttagacggagactcatgtgagtttgctgcagatgtagaccatacatgtctggcccactgtttctacatctttcaggaagtatttggatacatggtagacaggtgggtgggtggatagatggatgatggatggatagtgttcctatatatcaaaggataggattttaatgtaagcacctgtcatgtttcccaccatccctgtcttgttttgtctcctttactaacagttattcaaagtgtcacaaccggaaacaattgtcagtaaatatagatgccattgcctcaatattaacaaaggaagcatagctcgcgtttctctcaagctcggggtggacctagccacttgagtttgacaccgttggtccatgggctggccatagttagaggatggtaggacattgccaggtttgaagcccattttcatcacaaccataacacacatggttttactgtctcctcttatgtctttagattgtaagtcaagaaagagatcccactactctgggctatgctccctgccaatcatttgtaccatgactaagccaccctggctcgatccattctttatctttctttaatttttaaaaaaaaattatggatgtttggactgtatgtttatcttccctccttcgtgttagcatgtctcttagtgactcttgtccctgatggctatggaggccagaagcaggcattgggtcccctgagactagaatcacaaatcgatgtgagctgccatgtgggtacagcaaatggaacctgagtcctctggaagagctaccagtccctagacctccacttccagatccaccaaaagggcctgagagtccctgtatcatagggggctacataggagcctttaagtttgtcctcaaacccagggtggaagctcacaccttatttcttccatgtctggctggggacatagacggtcgccaataaatataggtgatggattgtggagctttgaggtgatgccaaagcttaagggattctgagcatagtgcagttgtttctgccagggcctgtaacaccccatggtgatgaataaataaatatattaaggccatttgcctaggaagtagacacattttcttccttcctctcaacgagagactcttgtcaaggactaggcagatttgaggttggtgggaagccactaacctccaggtttgtcccatgagtcatctccaaagagactctccgcccctcctggttgtcccactcccactgcgggcttatcacagccttgctcgtcgcccagaggaaaatgcttcatcctcaaatgtaattgtgtctgaggagggtgtcctttgcaaccaggcgggtcacagagccaatgagtgagtcagcacatccgggcagagttaattaaagcagggagggcagctggagttgtggagcacggagcctcaaggcagggacagctcctgttgggaacggggctccctctgtggtctactgagaggtagggatggctcccctgcaaggcagagatggctcatttgataataggattccctctgtggttcgctggcctccaaaagtgcaaagagaggtcgaagttagaaaaggagcaaccagagtgtgcagaggaaatgaagagtggaggtcagggcctctgcagactctccaaaattgctcagcacaactgctaattgcagctcttagagcctcctttggattccattcacaacatctaagaatccccaggagtctcccaggatttctctgtgcctagaggggatcgggagagacagagaggaggaaggaagatgttatccccttagattgctgctgccaacccaggaaggtgtcgcctgacagatggtagatgtccaagccgtccagctgcagaatggtgcccagtggtactcagtgggcagctctagagtgaatgaatgagcgatcgtccaaccaaggtgcagtcgagctactactgtttgataggtgataagggggaaatgggctaaaaggtaaatttataaaagggaatgaaagagctgtactcactaggatgatgtggtttgcatcggtatgaccctcatcggctcatgtgtttgaatgcttggcccatagggcatggcactaatcggaggtgtggccttgctggaggaagtgtgtcactgtgggggtggactttgaggtctccttatgttcaagctacacccagtatggcacagagtctctctctccctgatgcctttggatcaagatttagaaatcctgactccccctcgcctccagcatcatgtctgtctgggcactgccatgcttcctgccatgatgataatggactggacctctgaaactgtaagccagccctaattaaatgttttcctttaaaagagttgccttggtgaaggtgtctcttcatagcaataaaaccccaagacaggtgtaaatttcacaaaggtgaggcgcattggttcctcgctgctaaggtctacagctatatccaactcacagcccacaggcagccagatgtgaataaggacagccgtgcacgcagcacagcacaaaagtggaaacttactggaaacattgagatggttttgtgggatctcaaaaactaacgtcattgtggggctctggagtgtgaactttgtaaaggacaaagtcatattgcaatatgaaaaagttggatggacctggccctgggacaatactcagcttttttgtggatgctcagtaaatgtttgcttgataatgagtggacagaaaaagaaggaaggaaggaaggaaggaaggaaggaaggaaggaaggaaggaagacggattggaaaaggaaagtgacttagcccctaggaaaacactgttgcacatctagggatgcagggcccctgaaccagggttagtctaacagaccttcgagaaaggttgatgtcagcaacagcatcttctatgccaccttctacccatttttcagatacccgttcctatggaagagcattaaacaatctttctcctcctctgcatcctgaggccacccaccttggaagtgtccacccaacatgtcccatgtctcaggcaacagttctctcctgtcctacacatggcccttcttgagtctctgctcacttccacctaacaagcaaggcatggcatttcagaaggcctctgtggctcccaaatgcatccttctctgtagaccagactggcctcagactcacctgcctcacctgcctctgcctcttctgagtgctaggattaaaggcatgtgctgccaagccaggctaagtgtacccttctgaggccagcaggtgccgtgggtggggccagtgctgactctgggttttgaagatgctgggttagacactgatggctctgagcagccctgcctggtagagtttgctgacttccaagggaaatgaacacgtggacgcaacatctttgtgcccagtggaatgttgagctgaaggaaaagccagagaagtgatgtaaggctgcctctgagatagaaagaagaacttcctgagcaagccaaacagtgtcctgcctccctgagtctggagcctcaagctgatctagctacagtgacagctctatcaaggctctctctggggacactgctgagtgagagacccagataggcatggctcaccaaaggactggcctcttcctgctactgtcacagaccacctggacacagcgggattgactaccccgacacgatctctccctttgtcctcgtccttctccaggaaccaaacaggcaatacatcagcgacaggaggctttggcaatgccgagagaagctggcagggcttcggttggcacacgaggtgcaggggccctgggcacacctgcctgctgtctaccctgcctctgccagctgaatacacctttgtcagccaagctgggaactggagggttggttctgtcagagacaagacagggatcgtgaccctgaggtcactggcttggacttgaggccatcgtggccagagaccttcaaacttaaggttagacatccaagaacaaggtgtaggtaggccatgttccctctgaaactagagggaagattcttccacgccctgtcttcacttgggccgttcactggtggtcgatggcattcttcggtggctgtagctatactccattttctaactattatgaggggcaggtggtctgaccttttctcctaaggacactagaattagattaggcctcctgttcctctatgcttcatcttcacaacacagccattctatttccaaataaggtcccatcctccgggaccaggggttaggtcagtgtgtgccttggggaacacgaattgcaacagccatcagtcctctacctccaggggaggggcaggcgcattgtgtcataaatgtcacagtgagcaaaaggctggcttcttttctgttgagtgcacatgtccttcctcatgaaccctcaggaaacacaagccaggataatgtcgtgggcatccctatggctagtggaagatgggaaactccaggatctgtaattggtcctgctcactgtggagacggtcacctaagcagagagtgtgctcagtgtgtgttgagtgaatcatggatgactaaggtgccggcatctccagagaatgggaggggcctcaaccatgtgacggaaagaaaaccacttgcctccaaagtttctctgggggctgaggcaggaggatcttgagtttgagggcaagctgaactctacagtgagttctaaatcaagactaagctacatagcaagatccagtctggaaaacaaaagaagtttgcagtgttcgaagttccaccgtcattggtagggtgttcacgagaccccatggacatgcgtgaactgcaatgctggtattcaggaagtgctcaatcagattctgttggggaccctgggtgtgctgggtctttagcctgctgcggtgatttggggaggcgggggcaccagtcccaggagtgggtgacgttgggactcactttctttgctgcagggactggctggactgtctcaatcagaagtcatgacaaatcctccgagaagtgggagataagagcaatgtgcctttggcgactgtaccacagatcttgacacatgagtgaccagttagttttgttttcttggcatccgttttcgatgtcttcctccctggcggctcggagctagatcatcagaaagccctgagcgccgaactttgggctgactgaggctgctgcctttctattctggctcccagtcgctcacctggatgctcacccgggctgcacagcttgcccactcgcagcacctctgccgacccgtcgagcactctgagacccagcgcgccctctggtggcgcacagacccggaccggctacagtccctgaagcgctcttgcagccctgaatgttaccggtggtctgactccaaggtttcctgctttcaggagccaggcacccttgaccttgggtttcctccctcagtggcataggcgtgatctttctttctttgtcccgagtgcaagtgggtgggacccgggcgggaaatggatgaggaaggtgaggatgatgggtgttgtcctccctgaccagtatgaaagagcaaacaagcaccgttgaccgtggctctcttgagagctccaactatctcgcctttttctcttttactgcgatatcaaaacccactgatagctaaagagatctggcagctgcaactcggctctcgggagagggagatgaacacgcagctattgtgtaggagaccactcagccccatcacctctgagccaggtgctgtgctaagtaccgtgtgtgtgacccagttaaccccgaatagtgagacctatcggtatagtagcacctacgaggaagccgaggcacagatacgttaaggatgggttcaagataacacagatggaaatgtttatcctgacagtcaggctctacgctaatgtcaatccctgccctgcttctagcgtccataaccaaacactgtgcagtctcttgctcacctgcccctgaagatggtacccctcatctgtccacctagaatgtcctactgtcctgccctgataaataagcatggtgggccatcttcctgctccccgttgttcccagaccctgcactcttcccagtctcaccaggaggctgttctctttgggactctcccgctttttctgggagacacggatcctgccagcagctgaagctactggctatctttgcaccccagcacgcagcaggaaattgtcccatgctaatttcctatctttcctactaaccatttcctgctggatcccagcatcctctcccaccggggaaggaatagcgaatggtgttctcttggcctctgagggtccccagtgactgggatttttcagtctttctcctggcttctctatctaaggattgaatctgaagcagagggaaatagcagggggcttattgggctccagcagagtggggatgggtcttgcttgtttgcccagcaggagcttcaggtagaagtttaactattggctattgcaggcctgaccgtcttaggagccccttgccgcttcccacctaaatagcaatgtctgggtggggttagggacagctatgcagggggcatgagataacccttctctgcccacttgtgtctctgtgtaaggctctagctcttcctggcctatacagggacagtttcactgatgctttcttgccttcatcctagaaggcagatgctacttctgacaggcagagaaattgaaccacagagaagcaatgggacacgctcagctcatgcaacgatcccagagagtcccactctgaggctgtggtggccactgctatcctatgctgtctcccaggtgatagagaacttaaattctacagcctgatttcttcttgtcaaagcctgccttttggtacagggctacatgggccagcttgtttcacttggccccatgctgttgttctgaagaccttccccttaccccctttaaagggaacactgccccctggggacagagaacaagtggcctaccaatggtggtcacttcatctggcccaataggtgatatcctgaggtggtcccggggctgtaacctctcttatgaacgtttgtgctctactatggcaaccacaatttctgtccctcttaaagaaaggggcttggcagtcactgtcctagtttcatttctgttgctgttataagaaaccctggcaaagccaacttagaggagaaagggtttctcttagctcatagctccaggatgccgtccgtcatagcagggaagccatgctggcggaaacttaagacatcctgcatatcacaaccagagtcaagggaagggagagtggcatgcgatcaggctcggtgctcggatctctttctctgctcttaatccagaacccaaacccaggtaataatgtttcccgtttccaagctgggtctccctgctacaagacaaccccctacagacgtggccacacgtgaacctgatccagtcagtccctcagtgagactctcttcccaggtgattctagatcatgtcaaatcgagaattaaaacctgccaccacagttgccacccacttctgcttggaccaccttgcccaccaggcacaccagtgagagaggttgtctgggcctctgcctggggtccctgccacactgatgcatacctaatatctcctatccctttctgatggtactaagcaatttttttaaatctaaatttatgacaattgaccagagtatctatacctaaaattctaagatgctagaaggagcccaggaaaccacaagagtgttatccaaatggtctttgactttagaaatatagtaaaactaaatatcgaagagctctaatacaataccgagggctcttgattccttagtttgctttacagagctgatctcagtaatttcaggaggccaggagggttcgatgtagaatagaaacaacctaactatggagggattgtaaaatgattgacatgcctgtgtgtgccatgtaggatccttttaatggatgctgatgaagagtatgtgacaagggaatgtgggtgaagagagaaaaaacccaaaatctgtgatgctcccatgtgccaacgggaatgggcaaatggaaactgatcctagaaagggggaagggactctggtggtaactgccctgctttaacgtagttggccttgcttaaaattattccttagatttagaaatggaagtaaacagggcagggcctatctcagctaagatctctgctgctgtgctaacacactgatcaaaagcaacttagagaggaagggatttatttcactttgggccatcttcaaggagagtggaggcaggaacctggaggcaggaactgaagcagaggctatgaaggagtgacttactggcttgctcttcatggcttgctcagcctggcttaattgcttaattgctttctttgttcctccctccctccctcccttcctcccttccttccttcctttttttttttttttttttttcccaagacaaggtttctctatgtagccctggctgtcttggaactcactctgcagaccaggctggccttgaacctagagatccacctgcctctgcgtctcaagtgctgggattaaaggaatgcactatcaccacctagcagcctagtttcttatagcacccaggactaccagcctacaatgacttgggccctcccatatcaataaaaaaagagttgtccacaggcctgctcacagacaatccagtgggtggtatttctcagttgaagttccctcttccctaatggtcctagcttgtgtcaaattgacataaaatgcaactagacagcaattgaacccttattgacttgacacacaaacatatcactatgcaaccagaacctttcttctctcgtttgcccccaaaatggtatgttaatattaatatcacaatataaaatagttcaacttttaaaagtcccacagtctttaaaatttcaaacagtttaaatatttagtctctttaaaacattcaaagtctcttgcaaactttaaagtctgtctaaaatatctgtaaaattccaacttttcttactctaagagagaaaaaacaaggcatagcccaaagtccaacagtggcaaggtactgttctcaaagtctgagacctattcatgatcctttaagctccaagggcttacagcggttctctggagttacacctgtaactgcagggtatctgggccacttctctagctctgcccactgcagttcacacagcgtgtctcctaggctcaggacagctctattccatggctgttgtgcccaaggagacactaaggatgctagcaatatttgatttcttgagggacataactgagtttgtttcgtgaaaactgaattcattgaacacctaggatagatgattatttctgaacgtaagttgttcttaataaaagtaaggaaacaacctgactctacctgaattaaaaaataataataataatttgttaatggttgttgggtttttgtttgtttgtttgtttttttcgagaccgggtttctctgtatagccctggctggaactcattttgtagaccaggctggcctcaaactcagaaatctgcctgcctctgcctctcaagtgctgggattaaaggtgtgcgccaccaccgcccggcagtaatggttgtttttaaaagatgctttttccttgaatctgaagacatcaccatttggctatgagaaaaaagacttaaggacttaaaatattgctgtttctgaaatttagattagtgattccaacactgaagaaattcagacatctgcagggtggggctcaaacacagatgacagcagatgtgggcctgaagatattgaacagctgtacctgcagagccccacccccactcctttgagacagggttttcctatatagctatgattgtcctagaactctcgatgtagaccaggctggcctcactctcagagatcttcctgtctctgccttccaagtgctgggattaaaggcatggaccaccacgcccacttctacagaacgctcttaagaaccactaacctgcagaaggatcagaagtttatcctctgctacataatgagtttgaggccatcctaggctaggtgagattctctctcaaaaagcagaaagaggagtaagagacaccaccttctatcatccctgatggggtgggcgttgctgatgtataccaagacatgttcctccttctgcaagactataactgccactaggtctggatgagaggattacccactgttccagaagcagtcaatggctgggtgtgcatgcctttaatccctgcactcagaggcagaggcaggaggatctctgtgagtttgagaccaacctactctacttagtaagtttcagggcatccagggctatgcaatgagactctgattcaaaccaaaccaaaccaaacagaggctagcagtgcctgtgatcatccagaattaatttatgttgaaggccttattcatgcatgctttctctaaaaactcaagcctacgctgctacttgaggtaggaggagccttaatccctaaatctgaaaaactttcaaagcaccagtttgacaatgcaagtagaacactcggccaaggggcacactaaaaattgtatggaattgcctgcaggctgtgtgcatgaggtgactatgagacatacatgaattttacatgtagacagggctcctatttctccaccatctccttatctgtcaaatcttatcaaatctgtcatatcttatcaaatatgccctaatgagaaatctaaaacagctccggtctcaggtctcaagcactttcagttagagatctacacctgtattggtatttctagatatgaaaggaacatgaaggcacacttgtgtaaagacagggaaaggcacaaatttaaattattgacattgaatacttaaacacaaaaggatgagtttttccccctaggtctgtctgtctgtctgtctgtctgtctgtgtgtatgaatacactgtcactgtccttagacacaccagaagagttcactggatcccattacatatggttgtgagccgccatgtgttgctgggaattgaactcaggacttctggaagaagaatcagtgctcttaaacactgagccatctctccagcccaaccaatgcaactctttttaggggtgaaaaaaaaggacaaacttttgttgagcaattgcgtggtgcaaggctctagggaaggcaggcatgttgacaaggggggaaagaacatgtatgggcagagtgtagcccttattggccaggactctttggagtaaaagacatcaagacccaggagaaaacttccctaaaggtcatgctgcttctgtgtctagggcagatcccatcttcagggagagctggatccaggaaccatcagggctccctatgtcatcacgccttttctcaagggacacagtagaaaaggatggcaaaggtaacaaagctggtgtccagctgccaggtccccattttcaactgttggagtgacttgctgaagtgcttcaaggcctgaaagtagggatgtgtctgacttcccagcatccctccgtgagtgtggcagagggaaggcttgtttctgaaagcccgtgtcctcgactctccgcaccagtgttctaatctgggttccttgacccatgtcctgggctgcacactctcaaggtctctggagcagaccctggtgtctcagctgtagacagaggaggtagaaaaaagcagacactgagatcttcagaaagtacagagctgtatttcccatgagactgggaagtctaaggtcgataacttgtatatggtaagagtcttctgtctctgtcctccaatggtagaaagaaggggaggaagaagacacaccctggctacctctcccattccaccattacagtaaggattacgtttcctacacgtgagtttggagggacaccttcaaactacagcagagacaaaatagaaatactgaccttggaggtggctcctggaagccccgcagaacatttggacaagtgaaagctttgacagatgtataatctttaaataatacacaatggcctgagtaccattggggtgtgaccccgagaaggtcctgggtgctgaccaatcagaccaacagttcctccctctctagtggctgggggcagcaatgtggggagaagaggctaagtctcgccctttctgtttagcagtcattgcctttgttggtggcacctcccagagttctgatcttataagctgctgttagtccttcaactaagatttagatgaagaagatttgccatgtctctgccccaagaggtctcaactctgtacatacctggttacctttctgggttgctccaccctgtcctaggacacactactcatcaatagctttcttcttcaagttgccttggtcatggtgttttatcccagcaatagaaaagtgactggtgcacacctcatacacggcctccatcatgcctggatgtgttccttctccgcccctcctgcagaagttgggcagggggttctcccacattatgggtagcctagaacacactaagaagctctatctgtgttgtcatgttcagacaactgcttggaagaggtggaatggttggctggggtagcgtccagacaaacgaggtcacaatccacaatcacctccgcctacactgtagcctgagccactcatggggaaagcactgggcagtccattgacatgggagacagtcagctcagctccatctgctggagcaatgagctggcagacgggggttgaaccaggctttctctctctctattccctcccagggtccttggcagcagaaatggttaaagcttaaacttgcatattgatgacgcttcttccaacatgaagggttgagagtaacaccttgtctgcacaggggacagacaaggatttgcagccatggctaagtcttaggcttctggaatggcagttctttttatacctgttgaaagactaggttctctctcgggggatgagttgccatgaatcacaataagactcaaaatatacccacagcaactcgcaggatgatcttgcctctgtggtctcatctctgcctctgtgtgggagcccgtggctcactgtgatcaaccatgccttgggttattaagttgggtgcttacacgaagtggaacagtgggatgatcacgctccgggtacatcttggagaagggttagactcttcgagggtttgcagatagaatgggagaatcagaagcatcgaatattactcattgttagtaacggcagacactagctaattcctcagttgtgctatgctctctgtgggcacctagcctcatcaggctggagtgcaatgtggactgagggcatgttacagtgggagacaccactttggagatcaacctcgctgtcttccttcctctatttaggaaaggaagaggtaaaggcagctgtgtactaggcatatgcaaactgcatacccacctgcaccaaccttacattggttgattaattgattgattgattgattgattgattgattgattgattctctgtcatcctagatggcctggaactcaccatgtaggctggtctaaccttgaacacagagatttgcctgtcactgcttctgcttttgcccgcccactaaatactagaattaaaggcatgtgcttccagcccagctttagacaaaccacaacactgaggtcacatcacagacgtatatattgctgcagaatcatgttgttaacaaagaacataaccaagacttgaactaagctttgcaagactccaaagccagtgttctttgccagtgataacattcacagtaacaagttctgtgtctgactccaatccgtgtagacattgtaacactaggcatgaacaaccaagtcacagtatccatcaggatgagcctggtacttgtcatgaatgtgcttcaagcccagtcatggagatgatatcagcttgatgccgaatagatggaaaaacaaaacaaaacaacaaaagcaaagcaaagcaaaacacacacataagcaatggggtgggggaggttccccagactgagtgtttcattttttttccccttcttgtctgaacttggatagctactttttggctgctttatatatcagggtcctaggttcagtttcagtggaaggcagctatctgggggctttcttttaaaatcttaaaaccagtgctctcaaatggtgtttctgcaatcccacaggcaaaaacatgtctgctagtggcacgtctctcttctgtggattgaagacatcaagagctatgaaggaatcaagacaccataaaactccacacgctagctcatcctttgatattgggagcaaggaaacactctctatactggaatggataagttagccaggacccacagaattaaagggaatgtgcactggttgaagttggaagaaacaggaaaataaaatcacttgtttgtgcttgaatagcctttcgagttggaaatgctcaggaacttccgtatgtaatcctaggacctatcctagtggcagaagatacctcctgggtaccatttcttgggtatctgtgcagaaaattgtgagagcatccatttggcttagaagtactgaccatttgagctgccccaaccaagcacattgaccctgatgagaaactttggcttagcaatagaaggtcctctttttcatcacctcctctgtcttcttctgtcagcacttcactttctctgggtcatggaaagctaaaatataccctctggcttctatccataactgggtagtcccttcctcaacaccacattccttctcagattttctcccctccctgctgataacaagcctcattccaatttgaaagaactcttcagtaagagctaggtgtgttctgttagacccatgtgccatgcagagaggtctggctcacaagggcctcccaacaggctgttttgctaaagccctgacataaatctgttggctgtacaaagcataaatttcccctgttatccattctgattagattcccaagctagcccccaaagccactgatattgattccgctgaaggtagcagggtatcagagagtaaattcagggtggatttgacttggtttttaactctagattttcttctggcccaagcaatgtacctgcagaccttcagttccctcctgaggcagaaagaggagggcactggtaccgaccctagctgcagagtgtcttgtttaccctgtggtaagaataaactgtggggcagtgtctagtggccggttctgagtggacactcagaaatgttggcttgcgcaccttccagctcactgagccagaaaacacagcataattagtacactccttgtgtggcttgagaagtgaatcacaatgaaaatgaatctttaatgatgaactgtggtgggtttgaatgagaatggtccccataggtccatatatttgaaagcttaataaccagctagtggaaatgtttggaaaggatcaggagatgtggcctttaaaatttcaaaagcccatgctaagcacagtaaatctctctctctcatctatctctatctatatatctatctatctatctatctacctacctacctatcatctatctatctatctatctatctatctatctatctatctatctatctctgcctgctgcctgtggatcagactgtaaagctttcaactactgctcaagctccatgcctgcctgctgcctgccatgatgagcataaccctgtgaaacagtcagcaaatccctaattaaatactttcttttacaagagcttccttggtcatgaaacaagagctaaggcacaggcccaaacagaaagtccaccgtaagactaactaagaaacagactgtcttaaatccagcacttgagaggtagaagtagaagggtcaggggttccaggccatccttggctatctaaggggtttaagaccagtttaggttacatgaccaacagtgtggctgagtagtgagagaagggaggaagggagggagagaaggagagaggaagaaagaaagagagggagggaaggaggaagggagggagggagaaagggaaggaagaagaaaatagaaagtcttcattggtgatatttgacaaaaggcagaattattcaatttggaaaataagaggggcagatcatgacagttctgtgagcagctctgaaccctttcagggccttggagatgaccattatttatctatgggaagaagttctcagaactcactgtgatatctcctggtggaatcctttgaagacaggcaagatgattgggagtttaaggcaagagccagacaactggcttgcctgctagaggctcgcctgctagaggcacttgctatcatgtctggaaacactagtgccagtgcctggaacccacatggtggaaggaaagaaccaacttccaaaagttgtcctcaggtgtctgtgtgcacaacgcagcaggtgtgagtaccagcagctgcagcttctgtatgcacatcacagcaggtgtgtacaccttcaactgcagcaattgcttaggactttggccagcaaaagactttcttgggaggaggttttttgttttttgttttttgttttttttttaatcagtagttttgatttgctggagaaaatgctatttattaaaaagcaacctaactttcagtccattttatttttgtttctgtatccatataaactagggtcctatttatgttcacagacatggtaacctgatcccatcacctgcccatgacacaccaccagttgtgggagactctaccggagttgcccacccatgaaccacctctactttctttaacagaactgaataccttggttttaagcattcatgtgttcaagaaaaccgagccttcccctcctgtgagtaaatacatttttaaggtagtcctgatagaatagttcttcattggcagtgaatgattggaaggtgagtgtgtgactgagttctggccactttaggagtgagcatactggtgtggctgcacatgtttgtaatctaggcactgaaaaagcagaggtgggcaaatagttccaggccagcgggggctatatagcaagaccccgtctcagaaggataagggcttgaaggcctaccacactgtggtagacagcttgtctagtgttcaaggccctgagttccatcccctagaaagcaagcatgaagatgaatcttctgcaataggaatggagaactcccaggaaaaaaatctgtctggatcaaatacaagtcgaactaagcaaagcaaaccagagaaaggaggaacagtgtttgctcaacacaggcaggcaggcattcagcccttccttagagtctacacagcaggcaagtgattcaggaccacaaggaccacccttcacctatagccccttcccacccaaaaaggcccaaggagagtagcaggagctttaagtaagaagtcacagacccaggcagttttgttttgtctcagccctggtacttcacacttataattccagcacccaggagcaggaggcttgcccccatcttgaagaccaacctggtctacatggcaatgtcctggccagccagaactatgcagtaagaccttgtctaaaacaaaccaaaaaactagaacaaaagaagagaagagaggccctacccccaaagccatccatagagaacacatgaatccaaaaggacagagtttgggagactctggagacagctgcaggtgagagaaagcagggactagtcagtgagtctgagacccaaacatctgtgcttcggtaggccagagagcccgcccctccttgtcccgtgtttgtccctttctctctggggttcacatgccctccacaatgctgctgacgcctcctttctccaagtcccttcattgccaggtttgcagttgtctttcagagcaagtccctggggttgagtataaacctcaccggcgccttcagtcagcaggtgtaaagaggaattactgctgttccctgctctgctgggtctggcggaattaccccaaagccgtgtttatcatgccattgaaccttgtgcccatgtttaatgtgctatctacgctgaccccaggtgtctctctgcttcactgctctttcccgcagccatcctacagtctgtggctcggagggtcatccctgacaagtgtattactggtgtttatccatattaaatcttggattggtgactgcctttttactcatctttctaaactcgctttggttctcctgcagcctcgctttctgccttgtttcctcctaagtcagggaacctattgtggtctccggtttccaggcgctcatgaagaagaaagatgctatggatggtcctgcctgcaaagctccagccttcatctggagttgctactgacccattcataattgcatcattgagagcagtgggggagctcaccaaggggattggtttagttacatcatacatctgtaaaggcaatggtgggcctgagttttcgcctatcagaactctattgaaggctatcttctttatcatgtcttgcataggcatagcacgttacacttcacaaaacctttcatattttccccctaaagcctggaagcccatgccaatctcggtaagacattccgagagagcgaaagcaaagtgcattttatttaactgcatcattaggaaatcaaaacatgttacacgatccctagttgatcgtgggcatctatttggtttgtgtttttattttgccttgttgatgtgttttgtctcaaacttcacactcccctggcctcagttgccccctggctggaatctcaagcacgtgctgccacacctagctcaaatgactccaattttgattttccttttctcttgttatgtagccctggcctggaactcaccatcccagttttgaattctggtgtcagtactgagacaggttcaactgatgtgattttttttttgttcttacttgataataacatttcagtgttaggtttaatttcccccaaagtttcatgtattttatgttttatttaaaataattatacttgaaactaaaatgtaaatggggaaagtaagtgtgtgtgtgtgagtgtgagtgtgtgtgtgtgtgtgtgtgtgtgtggtggcacagtgggtaaaggcacctgccaccaagcccaataacttgtgtttgattcctgggccctacttggtaaaaggccaaaactaacccttaggacttgtcctctaacctcttatcatctgcacagggtctgcaggaagaaccaatctgagtgctgagcagagagctttaatatactattcagctgtgctagggagcaggggatctttggggtgtgtgatgggtgagcaggtaacagaattttgacctccacatatgtcccagcgcgcgcgcacacacacacacacacacacacacacacacacacacacacacacacacacacggacttttaagaaagaaatgtaaacagagtccaattttccattttcttcgtggcgggaggactttgacagcgggacatttgtagctaaactatcgtcggttgagaagtttttctttaccaataataccccagatgaattgcttatattatcatttctagtcaaggatgttttgtgctcaaattgatgccagagtcacaagaaattggatgataaattaatatgtgacacagacaaaaataaggtcaagtttctttgttataagagggggaaaaaaaccagaatgcactgtaatggaaaatacttaattagatcattcatccagtcaatagctcgttgttcaatgcctcttggctaccaggtactgtcaaggcacagttttccttcttgttctttctcctctcccatacttctctgtctcctctctctttgtgtcctgccaacacttcttttcctcccccagaactttgtcaacaatttgattacagccatgatgccctctgattgtcctggcgatagggaggaaggaaggaaaatcttcatttctcaattttctggtccttcatttttccctactggcttctattgtcttctgcacaggacctacaggaagactcaatccgtgtgctaagcatggagctttaatatactattcagctgtgttggggagcatgagatctttggggtacataatgagggggcaggtaacagagttttgaaacatctggactttcttccaagacccttggtatggattacagatagtagtattaagcaagaagcctagcatttatcaacccaagatccccctcccccttcatagtttttggtgttatggtaacagtgctaatacaacacaagctttctagccccaataatggcccattagagcttcaggaaaagccatcatgtttctgtagcatttgtctgtcagcaggagactattacagagcacaaactcacattgtattagtgttatcagttccttatgatccttggcacaagtgccagccaatgggctggcagtctgctggcccccactggatgatataactccatacccagagtcaagcatgtgagaaagcagcaggtctgcagaggtgtgtggctgaggacattcctccagcctggagcccatgacacatggttctagagatgctcaggctaaggtcactgtcttggtcgggactgtcttagtcactgtggactgtccatggatgccctcccaggatctgccttctccagtcctcaccgtgggctggagcagagttgggtttggcttatgatccaaacaattccatggagtcagcctcctcttcccagactggtggtaagaagcgtgggtgtacacgttgggtgtttcccccacagccttgttctctcctgcacccttgacttcaggagatgtgggaatggatgagggatggcagaaccaaactgtgaaccctaatatctgctggactcagtgaccagaggatagatttcctaaaactgcctggtgtgtcttattcaatgatgaggccattgagctctctgggtgtgggggagagaacaaactgggtccaccagttccgttgagtttttgtggcttgagagatacaaacaacttcatttagcagttggtcctagagcatgtgggaggaggaaattatggaacttgccagacatttaactaccaccgccttatttgtggaaaatagaaggctggtttgggaaggctgtcccaagggacggaggataaaatcgaaactgggctctgatggaacaaaggtgtgctttgcaccacaccagggacaagggctgctgtgcttggagtggttgccaagatggcaaaagaccccaggtgcagacatgtggcaacactaaggatggagaccaggtaggatggatccgtgtggacctgtggattgattgaactcatggcgtacttggagctttccatccaaagggaaacacggggttttggagtatagtaggctgcattaaatggccagggttgtagaccgtatattaggtcaggagagcaggtcatgaaattggtctttaccaactagcaatcccttttgccctctcaggactccaccatgatgtaagaggtggacacagatgcccagaccccagtgtaatacacccagaatacgcccagaagttcatgctactgacctcacaactaatgaaagaacttgtgctcagggaaggaggaggcagggaaaggagagagacccgtctgcacacattgagaggtggttttaagcagagatccagacccgggctggcatgttttgccagtatttgttgtgtgacctggagaaggacaattctgcacacagggaagtgcacgaatctctccatttatcgaacctgatttagagttctaaatgcaggtgcttctccgctgagggtggggttacatccccatcaacctatcatgaatcaaaaggctggaaaggcattgaacgtacctatcctagtgaaccttgtggcaaaactacacagtgcactgcgggcccctcctccccctgtgttttggggctgagtacgggctgtagctgtcactgcctggcacgtcgagccagtatggcgtacatctgtgtgctgggaaaaggatttcccaccccccaaaaaacccttgctgtgtaacctttgtccgtgagccactcttcacagtgcattgctgggtacaggatgctggaattctccagtgaacatcatgcgtgcgcgcgcagtcactcctctcatgagacttccaatctatggagaaggggcggtacctctcacatcaataaagtcgtgattgctaactgtgttaagcaacttgaaacagtgtgactggcagaagatgtgggtgctgtctgggagggaggggggagtctattagatggcagttgtagtgatgggctgcggaggggtacagagtcacctacagcattctttcatgtgtccatggccatacaggccaaagagcaggcttcattccccactgcgacaggagtcattaactgtgcattttcaaagccctgccaagccctgagtgtgctcagggaaaggaagaattcagagaagcccgtcaatgaggccttcacaagagatgggagtcatgtagaaaccaactcaaggacaatacctctgcgtcgctttgtctctaataaaatacctattgggttttgtttatttgcttgttttgttttaatgatgcaggtctgctggaggtctgttgatagggcaaacatccctgtccatcccttgatgtgatgcctcaggtccaccccacactttcctccacttcagcacatgtggacagtgtcagctgccctcgccagccttgactagtgcatttgttcaagtcaaacatcgccccttgaagctagcacctactccctaagtccctccacagtggctaacccctcctgaggctctcagcacccgccctctcgccctctcggctttattccccaaacacatagcactgcctacaggtacactctgcttagacattattttggtgataaaattatatcccccttcccccacacacaccccaacactgttcattgtcttttgtagagactaaggtaatactctctcctgagggcttttcctcccccttttaaataattctgtatccacaccagcacacataatcaaattgattattatccctgtggcaggtatatccccaaggtgaaaagccccacaagaagagttgagacttgacttatggctcattttggtacagtggcggcccatggtacagtggcggcccataatgttctggttcatagagggagaggcagacagggctgcaggtgcgctgatagctgggaattcaggtgtgcgtttgaaagtgtcaacgagtgcctgggagaagctgtgacaggtaagttggaggttttaaaggccaatcatgttttcccaagcagacagggatttatgcctggagcctagggcctgagtgcactgttgagatttgccaatgggcaaagcctgacttttgtagtctcgaggcattttatggacacacaccctgcatcaagccacatggcagaggttcggagcagactggcccaggtgataggagcaggggaaggggaatctgtctctctcctctggctggctgcacctcacctgctggcctgacccttaaacacgaggttagagcctgcgaatttctaagccactggccgcttctctatggtggcgatggggaggaatgtgactcgtttttaatttagagaacaaaccagttccaagaaactcagagggggtttgcaagcctgtcggttcatagagctgtgtaccggtgttggtggaggtgggggcgggcttggtgagtatgttagcaccctcccttccaacagtcccaccaagcagtttgaatttcccctctgtttttcagctgcaaaagcaagaacacaagctttaggactctaaaacccagccttcctactccacaggaggtggggaccttgcatgcccgccggagtgtcctattccattgaagtctcttgggctggccccccttcccccaccccagctcgattctgtcactttaagtccagcccctgagagatagccaataggagccaaatcatacatcagtctctcagccttaaagctacagtagggttagtgggctccaagtgtcgggcgccccagcctcctccacggcttggcgtcccctctgcccgttcgctgagcgcgcggatgagtgggagcgcggagctgcgcgcggctctctgcctccggctcccccgccgcggccgcgtcctcccactccgccttctcgcgctcaccgtgcccgccggccgggactcgcacctcgcctgtgcccttcactcgtcttccgcgtgatttgcccgccgcctttctcctccaactgggaatgctaaaacgggactgatggacgtgtccgaactctgcatcccggacccccttggctaccacaaccagtaggtgccttacttttccttctgtctgactgtccttctgcccatccaagtgtctctatcctggatgtcgcagttcctcttctacacattcctgaagtggcagggacctaggaggggcgctccggacgtaggagggggcaaaccgcacacttgctccgggtttcttaaaccctcctcttaacttttcccgcatcatctttcatgagcccttacttttagacaacagcggcgctttctcgctcactctgaatttgctccgcggtgacaaatatcaccatttccgtgacgggcaggcggaagcccagaacaggtgcgggaaagtgaccgcaagggtgttctgtcccgtcctaggaatcctccccacaggcgctttgctttctatcctgggtacccaaaattatttcagccagggccagaaaaatcaggtgtgctgggggtccagtgaggggaactacaggcgaccaacgttgtgcgggcgcggggctcccagcgggacgccctctgggtggcggtcctcaggagcccctggggcacggcagggcccggagcgctgcgctccgcacgtcctgcttggggaccagtgtcccaccgggagccgggtggctcgctccgtgctgcggaggtgaagtcgggtggacgttcggggctgcatatcgggtgttcgggctgagcaacgccagtacgtcggttaagtgagctatatgggtggttgaggctgcggggaccggacacgactctgggtagctcctggttcttgggacagttttccgagtgtaccgggtgggaaggggagaaatgaccctaagcctcgattatcacacgggccacccgcgctctccaaggtggctgtgccacctgctcaagcacctgccggggtctcccttctggcgctccgcgtcccatcgcgcttcggtggaactcggagcgttcgttgtgcggtcctggaaatgatcctccgcaggcttaataattaagattaaaaagaatctaatgaaaactctagcttctcaccggcaggtttcctaagtaactttctgtttttcttttctccaccctcaacgcccccctctctcttttctttttttccttcttttttcctttttttccccccctgaacgaaacgtacagactcaggttttcttccctatcacggtcctttcctttccacaccacccaccctttcctcgcaccatccggccaaagaacttgagtgacagctttaagataaaggctgtgtgtggaccacctctggttaggtgaagtttcgaaccctccacctcgcttcggagactacctccacttgccgggccagcgcgaggaggcaacttagcagcgaggctgctgtgttaatagcaggactgtcctgccccctaccctcaccccagaaacagtgaccctttcgcttcagggattttttccccctggcgaagagttctttttagatacctgcagaatttaaacagaggttcaggaggtcttgagggaaaggaaagcggtccttaattataatggattctgatttccatcagcttgaaaagtggcttttcaattctctttcaaggttatgccgcttctggagctgccgggtgggagtaggggttctttgcttggggaaggtcaggctcctccccaagggagtatgagaacctcgggaaccccggagagaagaagagggttaggggtgtggactggaatgcttgatggacatttcctcacataaaattaccaagtacgtcaaatattggatatttaaattatttaggctccctttctccggaggtgacctcttcccttgagcctgaaatatctctgtgtttgtccctagctcaagtcatcatcgatcaatatgagattgtgtgtgcaagcaggggccggaatgtatgcatggatagtgttgagcagaccctcagaaggcctgattacagtttggggagaaatgtggattaagaggcgactcccagggaggcaacaaacaggacgatggagccaaggtcttagaggtgtaaggcgaaaatcatttatagagtagcctggtgtggattctttcccctttctggctcttttcttttctttctttcttccttttctcctccttcttcttcttgaaaatagtaataacaataaacaatagcttctccatccatgagtcataccaaaagtcaaaagtatgcctgcttaaaaagaaaaagcaagcaagcaaacaaacaaccccaaacccaggacctgccgagctgcagctctaagctatagttcatttgcaggtgtttgctgaagctgtggtttgcatttgccttggtacagaggtgccggggcataaatgtgagcatggtgaggacagaggctggtatgtgggggaagcaggcagctttggagcctcctctagcaaagtaacaaaatcagggagaaggggaagtagggggggtgctgcacactctggtgtgttggaaggatggtggcatgcatgcatttattacaggctgatgtttctcagggaacccgtgatggggtgctgtgtgtgtgtggtggtggtggtggggacatcatgtgctctgtatagatggtttttaccctgtgtggattcattgacattctcagactttagaaagcccaagggcacagggaatgtgagttgtgggtgggggtgctgctctcctgtcccctcctaagacagagaacatttgtcacattctctgtgtcatcctcaccatcccaggtgagaaatgaacacgcacgtgtgtaccttcctgccttcctgcccttccttttcatttccccatagtctgtcccagaggtgactccctctcctttccaaatcagtgttttatgtacacaggcaggctgagtgtcctctcctgtgagttgcctgtgtaggaatgacttgatgaggcactgactggagaccagaggcacagaaccccgatttgtgcatctggggatggggtggggtgggggtgcagttgccaccttctgaggaggaggaccattgcactccgatgttgttaaggaaacaaagaacaaactgtcctgaaggtaaaatatgtgggttcacacgtaggaaaaatgccacatggtaattcaaaatcagtgacctggagaaaaacaaaggggggaattaatttttaatggtacattcgaaaataaatcagagagaaggcattagtcgtggttttccaggggagggggctccagaaaggaactctttatgtgtctgcactcctctggaggtgtccagaggggttagaggatagtggtatagctagccggagttggtcagccctgaggaaataaatagaaaaaaaacattaggtcagtgtcacagggccctagtcaggactgaggcccttccgggtcggtgacagcgctaatctccttggaaatttcctcttgggatagattattttaccaattcctcctctcatcttagaaacaattttctattctgccaataattataatgtgtgtgtgtgtgtgtgtgtgtgtgtgtgtgtgtgtgtaagaaattttcttttataagagcatgcacgagagaaaaacttgatcccccaaacaggaaccttttcattctattgatttggagtgatcaataaatatcccatttagtcgagaaaagggacagaggagactttcgggacagcggtgtatgtaggagggggtggaagctgtgacagtgtgttgatgtcgccctcagccttcttggagggccctgtcctcaaccaagctctcacaagtccgtgcttgggcctcgagttcctgtagccggacattttgtcagatggcttttgaggagaacctaaagtcattgaaaagtttctcttcttccttggtcctctgcaaaatgtcttgcttctctggagcagggctctctatcatttccaggctgtggtagtacctgagagggtgactggggaagacctgggagcaggcaggctgcagaaggagagtgtcaggccaacagcacacagaccaggcacagggtgctattggcctggctccctagaacttagctgtaagaacttgtcatctcaagatgattaagccacggtccaaattttaaaggaaagaatggtagatctttaggccatgacctaccttttcaaataaacccagacccgtaccctgaatggccttgactctgatgccctccctcacctgctagctttcctgaggtctgcccatctctctcagcaggagaccctcaaattgttcctcccgcatacatagaagctctgcccagcattaaagagccctgctgatgggctctgggaatgttgggcttggattccgatgactctgaactcaatgttactgcaatgttccagcttggctggaatgtttagctcctagtgtcccttctctgtaactccccaggggtgcctgggcaggcatgggcagtgggtgcaaggtgtgcagattgctccctggaagccatagggtagagtggaggaggatgggctgtagccaaaccagtcagtcagcttggaagcatcctgaacattctgctgtgtgcccttgagatgcctgctgcttccagctctgaaggggagtgtgtgtgtgtgtgtgtgtgtgtgtgtgtgtgtgtgtgtgtgtgtgtgtggtatacatctgtgaccccttaaagaaccttctttaagcctgctgagtttcccatctctgtccaacacactcatacctctatggaatgcttacagagaggaccattcctcagaggtacgacccacaggcttcagctggccctagtctcttctggtggaaccagagtggcctggggccgggttacatctggttgccccattggcccaatgtggtcgggtccctgtgcagggaggctgtggtgcttataattgcaaatgtaattagcagaccagccatgggggactgggatgctcaacttctctgcacatctcagtgacccctgtgatagctagcctggcagattaaccctcgaaggaccagcctgcctcttgccaccagtggggcccactgatcttttgctgaccacagcagagctgtgctgagaccagaccccttcctctgaagggcctctccgggcaatgagtgggagaggttggtacttggagatttttcttcccttggacactgtgttagtgaccctcaattcttgtctgctgggacatttccttccccgttttcctggtcacaccgtgacacggtggtgggagcctttggctgcatactagttggttctgtgaccctgggagtcacagtactggagaaagcagagctctggaaagaactcctgatgactgctgcccagagcactggggatcaggggcaggggcttatattcacccatctcatcagtctccgccacaatcagcttgcaggaagtgattgcttccccctagcgtgagctcttcatgagtgtgtgctctgcaaggcagcccggcttctgctgttctactcggagatttgtagagagctggccattgagttcatcacccaaagctaaacaccaaacacatgcatcagcctgtcttctccctaccccacccccaccaagagcgcctttccttttttttttttttccctttctgccttggtcaagattaatatcagagaggatcttaaggagattttaatttacaagaactggggtaaagaagtgtcaagcctttgggtgatcctatcaggagctgcatccagccctgggtcactatgctctagagagctgtgtgtgcccatgtgtacaagcatgcactatgggcatcgccccctttaaaaggagtgacagtgttaaaaaaaaaaaaaaaaaaaaaaaaaaaagctgcctgcctgttccttgcctaagctgagatcaggtctggcgacattccagtaaaaactctcaccttgacatccagagtatggaagggaccacagagggacccactggctggtgttcctgtggtacaaaggattctggcttttctcagggcctctttcctgtctttaccctgagctggactggggcagactggagagtgaaagcagacctgcccccctctaacagatggccacattccgaggaacacttgaagacgtgggccattctactgcaggcctccatgtcctctgctctccctggatagttatgtcaccaaaacctgaaatttaaagggtaggatggcttcttaaatggaggaaaataaactgtagttcatctgtcctttctgtatgggatctgataagataaggcagggggatgaatggtcagctgaatagcttacaattaggatcatctcagtgtaaattaaaattatgtaaatctaaagtttgtttttcagaaggtgaatatatgtgcgtgtgagtgcgtgaccactcttcattttgttgtgttttaagacctgtatagattttgatcttaaaaaacaaatttcccttttttgttcattaagcccccccccccacacacacacacaactgactgttccatcttacattcagctttgtccagagtggggtcttttctattcccggcttccattcagcattgctggccgggatggagccatttctgggaatgggcttctagaatatgttattttattcttcaatatcatcttattcgggggtcaaaggggaggagttgcacgaactctgacgaggttttgtttttatcatctggcttcaaatgagatcaaaattttttgtttaacagattagcatggtcctctctagaccattacagaaacagctagctggcagccggtaactggcattttactaaaacatggcattttaaacagagcaaaggtgacacaccaaaatcacaccgggcactgccatcccagagcttcagatctgaaatataaagcattctttacatgtggcactttaattttcaattgctcaaattaactggagttcatgtattagtttttaaaattattgattcttttgctaattcactttgggtttctggtttgagattttattatttttgtttgtttgtttgttttttgttttgttttgatctgactgtgtagctacctgaaactgggcatagcggtgcatgcctgcaatcccaacccttgtgatgacaggagaatcaggggttcaaggccatccccagctgcatatagagttggcgggtagcctgggctacaggagatctacattaaatgaggaagactatgatctatgttaaaaggagaaagaataaggcaggggaagaacgacctggaaatgtggttttgaacatcaccagtttttccctatgctcttgggtctggaaggatggagaacaaggtcacacagtcctaaggacacatcccggggagaaatggggtaaagggggatgtcctaggtgaccttttgctcatgtcttacaactcagcctcatcttctgtcttcattcatcaaccctcgccgtttccatcccaacctgatacagcatgccctcgtcagctatcctgtttccatttcactgtttggagggagactgtaggtacgtgagcacacatgccttagtgcaaaccgcgtttgagctgtcctggggtggagcggtaaagtctgatacaaagtatcatcggccattcccgtaaagtctgatacagagtatcagagtatcaggctattccactgtgactcactcatcgatctctttatccactgttgcccacctgctcacctgttttggtaaaaacagcaagaacagcaaagaaagacccagtcttcatatttcattcaagctggctgtgtctgttacctgggaaaccagtgatggagtatgaatggaggtagcaggaaacgaggaaactcttcagagtcagttttcaacacccccccccacacacacacacactgcctggtcctggctgccctcgtttgaggttcctggtgaatcagagtaagcaagcttgtatgtccgcatgtttctgcttccctgatcgacctgcagagaacatcgttagtgataaaccagaccttcggcatgcatgaaacaatatttaggcgtctcctttcaggctgactctttgtcaaccatttcctgggtctgttgacaccgccgtctacctaaacagtcaagctaacaagcactgtcagaaagaacaccgcttttcacagaaataatagcaagaaggtggtggttgtaatgattataagaatggtaataacagctttcaccttttcagtcccccagagtgccaagcaattcacatgatctgcgttctcacagtatctggttaacggtgaccacattttgcctcagagcataaatatatttgtgggaatgtaaactacgcaaaggcctcgggcttgcatatttgaattcatccaggagcaaaaccagcccagtatctggatatgagcaggcaggtggcagagaatctggttggtattaaccacatgcgcccaactccagagaaatgcctctctttaaggatgccggttcagtggccccactacatcagcagccgctgtgcggttccaatgtctcctattgccatcgggtggctcttctggctgggttctcacatgtttgcaggttgggggcctttgaaggacaagggggcggtgctttgacgtggacgtggagcatcttcaagagtggcatgaagtgagcaaagtcacctccctagccttggttggtcaccttcctggccattccatttctgctaggctcttgtcccagcttgcagggtggggacctctctaagagcctctgagttgctcctgcatcccacaacaccacagttgtgttctctttcgcttgcttgtgtccttgcttgtgcgtgcattttatggaatgtaagacacagctctgtctccccctaatacgtcaggggccctgatgtctgcattcttttgaacaacatagttatcactatcactcagcttcttaccctccccgcaaggaaaataaaatcgaagtttaggattatgagttgattagtaagcgatttagcaaacaagccagtcccctctggaaaggcaagccgggggagctgtacagttcaggttcaaatctgattttcattcaatccgtgagaaattttatagctgcaattcccttgttggattcagaagatttgcttgttttgtttttaatagtgaataataacaaccgatcagttttgttgaatttaagaacgattaggagaaagtttttttttttaatttttttaatttttaaatttttattattttcttccaaagaacattttggaatctgtgtgtcattgtcactgagagttcagggatggcctgagcacacctgcctgccgttgtagcaaatgagctagctgttcattatagagagtcataacagtatcttcagcatgtgtaaggtcaacttactattggctgtcggggcatcccttctgtgtgtgccacatcctatactgattccagaggcaaccggttgaaatgaagatattttcctctatcaccagcacacaaccaaatagccacagctgtggcactgcctgcttactgattacgcaggatctttctggtttctttcctctcttccccaagaagtaactaactggaaatgtgcatgcctttggaagagtcgtggaaataagattcatggatttatagggttgcatatgttggcttttatttgttttgagacagagtctgactagtgagcctgctaggtagacagtttgtcctccaactcaaggaaatccacctgcctctgccaccagcgtgctaaagctaaaggcatgtgccaccgcacccagagtcacaggtttttgcagaaactttattctctctttctttccacagataatatctttaagttgctgtggtgaacaaaccaaatcattgacaagtgccaggcacttagcaggcgtgcagtaggcgtgcctcaaatgtttcgtgtcaatgaaagtggggtgcctgaactggacttagcttaatgtggtcactgtggctgggatttctgtatgtgtgacacaggggattagagaagggattagcgggggtggaggactgatgaataggacattttcgtctgaatgagtatgtttattctcagcctgtggagtggagtgtttgatgaaatagaggctgccacacagtttttttttttttttttttaaagatttatttatttattatatgtaagtacactgtagctgtcctcagatactccagaagggggcatcagatttccttatggatggttgtgagccaccatgtggttgctgggatttgaactcgggaccttcggaagagcagtcggcgctcttaaccactgagccatctcgccagccctgccacacagttaaatgtaattttgacttggataatttgatttagtttagataaataatgatttttttttagtgtaaatctcatgcaatatttgctaaatcttaaatttgtctgattaagtaatgcgctatcatattttccttaccattattgttatggtggttgttgctttgggcaaaacatcaaagagtggttatatgtttagggtttggggaaagagcagggtggtgcggggaggagttcctttttgtttttttaatacaattatcttttttcttttcaacttatttatttgttgaatttatttttggcgttttcttacagagtctcacatagcccaggttggtctggagctcactgtgtagcctgtgaactccttaccctcctgctccttctcccaagggcttggatcacaggcttgcagtattacgctcccggctaattatttctaattacatttttattaatttattttgtgtttctgtatgcatgtatacgtaggggcacgtgtgtgccatggtgccatgtggaggtcagaaggcaacatgtgagagttggttctccccttctgccacgtgtgtgtctctggggatcaaactctagtccgtgggtttagcaacaggtgcccttacccgctgagccatctttctggcccctcaaagtattaagtgaccatctcccgcatcttgcctatattaatcatttagattggtcatagcctcgggggttagcgggtataagtgagttcggctctcccagtgtgtcagtgaaatcctgcttgtgtaagcaagtccttggggtagatagcagccacagctgttgagttttgctttagagagaagcagaggaaaaactctttcagagacctgtatttccttggtgttctgccctccaccccaccctcagacattgttggacagcattgttggacaactgctacaagaacccaatgctcaagcaatgagaagggacccttgctctatctaaatggccaagaaagatactatcccgtcttcctatggagaacacgggtaagacgctgtggaaaatccactcgcatcagtgtcgtcattttggaagcagaggggactagggatcaaatctgaacagggccatctgggaggaggtgcagataaactaggacccagctagtagcagaataccagcgaaccccagctgctactcactcccagagctagtaagtaccattgtcttacctaaggtctcctcgctgcctggatacctggaataaaagggctctagagccccctacaggctctctccgactctgcagcctatggacaccagtcctacagctgggcctttctagagcagaaaggagaggcacacggagagctcagaagccaggatcacagctcaaccctagtgttctccttctgagcagtggtgtagcactgcagccgcctccagctgtgaagcgtcttcccctaccgcatgcgcgcatgtgtgtgcgcgcgcaccccgcacctccctcccccccccccccccagcaggacaggacacactcactgcctctgcggcttgcctgaccttcagacagcctggcaagtgttccagccccacttattctgaggaatgccctctggctgctgaatatgcagaagcattgctgccaggtgcggagcccgatggtgatgctcagatccatggatgatcttaatagtaatagtaataataataaatagtaataatagtaatagtaataataataataaatagtaacagtcacaacaactgaccttaatcgggtgcttcctatgtgacacatgttcctcagagatattttacatattcactcattgcttcctcacaacagccctggggaatctcacttcacagctggataaacggaggcgtgggaatactaagtcactgagcccttccttgcctgctgccctttctcaagcatcgtaagggcattccagatagaaccctctcttgtggcctgcctttctcccttcccatgcctcccagcagctctgcctcactccttctccatcagcccccaagtctgtgtgtgatgctggagcctgccttgaacctcgtctatgcctgtcagcagtgcacagccccagtggcagcaactccgccatcctccgtggatcttccctcgctccgcccagtaacccagggattcccagcgagacagtcagtatcttcagttcttttccctctcttctttgtctaaggtccactgacacctgaaaacttatacaaacactcacttgagatctgttcctccccagaaggccttttcccatccctgagagcatctatggatcctgtgaaaccccgcccaagtatattcttctttgtgaagccatctcttacactccctattagactggatctctctccttgaggctgcccgaaggccctggccacaatcctggcatagagcaagtgcttacaaattgctgtttgagtatgatagagaggaaagcaatgaggaaaccggagccttgggacacaaaagggactctagaccccttagtgatgaccaggactctctgtggctccacaccagtgccgtctagcacaagggcaggtagctgggagtgtgcacactcttctgagaagcagctagttctgtggctgagaagaaacctagctctaggtgtccaggccccaggagactccattgttaatgtttcagttttcttgaagctaatcattaaacacaatcactattgagcatataaacgtgtaattcaacacattatagtaaaaccaaagatcataatacaaaaagttcagcatttcctgaggctgtgggacactttgctttcaatgtttgaagcaggtagccatctctgagcttgttgaggggcatgctgtaccgtacagtggcaatttgtggtccatccctctcagcctctcaaagttgtcacactgatcgcttaaaataggacaccacagaaactcgaaaatactatcggtcagtcattacctcctctgactcctgaatgtgttcagcgtcggccaccaacacactgtctggctcccttgcatcctgctctgtgactctggataaatgacttgacctctctgagcctccgattccttatctgcagtgagccttctcgtggcgctggcacaactaaaacatggtaaacatcaggagcttaagcagagactggtacacagtaagtgctcaataagcattgactcatcgtacttatgctcctccctgtcctgaaacgtgtccaaatcccaccaccacggaagacttcccagatagaggaatgtgctctgtgtgtctggattccaaggctcattgcttttcccttctgctcccctgcccatggcgttgaacctgagtagctcagagcaggaagcagaaaggactgagtgtcccagaggaacagccctgtagactagaggattgtgccccagggcctttgaggctttgaggtcagggctgcaacagactggggagccggtgcggaggcacagatgaggtcaggtgggtgtggagcttagtcaatatacatgagcagggaaggttggcacaccgaagcactgagaaaagactcctgtcctccctgtgagtgtaggacacggaagctgtgccccagcagacagcgactcactcccctggtactgggaacagaagccgcggtccagatgatctcaaggggagcatgcgcagtgaatgtcctggcttgaccgtatggactgtgctgttgtttcttgggatatcgagtgagaagctgaaagaccaagtcagtccctgggctgcagcgactcaggaagcagaggccgagtgggcaaaggtgctctggctcttagtcacctggctcagctctggccctaaagagccgtttgctctcaagttagccgacattgctaagtcacacccagacaggccctacccaaccccagcccagcccatttccaatagtaagctaactgtgagcctagggattcccaggaagggttacagctgcctcggcatgggcctgaaggtacgacccactgattgttgtggtcccgttttggtttttaactctggactcatagatcaacgcccctggaagtgtctagaatgggcagccttgaaaagtctgtcccggacttgctacttctcatgagattctggtctttccctgagcaactctggggcctgcctgggtcagaattatctgtggattggaagagcctccaataagtgtgatagatctgagaacgttttgttaagctgggctgctccagtgtctaccgtatagctgtacaggttgctcacggaccatgaaggcctgtttgagaggattggtgacatccaaggcttgatttttccttagtcttgaggcatgtatagcagggagaagaggggagagagtgtctgagaactgagggtgtagagaggctgaggaacctgggcctattcattcgatgagggcagccccatcactaagtcaccctggcttgttcttactgctgagaatccagtggtcagggataagaaccatgctgacaccctgagttgaccattccctggctgacagggggctgggggtggggcttggggaagaatgttctggagtaatactgggctcctcgggctcctcggtcttagtgagcaggtttgggagtgtgccggtactccagaggattggggggggggggggaaatgacctctgtgcacagtacaatttgctcttaggttctgacagtgactctaagtgggaaaccttgccccgctttacagagtacagaggaggaaggacctgcccaggtaacccaggggtccactggaatcaggcccaaaacaaagccatttcctgcaataactctgatacccacaacacctgggaaacaccgtgtctggcacagctcatggtggtccagaatggaccagttcccacatgctcccttcctgcttgtgaacaaacagcttagaaagatgctctagagcccctgagaaggcctgtggctgttcagaagatctgagcatctggaagtgacccagtccacggtggtcccttgccgggaaggaaggaagaagcccctgtcacctcatcctatagggacaagaagagtgcctatcatggtgcctattattagtgctgtggaaggcctctgtgaagacatatggccactgctctattacatagacacactacccaagccatctttattacagtgaaaatattagctgggtgtggtgatgcatgcctttaatcccagcatccaggaggcaaaggcaggcagatctctgagttcaaggccagcctgctttgcagagcaagttccaggacaaccagggctacacagggaactctggaaaaaaaaaaaaaaaaaaaaaaaaaaagaaaaagaaaaagaaagaaagaaaagaaaaaaataattaaagcattcaaagcagttctatctaacagggccctcaggaggtagtaacagatcttggtacctatggggaactgaatctccagagccttcatgtgtcccagacacctgcaagacttggacaccctagcaagctctgccacccgaccagacaagagagaatacttcagatcctgcgcctctgctttcctagtcctggcacatggaccagcctgagattatgcctgtgacaggcgggccttcttccagacagagcaggaagcagggggccctacttggcagcctacagggatctcaggggatccagggtgaaccctcagaacagaggagcccgcctgtgtggccactagcagcacgcacggggactgccacttatctctgccatcatcaccagaagggaaccttgcaaaaaagatctgtggcgcagagtagtgtacaaggcaggcatagaaagaatgtgagacggggaaagcccagagcaggagcaaatgtggctgtgttctctggctacctcactgtggcccagtgctcagtgcagagacactgatgctgccctactacgttcctgctgactcccagctattacagctgtccatgctcacaaactcacttggccatccttattcagaggtggcctctgggactgtgtgtctaagatctctgactgaggacgaaggttgtagaggaggaggtggggaggggactcgtgaccccagcagctgggagatgccctcacggatggaaaaacaggcgacctaggtggttatcatcatcatcatcatcatcatcatcataagttttaaaagtaatggaataatataaacagtgaaatcaaagatctttaacctctaaaatgccagatatgagctttggaaagttctagaaggagacacacaatattgtcactttgaaggacttgtggagaatgggtttaggagtcctgatattgatattttttgcttttgtatttcttatgatcacacatgagtattcatcaataaaagcaataatttgtgctaatgaagcaaggtacacaaaagccagaagaaaagcaaagtcccaaagaacccctaacccaacatggagcccaagttctggggcctgaagaagctctggctgtccttgttccagtgttctctcactctgccagcagattgacacctctgcttgcctccatgacaaagtcgtgtgtgtgtgtgtgtgtgtgtgtgtgtgtgtgtgtgtgtgtgtgtgtaggctggatcaaaggctcaggtcttggggtgggcgttaacagtggatggatacagtggccggctctgcctgctttgtgagggctggcctccctgccaggctcttgctacgctgtgtgcctcacacagcctgcctgggccatgggagctggcaagggacagcagatcacctgcctcaaatgccattaatcttgtgtctctgcgggcccttgtcatcctatgccagcctgcctggcactaactgtggtggagaaggacatgacttgggccctgggcttctctccatgggaggccaggaccctggaaaataccatctgccttgtttgagtcttctgacacccattccccaggtcaggatgcattaaggagagtcctgcctggtgaaatctcattgttatccccttggcaagaccttatcattcaaggtcatggctataaggcacccttagagtcgcctgtgggtccccactacacatacctccaaggaggcttccagaggatgacctggaggctttctgcaactagctgagcagcttgcacatggagctgcagagattctagtttcctgctctggctctccctgtctagcttatcctttccccacagattgaccaagtgcagaccacaagccatctgggtaccagatagatggagtctgagcctggccatgaatatctcagcagtagcctaggaactctatcttctttacgctaagaaagccaacattaggtaggggctggagagatggctcagcagttaaaaacatcggttgctcttccagaggatctgggttcaattctcagaacccacatggcagctcactattgtctgtaattcagctttgacaccctcataacagacatacatgccggcaaaaccaccaatgcacataaaataaatcttttttttttttttgccaaagccatctgcatggtagagatacgttcctgtaattctagctcctagccctcagaacccagcacttgggaggtggaggcaagagatcagaagttcaaagtcttcctctgctacatatcaagttggaggagagcctggactacataagacccagtctcaaaggagaaataaatgaataagcgttcttgtttatgctctttaccccgtagaacgacctcttcatccgggtcaatgcgcactgttgagggagcccctggcatggtctcaccatttcactcctgatgtttgaaatgtggacagtacctcctcagcctgcttgtggccattggaaagtggttctgtggtgggggtgggggagatgggaggtaagcacaggtgtgttttactctgccccaggcacactgcagcgtgcttaactccctgttgtgcacgtacattttccttatcatggtgaggggtcgggagatggagcagtggtcccaaaggcacagagctggtttctatcacaagcctggggatggagagatgtctctgtggttaagagagtttgctgtgccagagaatctgagttctgctccaaacattagtgtatggccgtttacaactgcctgctaaactcgagcttcaaggaatctaatgccctcctctggcttctatacacacacacacacacacacacacacacacagagagagagagagagagagagagagagagagagagagagagagagagagagcacaaaaataataatgctttaattcctttttttttctttttaagagatttatttattttatttacatgagtacactgtcgctatcttcagacacaccagaagagggcatctgatcccattacagatggttgtgagccaccatgtggttgctggggattgaactcaggacctctggaagagcagtcagtgctcttaaccgctgagccatctctccagccccccccccccccccttatttaatgtcaaagcaaggatatgaacccaggtccactctggtccaccatgctgggtgcaccctcagatgacgattcctgtatccctctcccacctgatttaaattttgctcacttatgtagtgtggggtgcacatgccccagcctcagtccacaggctgaggtcagagaacaactttcaggagctccctgtgggtcatggggatggcgcccggctcatcaggtttagtaacaagggctttctctaactgagccatctcaactgcccccacccccattagacagagtgttgtgtatcccaggccctcctcaagcacaccatgtagcctaggttgactttgacttctgatccccctgcctccacctcccaagtgtggggattacaggtgtgtgccaccaaacccggtttccagggaacaggtgtgtgctttgtgcttcatgcaggccaggcgaatgagtgcctccttttgtgacattccctccacgccccaccccgctagagttcagaggccacccagagagtgagaggtctctgttttgctgctcacagactggacttgtcacctattcctagcaggggtccagtgagtgacagccttagacatcactttcccagcagttactgtgggtgccagataaattacacatggggcccttgcaacaacccctgagacagaagcacctctgttccttgtttcaagatgttgcaaatacagcgtggagaggttctttgactggcccagcgtggctcagcattacaagcacagagcgagactcaagcttgagtctggctcactagccgttcctgtgttctgtacagccagcccgctggcccccgtttgcctctttccaggcatgcccaaagcacagatgctgatgctgtggaagggactagtcaccatggtggtgcttaaaagtacaggatgggacagtttgtgggtggactggttgatacttttgttgcttttgtttttgaaagggaattttgctttgtagcccaggctggccctgaaccccaggtagtcctcctgccatcacctgccaagggttgcaattacaggcatgaactattgcatcttcattgattgttcttcaattcggggtgaaacctttgtttaaaaagaggctttgggtaatgtaaagaaagctccccgtgatggggtacaaagcctctctgggagctctggactcttagaaaggccttcatttgtaaccttgtggactcacttagagagtgggtatagcaactagctcataggagaaccaaggagacaaagcatactgtgggtaaggtatgttagacccaggtctggggttctaacagccccttcctccctctcacccccatattccctgtttcttaccctcactatgagcattgctccaactaatggtgaattctttccaggaggtggggggcagggtggggttaatgtgtccaaggtcatttataagacacggctgggggattaggtaggtgccaaagcttagcaaagtttccaggacaaaaagaggctgtgactctttctcagagaatctgacccccaaaggcagttcccaaaagaagcgtcaagaatatgaccaaaggcagcatggctgggaacagagatgtccaaggtgaccattttgaaggggactgcactctccaggtatataaatatcaccggtcacaatgggtctcctgacttcacagtcacagtggatgtcctggaccagctgtccctgcttcgtgctgtaaacttggtgggagtccgtgtaagtctccgagggaacaattacttcatgagtagctgtggcagccactggtcaggttccatccagttccatgcagaataagcgatggcccagcaagatatctgtaactttctcatcgcacctgcaaattgccagacagaacccacgctggtttggcctggaggaccaaacgagccagagctcatggagcttgctgaaggcggaggaaggatgcttagcacagtggctttcctgctccgagcccatcctctgcccttgacaattagcctggcagtgggaccccgagtgggcagctcaccccccttttctcgtactagcataagctggcattatccttctggaaaaccttctagaaaaatcatttggagaggcagagacctaggagttttgaataggaatgtaacaagcccagagatgacctcaaaagcaggcctgcaggtttgagaacagaggtagaacattgaaggcaaagaattttccagaactcacttcagctgagatgaccaatggtctagttttattctgttgatgtgatgaattctgaccagacacaacctggggaggaagggattatttggcttatactctctggtctcatcactatgggaattcagggtaggaactcaaggtaggaacctggaagcaggagtagtggagggatgctgcttgctggctgaacttctggctcttttacatgcttatgctgaaacaactttccctccctccctccctcctttcctccctccctccctccttccctccttccctccttccttccttcctacatttttgttttgtattttgagacagggtttctctgtgtatcctggaactcactctgtagaccagggtggcctcaaattcagaggtcgacttgtctctgcctcccaagtactaggaagataactttcttattacaaacagaccacctgcctaggtatggtatcacccttagtggactgggccctctgacatcaattaatattcaagacaaccccgccctcagatgtgccaacaggccaatctgatgtgggaaggtcctcatttaacgctttgctctctgctctagactatatcaagttggtgattaaagctaagtagggtaagcaccttccttattttggcaggtaaatggccttttttttttttttttttccatgaaggatggctgtgtgggcacctattcacctttaatgttgttacttgacacagtgtcatccctgtattaggggcaaagttgattgaccgtagacagagagggtaatgccctagagattgaaagataggggaatcctctcacccaaacctagcaaccagaagctaggtgaggccatgtagggagctcagaacagaaagcaaagatgtgggaacacacatttgtgtctggtgtccctgaaggtccacctatcctgcagggctctggcctacctcatgactgtgacctgcctttctgtgctgagccttcagctggttggccaaggcccgccaacacttgggatgacagcatgctttcatttgacaatgtcaactttaatcttatccagttaaaccttcaaagaaatgtgtaaaacaatggctggacaaatatgttgacattctataggccagttgagttgacacataaaataaagatataattagttaaatgtatttgtgaaatactataaactatataccatacctctgccttttgccttctaggccctgttattatataaaggctttaagaaattccatgccaggcgtggtggcacacacctttaatcccagcactcgggaggcagaggcaggtggatttctgagttcgaggccagcctggtctacaaaaaaagttccaggacagccagggctatacagggaaaccctgtctcaaaaaaacaaaaacaaaaacaaaaaacaataaaacaaagaaacaaaaaaagaaattccacagtgccaggcagtggtggcgcacgcctttaatcccagcacttgggaggcagagataggcagatttctgagttcaaggccagcctggtctacaaagtgagttccaggacagtcaggactatacagagaaaccctgtctcaaaaaaccaaccagccaaccaaccaaccaaccaaccaaccaaccaaccaaacaaacaaaaaagaaattccacagtaaaacaaacaaaagcctgtctgacttatttacttcaaataatttctttttgtctgtctgtatttctttctccttaattttttaaagatttatttattattatatctaagtacaccatagctgtcttcagatgcaccagaagagggcgtcacatctcattttggatggttgtgagccaccatgtgggtgctgggatttgaactcaggactttcagaagagcagtcagtgctcttaacctctgagccatctctccagccgttctttctcctttttaaaaattctttttcttaagacaaggtttctcggggctggtagatcaggctggcctgaaactcacagaactctgcctgcctctgcctcctaagtgctgggattaaaggtatgtgccaccactgcctggcactagtttatttatttgaacatggtacattttggggaaaagaacatattaagtcccatcgagttgggtccaaggcataatataccaggactgctaactctggcactgtgtgtactcagtgttgctcagagcctaggtttggcttctggcttgctctcttccatgctttctgctctgctgtgccaacctacgatcaaggacattgtgcaatggaagctcccgggtccccctcatgatctccggacatctagaagtgaaaggtctcagagaatttttaagagttgcttttggtttttgaaacaaagtctcaccgtgtagtccagcctggactagagctttcaggagcatcccaagcctgcctctgcctcccagcctctgggatcacaggaataaacccccactcctggctcggcacttgctaggtactcactcaggcctgaatgctcagcctggcgcacacacaatcatctttccaattagcctttgaggcccacgagagtatcctagttgacagataaacggactgagagaggctgtgggattttgccacccgtcaggttttagatcctgacccatgttgagttcagagcagtgatctggccacagccttgcccgggtgggtgtcatgggtaagggcagctctgcagagtaagggagctacccagccatactgtttgggtgactcagttcatctgaaagcccttggtcgacaagcaagcgctttggtagcagaaagggataggagagaaggtcagggctggggtgagcctagggctgtgtactaacctgatattcccacacccagaggcattgtcagaaaaataggaacactgggcacagactgtcctgagctgccatctgcctcgctggtgaaagatcttgctgagttctggtttcattagctgtgtgagggaccaggattcttcggaggcaaacatgacaatgggcagaaagaccaactaatgaggggcaggaacttctgatctagtgctaggtgtatcttggagaagtctgcctactctctagcacccagcgtgttctctgcttgtgccctaagtattctgattttcatgagagcattccatcaagaactatgtgcgtgtgcaggtgtgcatgggaatatgtgtgtgtacgaaccatgtgtatgtgagcatgtgagcctgtgtgtgtgagcatttagtgtgtatgcatgtgcagccaagttgtgtgtgtagatgtatacacaagtgactctgttacctgcttaccagggactggccttgccatcaaggttcccttaaatagtatatctacatctatagtgtgtagactatatgtagatatatccctgcctgccagtgaactttaaaactatattccaacagccttctgtccttgttcaccatctgccattcttacgactgtaaaaacacacaagtgctctaaacgtgcaaccaggctcctattatcaccacccgaacagcagccacatccccaatatacgaatgaataaccagacagatctggttacagggtgatcttttggtcagtattctagaattttgtggacatatgaactgttgtccttccaccagctcttcccaggacactgtagtttactgccttggccccaaccccagcttcttcttcactcttctgcacactgtgctccatcatgcagtgcctagaatcatcgtggccacagctcctgtctagtcttttgagtaggcctcatgatggtttggcttttctctaaaagcaacagaaatcattcagaaggaggcatttgagttggcctgctggctccttggtaaatcccaaccctagaagtgactgtagccatgaaacagttatttttgccaaatgaggctcatgcctgtaatctcagcacttgagttcaaggtcagctgggttacacagcaagatcttgtctgaggaggagggcagtgaagactgggagtggagctccgttgggagagtgcttgcttgcctagcattcacaaagccctgggtttcatctgcagcacctcacaacctgggtgtgacgatacacacctgtaatcgcagtactcataagttagagagaggaggattagaagttcaaggccactgttggcgatatagtgagctcaaggccaaccttggacccagcatgagggcagaagagaacctgggggtcctggaactggaggccacaccaacagaagtggaaactcaggcggacacacttctccaaagcaaactaagtgaggaagacgttaaggagaacgtaagttgtctggcagttggagggggaagagagttttcagagttcgtagggtcagtcctggggtaagagccagaggtgtctcaggtcagttttctcttgaagcaggaatgggactctaccttgagcctgtgagtccacaggctaaccagaagaggtatatgggtctggagagatggtgcagaggttaagagagatgtctcagggagtttgtactgccccttgcagaggacagagtttaatctgtcctcttagcaccaggattcttagcacccctgtctgtctgtagactcataactgcctataactccagttccaggagatccagtccctctagcctctgcaaggatccaactcacatgcacaccacgctacactttattaaaatataaataaataaataaataaataaataatccaacctggtctacaaactgagttccaggacagccagggctatacagagaaaccctgtctcaaaaaacaaacaaacaaacaacaacaaaagtgtgaatgaatgaatgaatgaataaataaataaataaataaataaataaataaaagctgtttctatagcagcagcacacactcatgagtacctccttcagagtgcaggaggcctattgtagccagatgtcaaatacatacagagtttagctgcctctctggtcttttcctgtcactctggacattacgaaccttcttataagaaatggtctttaaagggtggccttgaactcaccaaggtatcagaaaatgaccttgaattcttgatctttcttcctttacctccctagtagtagagctacaggtattcaatactgactgactgactgatattgattgatgatggattgatggattgattatttgagttttattagagttgcttacggagcatgggttaggggtggttaggggtgatctacaacagtgtggaaccttcctagtaactacactactgaacagaatatctctccctcccccaaaccattaactattaacctcaccatggagggtggggccttgtgagctcctccttccagattgatttttgtttgttctgagacagattttggatgctgacatgggtataaatatctccttctacccgagtgccatttgtagcttgaattttcttagaaagaatctcagaggccagcagtgggagcgcacatacataatcccagcacctcgggaggctgaggcagcagaattgctgtgagtttgggaccaaccagagttataacgtgagaccctatctcaaaaacaaaatacagtaaaagaaaggaaaaacttggtttgagactaacctccatgtcaagtttcaactcaccctggggtactttagttcttgtttaagaaagaaaaatgaaaaggaagaaagaaagcctggtgtggtgaccaagaccagtatcataggacacttggaaaacataggagaattaggagttcaaggtcaccttcagctacaaagcaggtttgaagttaccctggcctataggacactcagaccaaacaacaagaagaaggaagccattaatgttctacagacagataagcagtttaggagagtggggcatgaccctttgtcactccaagctgtcaaaagacttctcagtacaaaagtcgggtcctgttggggcactagggcagtagaatttgggctgaaacccttgcagctgatatggatgggaactgtgctgttctggaagtgtggcttctaggagtgcaaaggctcttcaggaagcgatacagctccttgaagcttccttggcctgtgtgggcggcctatggttctgtctggtctagccacagcatgggtgactgtggtacaggaccacaggctcctggcagtctagttctcagatagatgctaacaacgcatggagctgaggctctgtcagtcaccatccatgacagggcccatcttttcagtgatggggtatcaggcttgagatgtttacgtccccagagtgcctgggtcctggtcaccagacagctttgaggagccatcaggaagtgagaagggatttagtgtaacctatagtgtagggaaaaggaataagatcactttggctgagaatggttgttccagaacattctatttcctttccctgttgtccatattcccagttttcagttacacagctgcaagatcaggaaaaaaaaaatcaagttcttatctgaggccacacagtcaacaaatgaccatcaggtataatcgtgagatcaaaagatttaggggacagcaggcagtggaggtgtacaccgttagtcccagtattgggggacaccagacagtcaagatgtccacctttaatcccagcactcaggaggcaggaacaggtggatctctgactctgaggccaccctggtctatagagagagttccaggacagccagggctacacagagaaaccctgtctcagaaaccaaccaaccaaccaaccaaccaaccaacaaccaaacaaccaaacaaccaaacaaaagattttggagaaagaacatcctgattaactactgggtcccttcctggatttctggtgggcaaccttaagtgacaagagacactgtgggaagaagtcaggtttgggtgagggaagggaaggctgggaaggaaggaagaggaaggacaagggctggcaacaggcttttgcttgatccagcatggccattttatctccccagacttcactcaggcaggctctcagtaaagatttcagctcaataccattagtgtctatctgcagaggcccctcataaaactgattagaaagcgggcttttgcatgtggggtggggactgtgggcctaatcgcatttgggcatgagatgatatctaattccctgcatagagcaagcagactggggggcctcccctggagccagggaccccctaatttggtttgcgaatacattagctaagcaagctgagggcactccttaggggagtgggaacaaagcacccctggggcctgaaggagaggagtgaccactgctctcatcctgaggggtgagctgtgcccgacattgcccctggtgtatttctgatgatgagaggagcgggcattcaaaagactaaagcagccatataaggatgttgttattgattgctttgccatcttttgagcctctttgtgtattttcctgttttatttttccatataataataataataataataataataataaaaagggcccagaaaggtggctcacttgctgctcttccaaaggacctgggttcatttcccagcacccacatagcagctcacaaccatctgtaactcctgtcccaggggatccaatgccctcttctggtctctacaggcgcttgaatgaatgttgtgaccagacggacatgcagacaaaacagtcatacacataaaacgttaaaataaaatctttttaaaaagctatgccgtgatggtgccaagaagaggcagaggcaggctgatctctgagttcaaggccagcctgatctacagagtgagttccaggacagcctgggctacatagagaaacctggtctagaaaaacagcaaacaaaggaacatggtgagaggagtgtggttcagttggctaagtgcatgcctgtcaggcacaatgcccagacttcaagccccagcatcccataaaatcagtcactcaggaggtggaagcattcataggcagctttgtaaatctctccaacaagggctggcgagatggctcagcagttaagagtacttgttgctggggagtttttgtcaacttgacacaaactagaatcacccagggaaggggaagctcaattgaggaatttcctccatcagattggttgggggtggaggtgtggttgtctgtgaggcaggatctagcttaacggtagatgtaggaggctccagccccctgtgggcggtgccacccctaggcagatggtcttgggttgtacaggacacctagctgagcaagccgtgaaagcaaggcaggaagtagccgtcagccttcctccttgggctttcttcagtacctttcagctacctgctttgagtgcctgccctgatgttccttggtgatgggttgtgacctgggagctgtaagttcaaacccattcctccacaatgttgcttttggtcagggtttcatcacagcaacagagaaacaaagtagaacactgatttttccaaaggacctgagttcaattcccagcacccacatcaggtggctcgccagcacctgtaactctagattcaacagatctgaaacacaccacaaacacatatcaattaactaaaaataaaagtacctctccaataaacttataggagaaccctagatgttcccactttgcagatgggtagagtggaggctcaggttagctaggtgacaattgctgagtgacaagctgagtgacaattgccgagtgacaaggtctggtttcggatcctgggatctttcagtgattcaaggtcctcaatggtgtacacaggagactactgacaaaatgaaaggacatactttggctttcacttctagaactgttccttgctgttactttttggcttgtgctttctcagagtgggatggaaactttcaagggcttctttgtcagggtctcttttggtggggggtgtgctgcctttgatgagagcttaggggagtgacttgtgtgacattcaacagctttatctagatctgtcttctttcctgcaaaaagctgtgagttggttgagacaaaaggatgttcaggaccaataagatggctcagcaggtaaaaatgcttgcatcaaagcctgatgccctgggttggatccccggaacccaggtaaagatggaaggaaagaactaaccccctgccagttgtcctgtgacttccgcagtgcaccacaggaggatgtgcaaacacacaggagctagtcattactagtactgtgagcttccgttcctctagaaccctgccaccggtctgtttagacctcctcaggaccgcaggaggctggttttcctcttccctgtagtgaagccgttctctgatccttgtgtctcaagcacactcatctttttttttttttaaagatttatttattgattatatgtaagtacactgtagctgtcttcagacactccagaagagggagtcagatcttgttacggatggttgtgagccaccatgtggttgctgggatttgaactcctgaccttcggaagagcagtcgggtactcttacccactgagccatctcaccagccccaagcacactcatcttgaagcacactcaatctatgcccaacacaacccacccagctccatggctgcccctgtacctcctctctctctctctctctctctctctctctctctctctcacacacatacacacacacacacacacacacacacacacacacacacacacacacgcacacccttggctactggggtatatgaaaccttgtctcccagcaaacaaaaaaccaaagaacgagaagcgagaagccaggcccagcactggggacagaggcaggcagagctttgtgagccagggatacattacttccttactctgtgccagttgcttcttccgaagtgtaagaatacagttgtccttatattattctgctttcgatggcttatgtttaaaaaaaaatgcatttacgtggtaagacagtattgctttaaataaaattagcatcatgccaaggtctaggagaggcccaggaagtgtgacttctcaccccgttcccttactgtaaactttaaattcagagactggccaatcatggtgtacactttaatcccagcactcaggaggcagaggcaggcaggtctccatgagtttgaagccagcctggtctacataacaagttctaggccaaccaaagctctgtagtaaggctgtgtctcaaaaacaaacaagccaacaaataaataaatagaaactacttttactttctctgtattctgtatctgattttaggttcttcttaacacaattattgagcgcttgcggtttgctcgctgggcatctggttgtatggtggggccgcaaggttggacagtccctgaatggagcttactctggaatgcctgagtgcagagaggagctgtggggaacaacgggagcgggaggggctgggtttgggagtttggggtaaccagtacagaatggactttgcgacttgtgatgtgcatctcagttttgcattctgagaagtttggaagatgtgtatccacctggctgataacgatttttgtcctgttggggctggaagcactgagtcaggcttcttccctacaaccaagtagcgccaaccccctcaccaccctctctttgctccctccttctttgggagcctacaggctctgaaatgcttacagacctgcaggagcacaagcttcctgctcttgtagtgccctctgcccctatcctactacaacccacgcctcctggcaacctgctccgtaaaggacagacacatcttatcatcctttatccagaacccatcctccgccccacccccaccccccagtgaagaaaggtttgtagggaccaggacaccccagcctgaagctgtgctgtaaaatcctgaattgcgtaacagctgcatcatggagcgattattagccttacttaaagatgttccatttgcatgaggattagctttgcggtcctttaaatagctagctagctttgctgaagccttccttgatgctgaggagaaaggaggggctggagagaaaaggggggcctgtgaggcaagaggttttgaggcagccataggcctgagagccttcctgtcctctgaaattcaccagctagtcctattgcctaatgacaccttcttatctctcaagcctggcctcacctcctccaggaagcctcctctaacctcttctcctcaagagtgcaagtggacgcttctctgtgaataatactgcattttgtgacccaattggacacattaggacactttaccacctacctaatggctttattgtcactaattatctggtggtttttttgttgttgttgttgttttgttgttggtggttttttttttttttttttttaagatagggtctaaccaggtagctataattggcttggaactcactatgaggctacataggctgagttcaagcttagggtaatcctcctgcctcagctgaagtgagcttacctggcttccctgaacatctttaggtgcagagcctattgtatttgactcaataaatgagtggaacatcaatattaaatgcataatacctactgcttgtaggaaggacatgtgtttccccatgggtgtaagggatgtttgtggagaaccttgtatcgactcccacaagaccaagagaacaccagctctgctctggaaggtataagccctccaaaatgctatccgtgactcttcccatctatagagccaagtgctcactgaataggttttccattacagacctcagcatagcactgaatccctgcatgcccaccatgaggctttcttaagcctcgtgtcaccatggcaaacgtcaaacttatccctgctaagagacagactttgctccaccgctgtgagctgggtaaactcctcactcttctcacgttctgttggtttttctgccagatgcctccttctccaaaccccactcttacattttgttgtcatgtctcttgagtcatccctggtccgtgacattttctcagttccttagttcttgtgccactaatagttttaaggcacacaggctaggtcttttccaactcttaagttgtgatgctgaaaggccgtgaaaggttaaagttgaatccagaactcagaaacagtggctctttaggagttctgtgggtgggtccctggagcagtgatctgcagatagaagttcttagcctctccctaaactaaggtaataaaatgcagatggggaagactgagagggtgggacaactttaatggaagttgacactgtgcaaggcttttgaagataacactctaattcagtccacacaacacatattctacccttggttttgttttgttttttaatggcttattccggtttgaaaagaaaagctgggacttacagaaggtcaagcaaggactttctggaggtaagagggagagagagcaggcaggtatttgaacctggcccatgggccctggtgttcctcccttctcatgggcaaaaggttcctgggtgttgtaagtggcaaagccttgcctttggctcctaggccatggtccctggcccctaactcctggaagcatggcattttgactggccaggcacaaggaatagaagacagtaagtgtggattcccagtctctgtctgtcatattgactccagccattgttttatccggcatttgattctgtcctgtgggttttctctacctttgggtgatttcactttttgtttgtttgtttgtttgttttttcaagacaggttttctctgtgtagctttggctatcttggaactcactttgtagacaggctgacctcgaactcacagagatctgtctgccttggtctccggagtgctaggatcaaaggcctgtgcctttatgtatgtgagtacattgtagttctcttcagacacaccagaagagggcaccagatctcattacagatgattgtgagtcactatgtggttgctgggaattgaactcaggacctctggaagagcaatcagtctgtgctcttaaccactgagccatctctccagccccaagcttgggcatatagaacactgtacagatgtcaggttgtttgtttgtttgtttttctggtgtccttacaacaggccagtgccatggaattatttcctgggaccaagtttactggtgcagtatctaaggctcagtggcatgtggtggcatctgaggtattgctgcagagctgggagctcaggctggacccccaggtcctacccttgctgacatgactggcactctccttcctccctctcatgctgatttccccagaagcagcgcctcagtctcttcagtgctggcggaggataaccacctccatctccctagcttggggcaggaccacagccacaaccagcagcatccctgcaggatgagctctgagtcccgagccagccataattgaattgcggaataccattttgatggaaccaaccagctgttaatttatcagatcaatagttaaacgccgggggtcagtcagtggtgagtgacagcgtagccaagggcaatccttgctgccccagcccatcccacagcggcttggattagggaggccaaagccggtgatgatgtcactcctgcctccccttttcaagtgataaagtagggccaggagatctagcttagtgggcgagtgcctgcctagcacacacaaagccccagggtcaaactccagcactgccttaaataggcacggtggcacaagcatgaaaccctagctctcaggaagtaaaggctggaagagcagaagttcaaggctatgctcagatacatagcatgcagagcatggttgaaggctagcctgggctatatgggcttatgctctgacaaaaaaataaatattacaaatagggtgcacacacgtgcacactgcttcctcattctcttcttgtatctggttcactttgtagaccaggctggcctcaaattcagaaatctgcccagcttgagatgtctagttttaatctggcatgttaattatgtaagtcaaagggggcttttgattgctggacctcagtacttcaataactgaaccttagcggtcagcctcaggaggaggaggaagtggccaaaggaagggatagaccctggtgtctagctttaggaatgtaatgttttttagcaaggcaaagggaatgggggaagaagggtaagtaaggtctgtcagagccacgtttgccaaacctgggcctgttagagcccttggtacttcaaatgtgaagtatctaaacagagattattgggaatctgatagagtgagggggaggtagatctgatagtcactctcagaagactgggggtccagcctctgtagagcattggctgtcccccttctcagaccctgtttctgtactgatactcagcctgtgacctccacatcttctcgggactatctgaagccagtttggcacaaccagttctcagcctgtccttattacttcttattcaaataatacttgtctatgttttagttagggtttctattgctgtgataacacactatggcccaaagcaacttggggaggaaagactttcttatagcttgcagtccatcatccagggaagtcagggcaggaagtcgggaagtaggaactaatacagaggccatggagaagtgcttactggcttgctcctcatggctttctcaatcgtctttctcatacacctcagaaccaccagcatagaggtggtgccacccacaaagggcagggcccttccacatcaatcaaccaatttttaaaatgtaccaaaggtttacccataggcttcttttctcaactgaggttctctcttcccaaatgactccagtttgtcacaagttgacataaaactagccagcgcagtctatcagagttctaggcattggtggaaagcaagggagaagccaaatggaactcctagtctcatggaagaataggacttgatctacgcagccagaatagggcaggtggctgtaccttggtagagccaggaactggtgtggtgcagacccttgaccccaatcccaacacaagtgagggaggaggtgttgtgtaacaatttcctctcattaaaaacaaacaaacaagccgggcgtggtggtgcacgcctttaatcccagcactcgggaggcagaggcaggcggatttctgagttcgaggccagcctggtctacaaagtgagctccaggacagccagggctgtatacagagaaaccctgtctcgaaaaaacaaaaacaaaaacaaaacaaaccaaccaaacaaacaaacaaaccattccctcctgcagggaggttccttaagcaggtaaacaactaaaaagtagccccaggaactccctgaaattggtaggattcactaggctcctccctgccagggtgaataaaagcagagagttgcttaagagaaagtaaaagttaagctgtcaagaagactctcccaggagaacagctcagagttcttggagatcagaccagctgcctggaggaggttagaccgacaaccacctagagaggacactctccagcttgttgagctgcctgcaggctatgcagtgtgttccaggttcccagcttttgggagcgtgctgggtgggttttggtgatgcagctgtctttgagtcatctctgctcctgtgagtccttggttcatcaagctgagctttggtggtatccgtactttgctttgttgtgggttccctttctatctggggtgagaagaccaatgttatatctctccaaggaaagttttgtctcaccgcagaaggttatcaggctgagatggggcaaccctgaaggcaagtggacaggaaaaaacagcagaggcagtgggctgatcttggatggtcccaggctgggtaaaattccttgtttatgagtatgggactgtcccctttgtgcaataacacactttagtgtttctctgactttgcaacccctgccaagatattgactctttccctcctgggcctcaatttcctcagttgaaaaatgggaaaacaagagctaggcacagtcacacatgcctataatcccagttgatggtagggctgagacaagaggattgctatgagttccaggccagcctggtaaatgaagtgagttctagaccagtctggctatagaatgagatcttgtctcaaaactgttaaagggctagaatgagtgtgggaggcagtaaagagcaagggagtgacagagcccacctcagcaaattacagtgaatgaacaacctcatacatatgtgtcctattcctggcaaagagcaatccttctctaacattgtcagtgatgctgttaccaagatcaatcctggactgccagttgactgcagagcctggtcccagtctgaatgaagatgctttctcatttgcctagataacacaaagattaaaaattggccaaggaaaagggaagaatgctgagccccatacgcagctagtgtcacctgtgctgtgcataagggcacatagaaagggccacttctgagatcagagagtggatagaagtgtcctctcactgagcttgcacacactgcttttgaggactatgcatgagctggcagtagtaatacacatgagaatctggtttgtggcaggatggggcgacagctggggtgtgaggggaacagaggtcggcagtgtgcaccaagcaccttaagtgctgacttctctggctgtccctgggatccatagacagaactacagtgcctagggaaaagaaggtgcctgtcattcattgctatctttctcagcactggtcggagctaaccaggagagctcttccactttaacagccatgggtctccctggccctcctgcagcagagcttcccctgaatagcttcctcctttatttaggcctctagtagtgaaccacctaatctgagaagtctcctctctgggcacacccattgcctgttctttaggatcctcatcactgactgaatttgcaccatgtggtgccttgctattggtattaggggcagcactggctcttacatcctatagtcagagtattgtgattgtaacccaaccagaagtgggtcttgttcctctaccaattcagggagggtgtttgacagggaagctttatcaggtgatctgtgtcccaggatccttccacattgtgactctgctatctcttgagtgcccttctgaatcctctatacgtggcctgctgatgggacatggagaaaggggatacagggacagagtcagggaggatgaagtgaagaacagagtgctctgggagatttttatgtgccaataggagagtggcttacatcatctgcctgttcttatttcattggctaagacctggttgtataaactgatgacatgtcactctgtggtgtggtaggggaaggtttttttattgtagatatgagaacaagaacagccagaggtatctggaagagtccagatcagagaaagaaaaaagtagcctgagtatatatagccagcagactggatacagccaaggctgtccgtgagagagcagagtaaccatggatcaagagtagagagggctcagcaagaggagaaggagcagagcatggagaacatggtgagaatagtagggttatatggagagtgagctgctggggggaggaagcccacgagctggagggaagggaagaggtgagaagggctgggatgccagcccaggctctgaaatgtgaaacagggacttacagagcctgcaagccagcatggactttgatactgtagaggccacaggtagccatgtgtcccttctgccagaggtgaggaaaatgattccctttggaaaaggggagctagctttacatgttcctgagaaacgctagcttttatctatccaccagaaaatcctcctgtggttcaggttgagctcatttctggatagttggactgccttttggagtctggggaattggttcccctttggacctgacactagtcacatggttacttccaatgcaagggcatctgggaaggaggatggccattgggtgagctctttgctgtctcaactgcattttgtgtgtgtgtgtgtgtgtgtgtgtgtgtgtgtgtgtgatgtttcattgcattagtgacatctttgaggaaaagccccgttattttctgaaccaccatttaaactacacctcatgattaacttcaggtgcattctcgtcacccagatggcaaaatgtccggtgagggcggggcagggaatgtgctgcctagaattaatgcaatatggtattgtctgccctggagggcagaggcctgtcaactttgatgactagaggaacaaacagtaggttgtattgtagatactcaaagaacagccattgaatcatgctttcaagggcctgaagccccctgtgtggactcacctcagggatgaagccatgctccatggtttgagcagagatgcagcagaagagcctcccagaattctctgcatctgactcttgttctttgttgctgccggcttcaatagtctccttttccactgcacattggaaaggtacatggccttactcaacagtggaactctgtgccttgcaatccctggccctgaggaggcagctccaacaccagaagtcttctgggaggacttggtagcctgttgtgggtcaggtacccagccctgtcagagagagagagaagtgtgttgggattggacgccagtcagttccccagaagtgcctgaatgatggtaccttttgcctgtgggaactttctcagtggaagcagcaggtgtgtgagtctatgattaaaggggatggatggacagatatctggagacagatgcatggagagagggtaagtatagactttctcctcattgctaagtaaggatggcagaactcctcatgcggacgagaagctaccatgtgccagggtcgtctctgtgtcaaggtgttgattctcaagactgccctgagagatgtgcactctcgttcacacccccatgccatgaacgaggaagctgacggacacatcgagaggttaaataacccagatcatgaccgacagaactggggttcaagtccccactgtccaactccagttcagcgctaagtccccgcctgtggctcctgcgagaagaaagtcaagcgtattccagcagcagtctgtaaggtatctaggccacatcactaactgacccagggtgaaatatataaacaggttcaagaccggttgtaataattcacaaatgccatgtcgtcttcagtagtaggacttgagaggtgggatagaaacaattttaacatttacattttttgcattatatgtgagtgtgcccgtgcccacccacatgtggatatgtgtgtgtgtgtgagtggtttgttctaccatgagggtcctaggaatagaactctgatcatcaggcttggcagcaagcgcttttacctactaagccatcttgctggccctttgaagttttttttgttcatttatatttatttttatgtgtttgggttttggttgttttgcttttcggtccctttttttgttgtttctgttttattttgttttatttttgagacagagtttctctgtgtaggcctagctgttctggcactcactctgtagatcaggctggccctgaactcagagattggcctgcctctacttctagagtgctgggatcaaaggcaccctgcacccccccaccccgccccccagtgtttggggtgttttgcttgcatgtgtgtctgtgcaccaaatgtgtgcctcatacccgcagaggtcaaagaaagcatcatatggttgtggagctggggtcacagatcatctgagctgccacatgggtgttgagaatcaaaccatggtcctctgggctgaagtttcttaaaggtaatagtggccacctgcgccactggacagggacctcatagctgtcccaaggcagccactctgtctagtggtttcttccagacatcccttcttcctgctctggtgtatatggcctgaaaacagatggataaaaagccccaattgaaaggcgctaattacctatcattattttccctcgctgtaatttgcgtgcaacgagatttccatcagttgtctgggatcagcctggttttgactaatctttcaagcgacacggtacttaattacagatttctgcctgagctctggagcatgtgaaaggaggaaggatgtcactggtgctgttatgctgttaagcattcagttgtcctgggtcccagcgagccccaaggcgggggtgggggtgtgtgggaacaccctgttgggaaaatattcccagggaggggactaaaagtaaaatccagactttacagaggaaagtgtctgaatagcaaggtgacctggaatgatggcaggtgggtgtggcatcctctgtcagcttggtttccagggcaattcccccagctcaaggcatctaagccctacacttctggggccctgtctatcaacctgtctagtcctctagtggctgggacaagcaggtttcccaggctatggttacctaatctaaaagtggccaggttaggcagagaacttgagaacctgtggatcagtggctgctgctaggcaggtgtgtgcctgtcaaactcacagcaatgataaaaagcatcttctattaaaatgagcaattcgggctactagaattaatgaaacttccgaatttaagaaaagaactgcatctgtaattaatgaacatcagtgcatagaacctggatcatcataacgctaacatgcattatccttggcccacccatttcttctcttctccttcctcctcctcctctccttacttccatgtagtaagcaccaagaaagctgggactttgacagtcatttacatcctgtgcactgttaaaggcatgctgctttgagacagggtctaatggccttgaactttctgattggtgaggccagccttgcatttctgatctcaccacccccctccccccgcccctgcttccatcaccccagtgctgggattttaggcatgtaccaatgtgtccaaccttcaataagggctggttttaaagtgtcaggatctcatgtggttgaagctggtctggaactctctgtagagccaacctgctgtgcatcccttggcaggaagtttaggtgtgatcctcccaggtgcccgagggtctgaggctcacctaagggtccctggcttccggttaggtcagtgattactgagacgtgtgagtcagtatctcagaccccccccccccccaaggtggattcgaagtccaggtctgtcggtcctcttcatttgccaactcctcctcatactagtattttggcaaattcctttcattttaccctcaattttggatgagggtggggtttgtcagcgagcgcaagtcagctaggtgctagatttcaccggaagctctccgaggaaattaacacaaccgcagcacccgggctttgccggcttgggaccagtgctgtttggagctggttacctcctcagctctgtcatcgatacacccctgggaaatagaggctgttccactcatgagcaccccaggtccagagaaggcactacctggctactcagaaacaaacatacttggaggcaaaactggtatgcttggcacagatgtttgcccctgccctcaggtgcgaggcattgcctgagcagagagccagatggctgtagctagggagacaggtttttttttttcttttgtgactcagattctttttagtggtgggaagaccccaccccacagtagaaaacaggcaagccagtctagactgccttccacctgcccacccactaggaggtcacctcaagtagacctgtcccaggattcttcctaaatttatgagtaccagttctcttcccagcatttgaggttctcctggtccctttgtaggtaaagaatcttcagccctgtgtagtgatgtccagcaagatggaggccacatttaatcagagggtagtgacattgaggccaaggtggctcattgggctccagttaccagacggatcaaagagaaatgatgcctcgtggggcttcgaccaccaatgattgctcttgcaaaggccatgagatgggatgcctcttcccttcccacgaggagtcaatagttattgatccagccggtccccgatgagggactggcctgagcccccgcctagagcacatcagacttgcctcatactctcatcccgagacggtgcccttcctggacttgcgcgtggcaacctatccacagtcacctctaaaatcttttcatttttaattttcttctcctttgttttattttattctattttttactatgttagccctccttggcctaggactgacctgtataccaggctggccttgaattcacaaagatccacctgcttctgtgtcccaaatgctaggattaacggtatgtgacaactttttggagcagagtttccagcagccctggctagcatcctactcaactcactgtgtacctgaggctagccttgaacttctgaccctcctgtctctacctcccaagtgcagagttattggcaatcactgtcaggcatgagtttttgcagtatgggggatgaaactcaggccattatacaaactgggcaagcactctaccagctaagctatatgccccacctctcccctaccagctagctatatgccccacctctcccctaccagctagctatatgccccacctctcccctaccagctaagctatatgcccacctctcccctaccagctaagctatatgccccacctctcccctaccagctaagctatatgtcccacctctcccctaccagctaagctatatgccccacctctcccttcccttcttaatatcagtaactgacagaaagcgcagtagactctaatctgaaaatctgagatcaaaatttgcccccaaatctgaattcttgttttgttttgttgagtccaaggtatcatacacggctttcacctgaattgtatccgaagtagtaggcaagtatttctaataatttaaaacttgtagccattaagtcattagacttgtagcatcaggatagttctccaaaagtttgggatttgggggcttgctcctgggtttcatccccagaattaaaaaaaaaaaaagtataaaattactttctggcagattgatagcctttggagaaaataaatcccttgcatgtttagactttcccatcttccaggtcatattatttgtattcaaatattccaaaatctaaacaaacaaacaaacaaaaacaaaaaacctcaaatccaaaatactttttggtctgaggtattgcattacgaactactcaatcagtgatctgcagtctgtgttgagagaaatggggaggaagatttagtggggcggagctaaattagtggtcccgggaagaactgaattgcttggggaagactggaaagtatggactgttattcttaaataccttaaattctttccattctcagtgaatggcctctcatcccagatgagactcacaccagtccaaagtgcatcctgtccccacaccctgccttgtgtgtaagcaggtgctgctgacagctggtaaagaaggcacttccttccccccccctcccctaccctccccccatcctctacctccggcagccaaacttcctgaagaattgtctgccttcacttcccctctggccattgcaacaccacatccatccccaccataaaggtgagcccgctctggagccaggccacctcctaatgactaaaggaacagaggaccagccccttcttcctcggtttcaccttgtggccccatctaatgtgcttccagacagctctgaccattgcatttacagcaggctctttttagtcttttcagtgtgcatgtgtttgaagagggggtgcctgtatgtttatgggggctagaggttgacattgggtatcttaattataatacactttttttgtttgttttgagacagggtctcagccagaggaggtggcacacacctttgatctcagtactcaggaggcagagacaggtggatctcttgagtttgaggccagcctagtccacagactagtgagttccaagacagccaagaatatatagatcctgtctcaaacaaacaaacaaacaaacaaacaaacaaacaaatacttgcctactacttcggatacaattcaggtgaaagccgtgtatgataccttggactcaacaaaacaaaacaaaacaaaacgggcatggtgggtcacgcctttaatcccagcactcgagaggcagaggcaagcagatttctgagttggaggccagcctgttctacaaagtaagttctaggacagccagggctatacagagaaaccctgtctcgagacaaacaaacaaacaaacaaacaaacaaaaaacactaaagaaataaatgcaaagagagaaagagagagagggacagaggaagggaagaggagggaggggtaggtgtgggaggaaagtaaataatgacatcgttaaatcatatgcccctctactgggatacagatactaaatttctggctgcttatcctacaccaactctgactgagaccaggatccaatgaaggtttctgaatcaagacacaaggctggagaggaagccagggcttgggagcacaacctgacccctcgagtgtctttcagagcaggctgagtttcaaaactgggaaggcagtggaaaattgtggcccataccctcccaggagaagctgcagcctcccctcccctctccctcctggaaaatgcttcttgtgcctcagagatgaaggggagcaggggctcatagggcacactcaacagaagctgctactgagacttcctgtgtccggtgtaaattgggaaatctctggtgctctcagagcctttggaaagttgggtggaattacaggatttgtgagttctggttcccccaggccttcacactgagcccaaggtgctgtggagaggaacacagcccaaagcagtcaacagggaaagctagagagggtcagacattcagtcgagaggagtcagctgcccagcagaggaggacaacgctttaggccgtgtgctcagtcagactcccctccagatggtgccctgctattccctcaggataccttgttggtggttagacaaggtagccatacccaggaagatcacaaggcaccagccagagatgcagaaaggatccagaggagacccttaactggggacccgccgcttatgatgcagagaatggggggtgggggttcggaaggagaggattcccagggttaaaggaacattccatctagaacagtagggacctggggacccagtctttaccaactacgaatgtgggcttgtaagctggagtgctgggcctttagtgggcctttcattccaatacctgaagctcgccctctctagacaagttcatgtgcaggtgagtgagtgacaccctcaggaggtgtgctgagtgtcattgcactttagtgagaccaaaagcccagtcacattaccaactccgtggtctgggtttgaggctagaccaggaattgctatgtgggtgcaatgataaaggctccgtccccattccctccggagtcacccttttttgtgggcactttactaaaacgaggaactcacaagcaagttacctgcaagtggcacaggaggaacagaccgccacccacccccgcagctctgaggtcttccttcctacccaggagtctttctttctgtgttgtttcccctgctcttttccttgttctgggtgcctaagccagtacggactctctccactgaggcaggcctgggatcgaggctactttcagggatcatacctctagacagttttgtttcttggagacagggtctctctttgcagtcctggctgtcctgggatactttgtgtagaccaggctggccccaaactcgagatctttctgtctctgcctctgacgtaccacaatatttgagaccatctacttaggcctcctgcctcagacccaaatcctaactgaacatgtcgaacaaccaggttcccctgaacggtccttcaatccagtcccctttacgtgaacttggctggagagacagaactcccagtaatgggaaaggcatggttatcctacagttttcaggggtcccagatgatctgcctcattggtgaggccccaaagcattccagaaggttctgggctaacaaaacaaaacaaggtgaaaggatgatagtaggtgatgagcagagtgcttttgagctttatgtgagttaggggtgggtgggtgtttaatctctaaaagaaaaaaacaactctggctaagtattacatggtgtcatgccaggctttgaggagcatgcctttagtcccagcactcaggtggcagaggcaggcagatctctgtgagtctgagcctagcctggtctacatagtcagttctaggccagccagggctacacagagcgactctgtaaagttacacggtggtgcagacctgtagtcccagtttgttcctggctgaggcagtaggatacagagtaggatgggggggggggcttcatgcgttctcatggagacagcctttggggactgggggtgctggatgcaagctggattatctcagagctaagaaggaaaaataaaagccagagcagatcccccctccccggggcaggggcagagactgggggatctctgagtttgaggccactctgttctacagagcaagatcttggtggccagaactacacaaaggaaccctgcctcgagaaacaaaacaaaataaacaaaaaagcagaaaaagagaagacaggatcaggaatcatactttagatgggaccgccattatccagcccggaccacggggaaaaactcacttggtgccttttggttaaacggtctctctccgtccagttagaaaacttggcagtcttggtgactgtgaagtcctattgaagcaaatcccaagcttggacttcacagctctttgggacaggcacacggtcagcttccactttttgtgaggtaggcaggttggccaaatatttaggagggacagctaacatcttgccatccttaggccagcaatttgcaaaagacagggtctctgatttgaagtttacgaattcaaagtttcttagaactctgaagtcgcagacttttctggaaagcagctacagacctggccaccctcgcagctctcctacgtcatacccgtagacacgcccatgtggcccgcccactaggccatagccccgcccaacctctcacctcacttagaactgactcccgcgttctgtgttcgcaggctgctgaaccgaatgtcgtccgaagacaggcacctgggctctagttgcggctccttcatcaagacggagccatccagcccgtcctcgggcattgatgccctcagccaccacagccccagcggctcgtcggacgccagtggtggctttggcattgccctgagcacccacgccaacggtctggactcgccgcctatgttcgcaggtgcggggctgggaggcaacccgtgccgcaagagctacgaggactgtactagtggtatcatggaggactccgccatcaaatgcgagtacatgcttaacgccatccccaagcgcctgtgcctcgtgtgcggggacattgcctctggctaccactacggagtggcctcctgcgaggcttgcaaggcgttcttcaagagaaccattcaaggtgcgtggtgggcagctcaagacctggattcaggctttgggtgggggccttggtctacaggtctagttgggttattaattccaagtctcgtttcctgggggcagaggtgctctagaagtctcctgatctgtgtctctgggatcctagacaaggatttcaactctaagactcatagatataccatgtttcttcctgcttggtccctgaaacgccgtagaaagagccacaggaatacctgctcttggacagctctcaacacgcatgctgtccactgcatgaaccctccctccaaaagcctatttgtgtgtgtgtgtggggtggggtgggaggttgaggggaggaataggtgctactattatttgactcactatctcatacttttggctgtctttttgcttctatcttaatcacacctgtagaaaggtaggcccgatttcacgtgggcaggagctgactgggatcctggaagctctgggctatttttccatacatttgcatatcactagggtcacatgctgatagccctgcggtattcagctctttcatctccatgaatgtgtttgggagtcctggagcctccctctgtgcaggtgagtggaggataataatggtggatccagtcctcactgggcgatattctttctggccctgtggggctgggaacgagactcctaatgcttcaaacttagtggtgaacacttaactgacagctgttggtcagtcaaaacatctggcgagcacctcctaagcaccatctatgcaggtaacctacaagggccaattcctccagcctgggcggactcaccgccatacccaaagatgctggccattcctcccattctggctccccaccctcaccccccacctacatcccacttacctccccaccctcccatcccctactccccctccaccctaccccaccctcttgtcctgtcttttggcttcaacttcattctgttcaactagtctcacatgaccactctggaaggcattggctaagcttccctagggtgattctgtttattcaacaagcttatgtttgttaatctcattggataatgatctattagaccacttgagggcattaaatgttgggtatatttacagttctacttaaccatttggaggctgggctaacccaccaggcttctgggtcagactgacacttgaaccagctcttacctgtgagctcaaacgtgggtgtgctgcctcagttcccttatgtgctttacagagtgcgttttatttttagggttttatgtagccctctgtaggctcaatttactgtgtcagcaagactggtctccgatcgccgtctttaccttccaaatttccatgtgcagggactatgggatggtctatcaccaccacacctagattttccttcctcttcttcctttcctccttttcttttttccctatacactattgagaattgaacctaggaactgattgtctgtgcttatcaaggcatgcttgtagaagtcagaggacaacttgctggagcaggtccttcctttaacacgtgggcaaacgcgtatcaggagccttggcagtaagtgtctctcgccactgagccatcatgctggcccctagcttaatgttcattgctatttttacttttaacaatatcacttaccgtacacttttactataacatcaagtttcattgttcagaacaagctttgtcataggtgtatatttaaataaagtagtataattactttgatctaataaaatttagattactaaactattttagggcctctgagattgcctagtgtaaatatgcccgtcaccaagcctaatgacctttcggtcccagtgacccacgtggtgggtaacttatgacctcacatgcacacacacgtgcacacaaaataactaaactacatttagtccattgtggtcatgaatgatatttatttggtgttttgtgacaggatctttctgtatagtcctagctcagccaaaacacatgagacccacctgcctcagtttcctgagtactgggattaaaggaatacactagccgggcagtggtggcgcatgcctttaatcccagcacttggaaggcagaggcaggtggatttctgagttcgaggccagcctggtctacagagtgagttccaggacagccagggctacacagagaaaccctgtctcaaaaaaaaaaaaaaaaaaaaaaaaaaaaaaagaggactacactaacaggcctggccacaaatgattctccccttcctacagagttttgctctgtagcccttgctgtcctggaacttgctgtgtagaccaggctggcctcaaactcaaagacctctgtttgcccctgcttcccgagtgctgggacttcaggcctgtgtcaccacagtgagatatgaacaaaatctcccttagaatctttttgccgagccagcctgcctatgtgtaggctgaacacatagggccatcttgttgtatactaggagcagaggcaggcagtaaatgccccctgggctgctcctgccttgtagcccccttttgttgctggggtgtgactcaggatatggcacctggggcttttgctgctctatacccccacccttgggtggaggggacctcaaggtgaaatgaatggtatggcagacagttgtgtctcttgcttcagccggtgcctagagcttacattgagcaagtgctggccacgtatgtttgaagcatggcatgccaccgaaacacgggcttttcctggttaaattgggaagtgaccttgcaggtttgttttatactccttaaaataattttttttttgaaaatgggattttagaagacagtcacgttttctcctttccgtgggtttctttaaatggggcagagatattctagatccggtttttctagaaaccaaggctggtatgtatagacccagctcctctgctaccccctttcccagggacctagggaagatctgtaaacagtattaattacgtgctaccgtgaaaaggatacagatcttcttcctagaagttggctgaataccgtggcccttatctccgggagaggtctgaactcattacaggactcgctcctctccagagtcggggaaagctagcttgaggccagaagttggccggatgctctcgccttattaactctttagttttgtgctgacggaagattgctatcgccctgtagcccttgcgggctagctgttctgcctctgcctctcaccccgtggtcccgtggtttcgcaattctctgggatggtttgattgtttccaaatggagtcagcagcacaggagtgaagcaatcacctagacattcctacacagtacccagcaggaatttgagaccggagatgtagtgtctccaaaaaaaaaaaaaaaaaaaaaaaaaaaaaagacaatgctaagtgcctagggtctgcaggatctgcaggtgtgacagtcagctgcagaacacggcagctttctcctaagcagggcgatccagaccatttttctttgtgtgcacggtcagggagggtatttccaggactgaggcgctgtgtgggctcagttttgtttgtttgcttaacttttgagacctggttagcccagaattttgctatgtagtccaggctggccctgaattcatagatccagctgcctccttcccgtgagctgggattggagccagcacatgggaagtgccagactggaacctaaacttccttgagggcaaagctagagttctatggaactacacacctcagctgcgggccctcttttaaaagtctggctttgtgagctggtgtagtgatagaagcctctgaaaccctgggaggcagtgggaaagccagcctggtctatattagcacgtttaaggccaacctgggctacgtagaaaaaggcttagtctgtgggttgacatccaagcacctgtaaaaaaaaaacatctgtaggctctgagcacagcagaggccccgactctgctatcccttccagtttgaaatttctgtctgttccttcctttaaggaaggaagtttacagaaaccagcacgtgatgacagactttgggagaccacccctggtggttcatcctctgggcttggctgcagatgaagaaagaggggtggctcgcctggactagcgactagtgactagcctgccttcaacttttgtaaatcaagtagttgctgggacccagacactagcattgacttactgtccccaacacgtgactgagttgaaacagctgtctgttggaccccaaaagcctagacctttattttactaaccaccccttctagagagcaaggcacggtctgtcccccagcttctgccctttcaaatcaactccagcggtgtaagtggaatgtcagagctgggagctgttaggagcatagcccagaacagatgagctcagagataatcaaaggcaccttactgctgacagaccagtggctccaggcagagggaagatgggggtctgattgaatttgctagcatatctaaaggagggtttgtgactgtccaggacgattagcctgcccttggagcagagagactggcaaaggtgccctcctgcccagggaaagggaagctgaagctaggggcagcctgggtgtgatgtattaaacgttcatgtgatatgattaatatcttcctgattatgacctagttctctcagtcaagttatgaactttctagctaggtagacagatcagtttctcaagttacaggctttgtttctttctgtctctggggcttagacatcaggctcttgaacttgggcaatgggagtctgccccctcacagacaagcccctttctgtggctggtatcatctgacttgtggggccttagggatcagattcctgcctgtgacgctgaccccaatcccatactgatgaaggctgtagatgttaggtctgaagagcagctccagggccctggcagtcaaccttgaccacactagcagtgactgcctaccttttcaccgagcgggatccttcttttgcttttaaatgcatacgaaggcgcctccagtcctcaaaatgtcctcaaccctcagcctccctcccttcttcccttcctcctttcagttatttttagtggttacgatagaggggccattttcagtgaggttccctcttggagcctctaagtctttacccatttccagcccttaggataactcagacactgttagcactggtctgatttcctgagagggtaggaagcttagatttggaatctcgtgatgcaagacagttattttttagacagaacttcaaacttgcagtaattctctcctgcctcagcctcctgagtgctgggatcaccatgcacagattttgttgttgttgttggtggtggtatttttattacatttgtttactgtgtaccaccacagtttgtgtcgaggtcagaggataaccaccctgcgggagtcagccagccctctgtgtagatcctgaggatcccacataggttttcgatcatggcagcaagtgcctttacttgctgggctgtctccagtccttcaaaaattaagtgtgtgtgtgtcccaatgtgtaagaagccctggcaggcctcaaattttctgcagctcatctgcaagtggagagtggcgccacacccaactgatactttgttttgttttgagatagtctcctgcatcgctggcttccttccactttccaagtactagggcctgttttcatttttgaaaagctttcctgtgcgcattttgtggggtagactttatcgagtttgccctttgaatcttgggtctttgccagcctttcgagctacattttgagttgttagtgtttcaggtccctctatccttccgggttaattgaatgtgtgtgatgctcttgtttaggttttttaaaaaaagccataacacatgtgtgtgtgtgtgtgtgtgtacaccattaggaaaaattcttttacgtgttagtttccaggtgttgggcttaactaggcagtacagtgcttttgactcccaacacttcaactcacaatcctgagggtactaaaatttgcctcacatttctttgtttgcttgttgttgctgattcatgcaggtgaccagtgttgattgcagtcttcagacagtgccattgatttctaggaagttactgaaaggccaggcatgttggtgcatacctttaatcccagtactctggaggtagaggcagacagatcagagttcaaggccagcctggtctttagtgggagattttatgtatgtatatatatgagtttgtgttgagtgccaatcattgcactggggactgagccagggcccctactctagcctctccgatgtgacaaagaagtcaaggaacagactgagatggatcagcctttagtgacagatggagaccaaaggtgagggagggtctgggaagaaatagctctcagggtaagttgaggcccaggtaagaactctgggatccagtgctgtgagcagaggaaacttcaggtgtttcaaggaccaaactgtgactttgtgagccagtcagtgaaagcttcatctcagctgctccagaggccgaagcaggattgcttgaatcccggacgttcaaggccagcttggatgtgaggtatcataaaaaacatctccttaaaaatgatacttgtgcacctgggggaaggttgtctgcacatgcatgcctggtgcctatggaggccaaaggaggtcctcagatctcaggagctggagtgagaggcagttgtgacacacacacacacacacacacctttttatttgagactgattttctctgagtagcactggctgtcctggaacttgctctgtagatcagactggccttaaactttgagatcctcctgcctctacctcccgagtgctgggattaaggacacctggctaaagttgtgagccctttaatgtaggttctaggaacggaacttgggtcctctgcaatagcagtatgtgtcctgactcgctgagccatctttccagcggccacctccaccccttcattttctttcctttcctttgctttgctttagggataaggtctctttgtggtctcggctggtctagaacttgacatgtagagcagatcttcctgcttccaccttccaagtgctgggatcaaaggtgtgcattacctacgacctctgcactgattttttttccccaagagtgggaactgagagtgtggcctagtggtgggacagatacttagcatgtgtgaggcttgggttcagtccccagcgcaggaaagaagggcagtgtggggcacgaagccaatctgtacccacccagaccgcctggaagaggtgatcaatgcagcaggagtgagacaccctgctgacacctacctggatctgtcatttaagactaggagcaagtgaggagtcctggcttggagcgcctgcccaccagaggcacagctgcaggctcagctcagtggggaaagtctccacggagcagggctgagccatgactgatgggttgttctgtctgggaccacctccaggccttttgtcttagagaatgaggctggtaggtgaatcctgggggaacccaggacaggcatggggacaaagcccaggatctgaagcagcttgcaggccagtgacaagccagctggctgaccttggacaggggctcgagtcccctggcctcaaattccctgccatcagagtctgttaaaatggagccaccagaaaatgggaagagcagctcatgatcctctgttgaagaccggtggatgcactcaggatgtggctttgacttggtgagagtccaaggagggcagtttaaacaaattcacaatcatatccatacagttttgtgtttttgttttttgagctgtatccttgtgaactgtatccttgtgaactagtgactctttgaactttcatttctttattagcaagacactgctattaaatatctccgccccctcaagtgttattgctgaaactgagccatgggcataatgtgtgtaacttactgcccgcccggtttgtaatctctaggaaatgaacagttcactgggcttgacctaaggaagcgttgaaggtttctgaatagggaataagatgtcctcttagcaaaagaattttggcagtgatgggaaggaaggatctagatgccaagtatatctgagggaagaggatggagttaggtaccattcagtcagaggagagtccagaagggaggagagcggcagagggttcagagcacagtggctggtgacactctgctagaggcaggtgcaagggcatgtgggaaaagaaacatagatggtgggatcgaggctgaagggtgaggaatagaggaaagttatgaaatagataagattctggatgcacacaaatctgatcagttcagggacagttgagagacactggagtccaggaccatgtgctctgagctttaggtaaaaaaaaaaagagatccagggctgtggctatctctcgttgtgtgttgtccccccacccaccaccacctatttggcttccttggaaatgcaaatttagggtcctaccccctggactgaacaacttgtgagagacttgtgactaccacgcccagccagctctgtgggcaggtagggaggtggaggggtgatgggaaggaggggtgatgggaaggagggagggagagccctaaaaggagttgagaacaccatcccatcagttctgaaacactggctcgccctgtttgtggctgagcacgcacacctgtccggatgatggtgaggtgagcagcctcatgtgcacacaggaaactcctagaatctggggaagactgaggtagcagtggttgctcctgtaaaggaacagattgtccactcctccttaggaagttaaggcctgtgaactgatgaccttagtaagcaaatacaaataaaaaactccttagaaggagccaggcgtggtggcgcatgccttttaatcccagcactcgggaggcagaggcaggaggatttctgagtttgaggccagcctggtctacatacagagtgagttccaggacagccagggggatacagagaaaccctgtctcgaaaaaaacaaaaccaaaacaaaactccttagagcatataaatatatatgacagggtctctctacacagtctggctgtgctgaaacttgcactgtagaccaggcagggtggatctctgccttcagggtgctgggattaaaggagtgcacaccacactgcctggagcagaggttttaactggtggagttctctttttctttcttggcgccacattgaaagttcattttaagacctgtggtggcaccttcaaggtcaatggctacacagcaagtttgaagccagctggtcataaatgagaccctgactcaaaaatatcgagtgtttttaatcccagcatgcaagaggcagaggcaggcagatctctatgagtttgaggccaacctggtctatagtgtgagttacaggacaaccggggcagcacagggccatcttgaaaaaccaaactaaaccaaacaaaaccacaaaggactctaaagtccttacagaattcttcagttcagatagggagggagagcaacacagccgaattacatcagttgctgtcagtgggaaagatggaagggaggaaggaattgtcctgaaggccacatggacagacccagaactgggaggagattgcctggagggacaaatgaaggagtttggggtgtagggagttgacaggttccaggtttcacgggcgtcatagatggtattggttattcaggttttcccggagcctctgtgaggaaggataaggttaccctggtcagaggtccccgcataaagggctttgctctggcgttttgatttcttcctttgcatgaccgactgatatgctgttctcttagttcagagtttgcagaggaccaaacctagggctctcggcctgccaggtaaaaggcctctctatcacagagctacaccccaggccacagaatttcttaagttttcatcaggtatcatttaaagataactaaagaccatatagaaacactggttctcttttttaaaattggtgttccgctttgtttatcatgtgtgcgcccttatgccacagcgcacacgcacacatgtagagatcagaacttggaggacttggtagatctctgccccggaagtcttgatccttctcaggttctcaggcctggacacaaacacctttactcacagagctatcttatctcggtggtcttagaaatacaaatgtctaagggaagataagagcagagcccggcccatctcggtaccttatccaaagataatctttaaagaaacccaacccaaccaaaccaaaccaaacaacaaccaaaccaaaacaaacaaacctaacaacaacaaccaaacccctctagcatattctctgttactgtctttatcgcttccctccggtacttactgccttagatagcttaactttttcaaaatagggtcacttgcagttcaggcttgccttgaactcccaaccgcttagccctgaagttatagttatatgtgtgtgtcattacacccagtcttcctgtttgtctgtccctacccttgtccaccaccccccccccaatcatttcctccacttattcggttaaaacctattttcctgttttccttcttgctttgccatcctcttgtttctaggttaaatgatggttttggtttcttccaccttttgtagtttttgttccctgtgaggcccgggctgcttgagcatgctggagaggactcgcttcttttcttttcttttcttttcttttcttttcttttcttttcttttcttttcttttctcttctctttttaaaagatttatttatttgagtacactgtagctgtctaaaaaacacagtagaagagggcatcagatcccattacagatggttgtgagccaccatgtgattgctgggaattgaactcaggacctctggaagtgctcttaaccactgagccatttctccagcctggaaaggactgtatatatatttttttaacccttggactcctactatattcacaccttggtttatgtgggattctggctgactgtcaccaccacctgccactctcctaacctggacacttgttgttaaggagaaaagcaagggcagggaacgcgatgcaggtacttcccctgagagcaaagtgcagctcaggttgatctggggctcaccgtgtagcctgtgctggctgggaactccattccaatccttctgctgtgatatccccagagcttggctgacataacctttataactcttgcacaccctggaaatcggtagagatgcagttcccaggttgccctctctctggcatggggttctgagtgtgacagggcatgaaaggtgttcctttgcttatcttaccctgtgcacatgctgttcctgcagagcagagccctctgtatccctctcttggtgtgtgggggagtcctctggtttggctatggagggggccgagcagtcccaccgtccattcccgttttgtctcccgcttccctgcttcacttatctttgcctttgatcctgtgtctaggacatctttggttcatgttctccactgactgtcagtttcctcctgtgtagaccttggagggacccttggtggccaggaggaggctgcagagctggtttgcttcagccagacactccctctgcacacacttccaggaaatctgttttccgctcgggccgccacctatcttgcattatcttgaatcttctgtgcctgaggccctgtgagggagcggatcttcctccttccaggtccttcctttttgaagctattccctttatcctgttttgttttgttttgtttttcgagacagggtttctctctatagccctggctatcctggatctcactctgtagaccaggctggcctcgaactcagaaatccgcctgcttctgcctcccgagtgctgggattaaaggcacgagccaccacgcccggctttatcctttatttttatcttgtgtctgtatgtgtgcgtggaggtcagagtacagctttcacgtgtctgttccctccttccgtgggttccaaggatgaaatccaagtcttccagcttagaggcaagctcttttaccaaatgggaggtggtctcgaagatccgacagcttctcatctgcatccatttgagctttgggactttttactttctcctctgtcctgttcctctccccaccctcccttccttttgagaaagggtctcccgtatcccagacatgcctcgtactcagtacatagccaagagtggcctcaactcttggtcctcatttttttttactgggatcatgggtgtgccatgctcatgctattttggtgaacatcacagggcctgacaaagctagacaaggactctgacaactgaggtacatgcctagtgcctctacctgctccattccccaaactctccctgttggggcaacctttaacaagcttggggaaggtacggagatgtgtgtttcattgtggctgcctggaagggacggagatagcagaggccacactgctttacaacacagactgagtgagaactggcccattggaatgtcgcctctggggaagaaggaggctggaaagggccttgggagcaaattgtgtaagactccagaaacttccttcctcagtgttggacccaagaggcaggctggggagtcactctctttgacatgccgaggaaaatggagcaggacttcccgaggatggtttcaatttgaggaagctgagaagcccagaggcagtgtgcaagtccaggacagacagaccatctgtcccagtgcagagcactgccacggtgtgatggagaatccacacaggacagagggttgaggccaggggaccacacagacagaaagggatgtctgtggcctacaggactgaggtgagtgagagctaagcctttctctgcagctgctcaccacagcccttgaggtcagctggggccttggaaccgtttgagcttaacagctcctcggagcctgagcgggatggggctgctggcttgcttacagccacaaggacagctgctggggcttcccctggggttcccttctcagggtggcctaggatcaaagagactaccccctctgcctcagggtcacactgagttccagctcagctccgaatgttcctcaggcacaaacaggagctgaggtccagccacacccatagatagattatagtgctctcaagtgtccttgggtggacaggacagcctctgtgtggcactgatgggccagatgccagcatcctctgcatctattccagcagatctgcctggatgtacgattcagtttgctagccttgcctgcttggatgccaggggtctggtgtgctgagctcatccaactttgagatggaaactatacccattttatagatgaggaaactgaggctcagacaagttaggagactcagtttgggacctgagcttgtgctagctgttggctaatgtccctgtcctatgaggatctgttcactaacttagtcacagctgagtcaatggtgatgtgtgtgcgcgtatgtgccccaccaatgtcccctccctgtgctgagttctcccagacttcccttgagacctcgggaacaatgatgaattaatctcatcactttatcaaggaggcacttagagaaattacaagaggaggccaccagcctggttttgctggcagccagccgccgggcccataaaacaaattgaaaggaaccaaataaataagtagaattagggacacacacacatgcactcccgtgtgtctgtgggtatgcgtgcgcacacttgtaccctgaaaggtcaagagcattgttagcactctggccccaggaagccctcttgtcctgtttgtcaccttgccttaggaggacagcacaatcaaacccaccccaaccccgttctgagcaatagcccatggccctgcagctgagagcagggcacagaggtttgcactgtgcaagtcccaagcaggccaccagggttcagtccttaggctgtttcggctaaggacaacaaaatccccagactctcatggtataacctaccccagcctgatgtggccttcctaccacactatccctgactctcatctgtaagaagtgtgggatgttaagttaaagacaatttatgttgatcagggctgcagctgggttactcaacgcctggttatttagtggttagcgtcccatgggtacttatgagtgtcaggtacttgatctgtcaagaggaagtggcagcctgcatgaggaaatagaggacacagacagctgggcagcgtggcgaggtcagcacagagaagcaataccttcccagtgggctctggattggtggctgcaggcctgggacagagggtacttggtgggcctgcctgtttgccagttccagaattaggcatgtacagtgctggggagtgggaggagcttggggctgtgcatgctgtggggatggtggggtgggataggggacagcctaccgagcctcaatacctacacacatggaacagatgcatcagcggagcctgtgtgcctcctctcatttatcttttaatattaccatgcatagcctggtgtagagacacatctgtaatccaactactgagtttgaggacagcctgggctacagagtaagaccttgtctcaaaaattaaagattactgaaaaacccccaacaaacagaaactgcatttatataggttgacattactaccacacctcagttgacttcctacaaaatttcacaagtgagttctaagaaataacactagaggggttggcgagaaggctctgtgggtgcttgctgctaaggttgatgatgacctgagtttgattgagcctcagggtccacatgttggaaggagagaaccagaagttgtgctctgatcatgcaacagagagagagagagagagagagagggagagagggagagagagagagagagagagggagagggagagagagagagagagagatcattggttgagggctggggaaaggaatgagaacatgtgtgagaaaatagtcccaatgtccacaggggttggggggttccccggcctgtgctgtggagctaaggggatgctgcagtgctgtggtaacttgggcccatccctgacactgcgtcagagcccttatggtccaggagtcatagacctggcagagttcccatatcccacaccaggaggctgtggtgtgcaaaatgccctgggccacttacctcccctcccagtcaccaggccacccgagctgtaggttatcaacagcctgcctctgttggtgaggtacttcccaattctgtcaagttccttgggaggtacaggggaggggtgtatatagggtttctgggcctggggtagttcattttggcttcctgagtctctgtcttagtcagggtttctattcctgcacaaacatcatgaccaagaagcaagttgggaaggaaagggtttattcggcttacatttcgatacgctgttcatcaccaaggaactcaaacaggtcaggaagcaggagctaatgcagaggccatggagggatattccttactggcttacctcccctggcttgctcagcctgccctcttatatccaatattaccagcccagagatggtcccacccacaagggctctttctcccttgatcactaattgagaaaatgccttacagttggatctcatgaaggcatttcctcaactgaagctcctttctctgtgataactccagctgtgtcaagttgacacaaaactagccagtacaatctccattccttggtctgtgaattgggcactgataggccagctcagagttgtgctaagggtctagagagctgatccagaggctgcacatagtaggtagacggggagccagggcaggtccccagcttctccctcgatctctgggatggattgaggacctggtgcctttctgttgttcctcttctagtaccaggcgtgttgtaggcacatagcccacatttgttaaataggtgttgaatagacagggaagccagagtagacactgtccctgtgtcaggaaggcagccatatttgcaggatgaacatgtgtttataaaccaaccagcccatgtgctgagtggtttgttgtttgagacagtctggatgtgtagctctggttgccctccaactattgagcatccttcgttatctccccaggtgctgggacaaagtgaatgggttgccgtacttagacagtggttctgtatgagacaggctatgtagttttttgtgttttttttttttgttttttgttttttttttgagataggctgtgtatctatggtatgtgtatatctagactgccctccgactcctggtctgtagctaatggtgaccttgaatttctcaccctcctgcctctacctccatgtgctagatcaccagcaggcctggtgtatgtgttgtaacccgcaaccaaggacttcgagacattaagcaagtacttacagccgagtgatgtcttcagacccattttgttctgaagacagggtctcctaattcaggctggccttgtacttgattcctagacaagaatgacttgacccctgaccttcttcctgcctccacttcccacccagctgctgaaattgcagagccagtgagatggctcactgggtgaaggcagtgtgccggcaagcctgaagacctaagtacaatccccacgaacctcgtggtgggtggagaaaaccatctcctcaaaggttgtcttcacacacacacacacacacacacacacacataaccaaatgtttaatagtaaaaaaaaaaaaaaaaaaagacaggaacataaactatcatgtctaatctgggctacaatttttatttttatttttttgagacagggtctcactgtgtagtcctggctgacctcaaactcagagattggcctgcttctgcaggcattaaaggtgggcaccaccacatccaacctaggctacaattttttcaagacagggtttctctgcagccctggctgtcttggaattcaggctggccttgaactcacagagatctgcctcctggatgctgggatgaaaggcatgtgccaaggctacattttttgttgttgttgttgtttttccttctttttcttttggttttttgagacagggtttctctgtgtagccctggctgtcctagaactcactttatagaccaggctggcctcgaactcagaaatctgtctgcctttgccttccgagtgctgagattaaaggtgtgcgccaccactgcccagctgtttttggtttttcaagacagggtttctctgtgtagtccctggctgtcctggaacgcactctgtagaccaggctggcctcaaactgagaaatctgcctgcctctgcctcccaagtgttggggattaaaggcatgcatgtgccatcactgcctggccaaggctgcagtttttaaaaagtgatctttcacataagattttgcttaacccttccttcaggagctaacaactgttttgtagatgagagaactaaggctaggtgaccagaaagtgtttcctagacccagtgggggacagagtccaggtccttccagagtttcctgggcttttcctagtgactggtgcaaggcagcgtctggaggaggagctggggtggtctgtgttaatgttcagctctgcaaggtggctcttttcctgaggtaaaatgctgactcagcatattttgattccacccctcccccaaatctcgtggccgtttcagaactctgagagaccattctcagaagaacatttttctgcaggtggctttttggcctccccctgctcactggctggaattggcataggagagtttgaagcattctgacagccacttaggaccctgcttctagaaacaattcccgatgcaaccctggggtggggggagggcaagtcagctctggccaattaatgcccagattgtcaacctaattggtcggggatcctggacaaaccacagatacctggcaaccatctctctgtcattgcaggcaacatcgagtacaactgcccggccaccaatgaatgtgagatcaccaaacggaggcgcaagtcctgtcaggcctgccgattcatgaaatgcctcaaagtggggatgctgaaggaaggtaagaggcccatagccaagcaccagggtcggggctccacttggtttgtcttggtggggagggtcagacctgtgtaagggtgctataggctgagggcctcaccaaggaccttcccaagggcagtatgtgcgtacatgcagctataggctgctttgcatcatagctgtcatatcatagcctgctgggcatctcttcttagaaagctgtgggccagcagtatggaagcccagaggtcctaaggatccttttgggacttcagaccctatttggagcctcagctgtaagcttgtcattctgggacatcctcatttggactagcagcctctcacccacatctacccccacccatcttgtcaagtgaccttagactggtcctcactcaggtttgcaggtaagcccttgcactctccagagttgctccatgccataggtgacccaagtgccaactgagttttatttagttccatggagcccgggtgtttggttcttttattttatttatatctttggctctatgaatagcttttatccttcatagattttttttaagatagctttctaaggaaattagccttacaagtttgtatttattctgtgtgtgtgtgtgagtacctgcatgtttgtgtgcatacctggtgctcttggaggtcagaagagggcatccatgccctgggagtagttgtaagttgcccagtgggtgctgggaactgaatcctggtccttggttgagttaactgaagcgcagtgaagctaacaacctgtgagtctttttccttttaaatgtggctcctaggaactgtgaagtgatgtccgacttactctatggctgctgtaaggcccttctttcttcatcatctctgtggatgggcctggtttgaatcttattcagtaccattttgggaatggcatgcgtgcgtacatatgtccatgtgtatgtgtgtgcacgcgcggttgcatgtgcacacatgcacatccgttgcatgtgcccacatctttgcatgtgcacactttgtctccctcagagagagccagagtaaattcttacagatcagcttctgagtcttgatccttcttaacacggaaggaaacaggggatgaggaacagggcaggcaacaagaaaggggcacgctggggggtgcggtcttccctgagaagggcaagatggggtcactcacctcccaaacctagctcagccttcagcaggctggggactttctccacccctctcctgtgccctggagacatgtctgcctctgagctgttttgcctatgagacagcttgggctggaccttctagtgtgagggaaaattccgggtcctttctctcctcacctgggctcagcttagcatctgcaccgatgaagaagctctcggggcagatcccaaatgcctcatgggtctgcggtgtgatgaaacaacaccacgaccaaagcaagttggagaggaaagggttttattaggcttacacttccacattgtagtccatcattgaaggaagtcaggacgggaactcaagcagggctggcacctggaggctgtgctgcttactggcttcctcctcatggcttgctcagcctgctttcttatacaacccaggatcaccagcccaaggatggccccacccacagtgggctgggccctcccacatcaatcactaattaagagaatgccctgcaggcttgcctgcagactgattttatggaggcattttcttaattgaggttccttcccctcagataactttatagcttgtatcgagttgatgtaaaactattcgccacaactcccttcttaaccccttggtgatgtgttggctgtggttcggagggctctgtggaggaaacagcttccttctcctttgaaatgggctgtgttgggcctgctgtatggaagaccgaggcataggtttggtcttggttgtatgtgggtgtgactaagatggaggttggattcgatccgctgctgcccacaccagactctctctctggtgagagcttcctggtgttcacagatgaggaggcccacagaggcaggcctggttggtctccttacacaccatctttggtgccgggagccggagagtttctaggatttgaagagccataagcctcctaagccgcagagatagagctgccatcttgttctggaagcggagtcagacaccagtccaggctggagcccgtgagcagatacttccttgtctggagtgtgcctcattctctgccggttctccacatctaaggaaatcaaggcaaaggcagcctctcacccttagagagatgatgggctgttgcacttcagccaccctctcgcttgagaagatcaggcctgggtctggacttcctgttccatgccttctgctctcccctattccccatgacagaagccatgaatgcgggaatggctactcagcctcttgacagctagctggaatgctcaggattctctttaggagttaaccagtgctggaaagaggaggatactttctagtggtccccaggaaggtttcctgtcatgtcaccaatgacaggagaggcatgaccaagcacactgaagggtggcggtggcagcgggcagaggcggtggtggggagatccctgggctggcccctgaaagataagcccatggataatgcaggcctccaatggtgggagtcgtgctgggaggatgcacactggccaagtgggaggacttgcagggtgatcccagagttgcctcccctccaggagtggctttccccatgggcagccagatgtctctctgtcctgatatactgagcctgatttggctattagggagctttacttgagggaggaagagacagtcaccagggcacatcccaccacacctccagtgctggcaggcctgtatctgaaagagaaaaactgacaggaagccccctgcgtgtggatgaagctgagctcttggcttggtgtgggtccccatagagctctgtggtacctggcatcagaaaccccacagggaccctgccttggaggagcctgcaggagtctgggtctctgccaggaagagcttttggcagtagtcctggctcctgctttgtttgggtgtccctccttgcttacatgttcaaggtctagtccctgggggctagcctgggctcctgccccactctgacttgattctggaaacaaacggcccacttggctgtgctgcttgctccctgtgttagggtctcacagtcagtggaataacagtggttcccgagtcttcagggaagcagggaatagaaacatgccctcccctgcccctgcccctgcccctgcccctgttctacatgtcacaaatgtcagaaccatattttccattatagggagtattttttttgctaccctgctttaagctgctgggctcttctaatctctcacagctattgtgcccttcccagtactcttagctcagcaccctacagcagttcaatacgccaccaataactttcttagtaaaatagttcatgtcactgatccatgatttgggggctccagccattactagggataatgtcagatgtgtggtgtctctctgttgtgggatcaaagctgtcccattccttagctggttggagatggatcctgttccccacgtggcttcctttggcattgccctctctatcctggggtgattggaatagtcagtgagtgaaggcggtgtcctagagtctttgtgcagatcctttgaatggcaattcatattttcttggaaagtcgacctttttcagagtgtagaattgaatataaagtgtgacttgggttcggagccggtgactggcatttgtggttcctgtacggaacactggaccctttcttcacttgtattgatacctgctgttcaccaggtgtgtcagctccctggcgccagttcagctagctgttaaattcactcaggctctgcttgtctttccttcggctgcccacagagctgagtgaggtcaacaggacccattgatctcctttggatctgttgggggcactctaaagggggtggcattactttaagcagatcctctctaagttctgggatcagaatggaatgagacaggcctccagaagaactctgaaaatcaatccacttgctgcctctaccaggcacccccacctcctggacttgcatacgacaaccgtcccccctcccccgccaccctcccccaccgccgtgccccccacagctacgcccccacccaggcaggttgtccctgccagccccaccttctcctctcccgacctacccactctccagccactcctgctgtttcctccctgttcagccctgcctgtctcttcccaagtgttttctgagagaaatttgatttcagcgagagctgggctgacggccatgcaatatgctttcacttgttccgtgcgcgatggaaaagtggaaagatcctccagggattctgggtaattgggttagtggccagctcatgtcaggaaattaaaagggggcctgatcaggttcctgctgcatgggctctaatagttttgtatttatagagtgctctgcctctagtctgccagaaatactactgctcttctggtcttgtgaatgaaggaagagacgttctcttgcttttccaaaatatattaatgttttgaaacaaaccaactctccagcatgtcagaggacagacagtgttgaactactttctgcctatacacatgtgccctccagcgccgcccccccccccaaatctgatagctcagaaggtctccccaaagcatcctggacatgcaggtacaatgacctctggctggacaggtgttgattgaatacagacagctgcttctggctgtgtggaattcttattacctttcactccaggcatttgacaccagagcattggatcacaagctcagcccatctcttcagaccctgcttgaccatttagcagctccctgggaaagctacttagacctccctaggctttgcttccctccaggaaaatgagagtcatggtgtgcccattgtcatcttgggatgactcctgggatggctcttggattccaccatgatgtacaatgttgatttttttttttcttgataagagataagtgtaatagcattgattttttttttttttttttttttttttttgctgttgttgttttgtttttaactggtgggtagctttaggtatatactatatgaagatagtattcaagcaaattagtgaacatacctatcgcattgccacttcattttgtctggttaagaacatgaaagtcctttgttagcagacatctgagtgcagtgctttggtcgttgtggatccaggtagtgcagggcacagactaagctttccagactcaccagactctgtctggtgtttgaatcttccctttcccaaaaccccccaaagtgatttttctcttttttgtatctagcaagcagtttggggtccccatacatacacacttagctaatgagccctgcttcatgttgtcttgaaaatagaaatagtaaaatagaatttctcaatggtagtactgggataaaacccaggaccaagtatatactagacagctgctctacctatctgagctacaacccaacatggtttcactaagtttcttgggcaggccttgaaccctgactttctctgcctctgcttcccaagtagctgggatgccaccacgctgggccaagtggaaactttttatcccgctaccatggagtcttcccagtttgagtagtaggtcttctgcctcagtcccttgtatagatttctgttgtttgttttgagacagggtttctttatgcaaccccagctgtcctggagtatggcactgtagacaaggctggccttgaactcacaaagatcctcctgcctctgcctcccaagtgctggaattgcaggcataagccactaccactcagctccattagtgtcaatttcctgattctctttaatagtaatgtagtcgtccaaaggtctctggctgtacaggacgggtagcagctccacagtccactcaagcctgtgacccacacctatgactccagttctccaggcaggacagtcaggacacagggtcctttcattcacagacttggcaaagtctaatcacatgggcgtcccgctcagtactctggggatcgtttttagctgggatgttgtgggctcagcaaaagcctggttggtatggaagaaagtacacccatcttcaaatatactttcttacctttatttcgtgtgtgtgtgtgtgtgtgtgtgtgtgtgtgtgtgtgtatagatactatggcatgtgtatggaggtcagaggtcaactctcgggagtcagttctttccttctaatgtgtgggccacaggttgtcaggttggttggtgatgtccttctctgctgggccatctcaggcgaggccaggtgtgagcatatgccaagcaggaaaaatacctacacccctaccacaggaaggcagaagcgccattaaaggtcccgtcgtcattctgtctgtcgtttcttttcttcattcttggaggaaactgttatcctggcttttatgtttccctgcaggttcatctggaggtttttgtttgtcagaatgggttttcattctgtagctcaaaatagtgttgtcagcaaccctcttgcctcagtttcccaaaggctggaattggaattggaaggctggaagatggatgagccatcttacccagcttctagttttattctattattttggcttttagtttttaatgactttataagtgattttttttgggggggggaatgggattgggtggttgtttttttgagatagggctacgtagctctggctgtcctggaatatacgcatgagtttgtctttaattattatgtatgctgggtgtagccccacacgcaggtctttaatcccagcatttgggaagtagaggcagccagcttatggaaacttattaaatttccatacagtctgagaccctgcctcaagacaaaacaaaagttgtgtctgtgtgccatgtgttcattgggtacccttggaagccagaagaaggccttggatcccctggagctggaatagctgggagccacttgacactgctgctgggatttgaactcaggtccactgatcctagccttaggatcctggaccaaggtagccagtagaaactcctaggcggtgctgcttctcacaaggtttgtttatcttttgtttctctgaagtagaagccactaaacaggatgttttttcataagtactcaacaccactgatgtaatgataggccgagccgtgttttcataaagggcagaggttggacttgaccagcggactggagtttactaactcctttgcttagttagacccacacaactgggccatgacggagctgggtgtagactaggctgtcatagaagcattgtgcttctgtttgtctcccagatgtgtatgtggaagagttaatctcccaggagaagggcctggaatacatcttcagctcctgtgtgtgtgtgtgtgtgtgtgtgtgtgtgtgtgtggtggtggtggtggtgatggggtgtagtatacagtatatatatggtatatggtatatagcacatagtacatagtatgtatataccaatgcccaggccagaagaggacactgaccaccctgctttctcactttttcccttattctcttagactgtctacagagcttggagctaagcaggcaagctgcagtggtcttcccatctctgctcccatgcagtgctgagttagaaaccatgctagcttgtgtgtgggggtggggtgggatggggtgattcaagataaaaggtttctctggctgtcctgggactcactctgtagactaggctagcctcaaactcagagatttcccctacatctgcctcccaagtgctgagattatcgataatgtgccacctcagccagctcagaacagtcttttaaaagccttagtgagagtctgccatcttgttttccatcctcttagagttctccattgcacttagaataatgccaagaatctgacagcaaggttcaggtgtgccctgctactctgccatcatccgtgccaccatgtcctatccgagttccttcagctccagcctcaagggcttgctttcagtcaacttctctccttagaaaatctccatactgccctcccttggagtgcgttcctgaaggcaggtttcttgtcctttcagtctccgtgtagatgtcaccctccccatcactggctgtcacagacccccatcactggctgtcacagccccctgtagaccttgtcattgaacttcccctcctcaagaaatgaccttgtttgtttgtttatgcacttgccttattttgtttactctgcggtctcctaacacctccgttctcaattcaagaagcaaggtggcaaattacctttccactggactgtcagctccagggtggtagtgtgcatgattgaaaggccccagtggagtatctgagaccagccggccgtggtgctgtgattgattaacagtgtctatcacaggcaagaaaatgcaaagcggtggccctgggatgagacctgccttgcttgatctggcccaggtgcacttgggtagttttttttccccctagacccacacagaggggacatgacagctgggtgtggtctaggctccttgtagggagctggtcctaacctcagggtgctttccatgcccagcaggagtctgcagttcttccacagcaagcttagatcaggtcttggctggactgacttttccatggtaggtgtagttttaggcattggccagtgggaacacagggatgacacaggcgaaatgtgcgcactggtgtgatgtcatcgaccagaagggtctaggggagagagagtgatggtaaatagacattgatagctagaatactggagttcccccttagatgtttgggtagctggaatccacagaagagttggcaggagcgcccccctccattcccccccaatccccatccctaggtgtattggttagttttttgtcaacttgacacaaacctatctgggaacacgtatctgggaagaggtaatcttaactgagaaaatttctccatcacattggtctgtaggcaagtctatggggtgtgttgtcttgactatttatatagaagcacctagcccactgtgaatgataccatccctgggctggtggacctgggttgtatatgaaagcaagcggagcaatctgagaggagcaagccagtaagcagcattcattcctccatggcctctgcttcagttcctgcctccaggttcctgcctggagttcattccttgggtttcccccagtcactgtagcccgtaagccaaataaaccctttctccccaagttgcttttaaccataagcttgtttatcacagcaaactgggacactaggttaagcttcaacccctaatccctccaggaaagactactcagagcaaataaatgtatcctaaagacccagatccagtattcaaccaccaaagagctttgaacagatacttgttctagacaagaccccagatcccccagacttcaaggaacaagtcctccagtctccagggggttctcgccatgcaggactgaaatggaatggcatttggtcacccacaaatccaagtgcagagcctttggacttcctggctgtgtggccctgaccaggtcctatgtatcccaggctagcctttgaacttcgctatgcatccaagaatgagcctgcattcctgatcatcttgcctcagccttcgagagtactgggattacaggcagaccccatcacacaggtttatgccagagcggagaccgaatgaaaggctttacgtgttagtgtgttagtacacataaagtggccaggactccactgcccaggctacatcctcaagtccacctgacctttctctagtcttcttgttgtctccccatgacagccatgaacaaccccttctcaagagttgccgtgcagatcaaaaatgagatgatcagctttgtaagcagagtcccgttcagttcaggacctgcttcacttcatagagaaacagaaggtggtatagtcagtggtgctgctgggttttggagaggaaacatgtcaaccctgaatacttcagcaaggtcaacagggatttttcctgggacagaaatgagggaaggatactggcttccaggcctgccacccccaccccatcgccccgagggtagagagagagacacctgatagtcagagggcagcaccaggacaggcttggggccaggtggtgggaccgagcttcagctggctatttttagtgtaaatgaaagaaactttaaactggctgctgccccagtgcaatcagctatttttgcatctgaaagactgggatcctgtccagccttgggggagggggttgcgattgagaagcaaggcaggaggtggcgggaagtgggaagtgttgctattccattaagaaagaacagtagcccaactggagtaaagatgtccatttaatccgtgtaggggatctggagctctgaggtgcctgcagtgaatggcagaggccagcaggtgggcatagtttgagacccttccctcctctagtgaatcttttttttttcttggttttttgagactaggtttctctgtgtagccctggctgttcctctagtgaatcttgtgtgctgatttctgggctctgaactgggcccctgcaggtccctgggctagtgtcacaaggctggtgaagggtgacttagagcaagagtgacttagccaaggccaacagttctgttcttgggttggacagaggtggctgctgggttctgttgctgtcctgtctgacaacctgacatttttacttttactttttttttatggttggaaaggccaaatggaagcctttagagttgcctctgccaaagaaaatagtgaatcaaaaacagtatcgtattcctggaggaattgcagaaattactgccactatcaaggacttgaaagatgcaggggtggtggttcccaccacatctccatttaactctcctatctggccagtgcagaaaacagatggatcatggagaatgacagttgattaccgaaaactaaatcaggtagtaactccaattgcagctgctgtaccagatgtagtttccttacttgagcaaattaacacatctcctggcacctggtatgcggctattgatttggcaaatgccttcttctcagtacctgtccataaggaccaccagaagcaatttgctttcagttggcaaggccaacagtataccttcacagttttgcctcaaggatatattaactctcctgccctgtgtcataatttagttagaagggatcttgatcgtttggatcttccacaaaatatcacattggtgcactatattgatgacattatgctgattggaccaagtgagcaggaagtagcaaccactttggactcattggtaacacatatgcgtatcagaggatgggaaataaatccaaccaaaattcaaggaccatctacctcagtgaaattcttaggagtccagtggtgtggggcatgcagagatattccttctaaggtgaaagataagttattgcacctggcccctcctacaaccaagaaagaagcacaacgtttagtgggtctatttggattctggagacaacacatccctcacttgggtgtgttacttaggcctatttaccaagtggaggtctcaaactgtagctgaggctgacctggaacactgtaactcccaagctaacttggagctcatgttgatcctcctgcctcagcttttcaagtgctgggaccacaagcacaaaaccctcatgcttgctcttagtgggactaagtctacattctagattcccaactctcccttccccaggttttctgtgtctgaccatgctgactccagaaacctcaaaggcagagctaggcagtagctgcctttctgtcttatttcactcaggatgactaagtcgtagacaagtactttaggccacatttgtttgcctgtggcatctgacggccacaaggctgctccctgcttggagcgtccatgaattgtgctgcagctaacactgggttatttccatcttcagttctatgttggagtggaaacccaggagtggggtttgtggtgatgctgggaagttttttgagctaccagcacacacactattctacacctccaccagaattttctagaagtttttaaacttttcattttgagatcattgagttatagtcgtcagaaaattcagatgccacatacttacccttcacccagtttccccatcatggtgtcttgggggggaaaaaaaaatatatatatatatatatatactatgcaatcaagacgctggtgttggtaacagcagcaacacagaacctccttcaggttgaggtattttgttactagcatgcatttaacagatactgtttgccactgaaggttttcaaattcccacatgaagtcacataaggattaagtgagctgttggccctgtgaggttgcctattaccccaccttagaggccaagaaatggagatacaagaagtgtgtgtgtgtgtgtgtgtgtgtgtattcatgaggtactgtctaagcattaaagttctctgtacatctgaaggggttaaacagtatccaacagtagttaggacaagggccacgtgttactaagttaagtatttggagatcagcaaggattttcatattagcattattaatacctttttatatttggaaagtctcaatgagatgatagactctactaatctgagaccgcaactataagttaattagtattttatttgttcctcctgactgctttttaaaatatatatatgtatatatatatatatatatacacacacacacacacacacacacacaataagacatttttatttaaagactcccattttctctctccccaggtttgaagtcatattctaatttagaagtaattgtctattgtatcagtcagtagggataactctttactgccacaccctttgaaaatggagatgtttaccccctctgtccctagtagcccagacgagcctcaaacttggctgtatagctgagcatgaccttgaactgttgctccttctgtcccggattcccaagggctggcattaccggctggtatcacctgatttacgaggttgctttcttttgctggtggtattcaactgcaaagttgagctatcaagtcattggcaaagaggacaaagcctttggatttggaggtggcccacgaattccacagatccgggaagcacaggcccacgtcctccactccaaaggatcattaacagatcctgactgtagtggtgctgacggcagggagtatagaacccacaacgtgaccggaacaagcctgtggtgattgcccggaaagcagccaggccacctgcagcatccctgcttcaaggtcaactgaaaagcctgggctccagcagagtggctttgaccactgctgcctcctttagccagagggtgacactggagcgttgacccacctcctccaagggtcaggagttagatcagcctgaacaggaccactgggtcctcataggctttgtaggtttgaatgggacaggagtttcgaatgagaacagacccattttgtaccagtccttgatgtgcaatccttgattagttccagtcgacacattcatcctttggatggctacctggctataaaagatctgaggtgttagtgcagaggagagtttgagcccggcggtggtggcccacgcttttaatcctagcactcgggaggcagaggcaggcggatttctgagttcgaggccagcctggtctacagagtgagcgccaggacagcagggctatacagagaaaccctgtcttgaaaaaccaaaacaaaaaaacaaaaaaaaaagtttgagaggtgtcctgggaggtcactcctcagaatggcaaaggagcatgggcaaaaggtactgacacttactgggccaaccagctagctcctcagtctgtctgttcctgttgagggtaaccacagccactccacgttgtgggttaaacagtgtatatgtaaagtcctctgtgaaccatgctgttaaccattgttgatatgacttacgagggagttgaacacagtctttcttcttaagcaccaatggttaccagatgccatggcagaacctgaccttaagggacacctccctagccagcaggggaggccccggtgctgtgaagaaacacatggtgtgtggggtatgggttggggatggggacaggggatgaacagccactttagggttaggaaagataggggaagaggcgacccccttggagtgacttctgggcaaaaggagtcgggaaagcagattcagagcagagagccaatcagttgctggtacatgctgggcacctgggggttctcagattcagagcagagagccaatcagctgctggtacatgctgggcacctgggggttctcgatgtccactgtgaagttggtagtagcgcttcttaggttgtgttgccatttcaaggagtgagcggagctttagtgggagaaccgttaagcaggagtctcctgtctactcctgtctctgcctctactgcaggggatttcaggagtgagacaaaggcctgtgctaggaggatggagctgtttcctttgtccctaatgtccaggacgatggaggtggaagctggagcaggtccaccagagtgtcctgtggcggttacccacacaggccctgcacatcatagctcatcttgataagatgctcattctggggctggggatatagcttggttagcagggtctttgcccagcatgcacaaagctctgactggaaccccaggtattgcataaagcgcatggtgtcccaagcctaaaatcccagccctggggaggcacaggccggaggatccgaagatcaaggtcacccttgatccttcacttctcagcagttaggaggtcagctagaggggcatgagagtgacaggtttatttgatcctcctgcctggggcctgagaaattggtttgctcttctaacaagccccagatgttggtgatgctactggtctgtggatcacaccttgagaaggcgacgaccacccttctcacctgtcagcactagccatcctctgtgtgtgctgatttagcatcctgtggccacagttctgccccagcgctttggctaccaactggctcggcctgggccagaccaccagttactgaccgcagtgtgggctgacagagctagcggcggagtccagaacaggcctttctcttctccctcacagcctcctgcttgttaatcctttactcaggttctgctcttagagagatcaacgcagaggcagtgggttatcaccatttgaccctctgaacagaggtagggagttgctggtagcttctcaagaggtccaaggatcagacttagaatgtggaatgagagtaacctggatggtgcggcctgaggctgctgtcatactctgtaccattcttgcttcccattggatgggcctgtgtcatcggtctcacctataagggtagaaataaagagcccatttcagtggagtgcagcacaggccctccaacaagaccaccctccctccatatgggagttgttagcattaaggagaatgggggggggggatcctgagatactcccccccccagcccctatccagcgttcattatagccttgtgcctcacctgttacagaagttccagtgagggattaaaaggctgagggtgtagcttccttggagagttttcctagcgcagaaggagccttgccctgccctcagtccccacctcaccccctgcattgtgtaaacctggggtggtggcacacacacattgctttctgaggtgaaatctggcagatccaaagttcaaggtcagttttggaggccagcctgggctggatgtggctgggaagtaattggttcagtaagaagtggttcttgccggttatggctccagcaccttctttccgctcagggagaggatgttagttacagcctttaattggaaactgggtgtggatgtgtggacatcttcccccccacttcttcccccccccccaaaggagttgccccaccttcaaaatctttgcactttcaattgctctctttctctggtcccttcctcttttctcttagactgcttgcacataactagttgtatgtactatcaaagaggtaaccagaggcatgaatgggatgcaaatcttccctctatcaatggcctctttagctttctcttctgcagggtggtaagagtcgagtattggcgaaggccgctgacaaccacccaccatctttttatttccagatctgcaagtcttcctggagaaggaagggccgacttttgaggcgcactaccttcaggggaaagtacataagcacttaggctcggaggcagtaacctgttttctcctcaggattctttctccatccacctttttacttttgaggcaatctcatgtagcccaggctggtcataatttccctctgttgctgaggctgaccatgggctcctggtcccccatcttcaccgagtgctgggattacaggcatttgttgacatctcccccttttaaaaggtgtggtgttagggattggacccagagctttgggtatgccaggcaaacacggtaccaactgacctacatctctagccctcctttcccagcttaacgaacccagctctccctggatgcagagcagaactgagacacttggttggcagagagctttgttgagcctccgcttgaggtctcagaggctagaggtgtcaaggtgatttttaggatggagctgtacctggaaaggcagagccaggctagctggtgggacggacttcagatggtacttcttgtggcatgacgctggccatctgggcatggccatgaaactctcagtcagggccgcagttctaaagtcagggcccattcacctggagatttggaacaactcttttgttgttgttgttgtcgttcttgttttgttttgttttattttgttttgtgtgttttcgagacagggtttctctgtgtagccctggctgtcctggaacgcactctgtagaccaggctggcctcgaactcagaaatctgcctgcctctgcctcccaagtgctgggattatggaacaactcttgatgccaatatctttcttgtctgacaggtgtgcgccttgaccgagttcgaggaggccgccagaagtacaagcgacggctggattcggagaacagcccctacctgaacctgccgatttccccacctgctaaaaagccatgtgtgtatcaggcaggcctgctgcctctctcagcccggaccacctggcatcttcctggggcggctctgtcttccctccactgggtggtgggcagtgtggatctaaagatggccaacagtgcctgcttgctattgcctggcttcatccgaaggcctgtctatatgggatgacataaaccctatttccatgtgaaataagagccccagtatacagaccttgtctccatggccaccctctccagttcagggtcctctcagcagcttcccattgcaggaacatctcagtgctctcatccttgttactagcagctttgtgatgctagcagacagacagacagaccccagccatatttgacctccccatgggctctgtccccactcttccccaggcattgactgtttgctccctgtttggtcgttacagtgactaagatcgtctcgaatctactaggggttgagcaggacaagctgtatgctatgcctcccaacgatatccccgagggagatatcaaggccctgaccactctctgtgaattggcagatcgggagcttgtgttcctcatcaactgggccaagcacatcccaggtgagtcacggtaggggtggggtcagggcaagagtgctaaggggctctctagattcatcctgtcccatagctgtgcctctggtgcctggtacctgtcccaacaaagcctagaagacctttgccagcccatgtttctaaaaggcctctttctcttctgtgggattgaagggagtagcatttggaaggttcagcagtgtttatgaactgccagggcacattagaaccacttaatccagggctggagagatggctcaccggttaaaagcactgactgcttttccaaaggtcctgagttcaaatcttagcaaccatatggtggctcacaaccaatgaaatctgattccttctcctggagtctctgaagacagctacagtgtgtttacatataataagtaaataaatcttaaaagaatcattttggtagattttgcaattagaagttcacaaatggaacccccaagaaaacagtagattttccctgtagagttcacagcaatggtaatggaagacagccctcttccttcccattagctgcaggcagatagaaggagttaggagcaggttggagagtcggctcagattctgattctaggcctagaagctgggggcctgagcctaccactcatcctgtcacatgggagtataagaaaatgaccttttcagtttaacccaagggccaaatgaggtcgtgagtcccaggtgtggcatctggctggcatgagccagtgtcacttgcatgctcaccatggccacctgctagatctttgccttgagatgccatggcagaaagtgcatgcgtactgtgtttcaggcccctgggcctttcactgtctggacccaggccctactgtaaacctctggctgagtccaggtgaacagtgggcgcctatgtgattccgtattgccctcacatgggggcttctctgtacagttcaagtcctgcccctgcggattgtgtgggagacatgctgtaagctctggcagcgagcccctctcctgtggcctcttcctagctgtgtggcacatgggttctttctgtgggcagttattttttccctcagctgtggcccttaaagatgagcatagcacatagcagaggtctcctggcctgtggatacagcagttaactgaggtgcttcaagtggctcgcaggtcccactggaaggcaccaacttgtggacaggagatgctgctgctgacactaagcttcgggaagccgagaggtttctgacatggtctccactccaggctctttcacccctgagtgggtgtgccaggagcctgactagtacgtcctctgtaagatgctcagtctcctgggattatacactccgtagttttgaaatccggcctgtgctgactcagcacagatgtggcatcaggctggcgcttaagacacctcagcctggattgctccactaaccccaagccaaattgggcacagccctagagactactattcccggtcagacaggtccaggtacagagatgactctggagtgacacctggcggtctcctggacattccttttgtcgcccttacttacctgcgtaacacctggaggaagggagtgtcctacgtcttacagatggttttcacatctatgccaagtaagaggaataggcgagtagggtggtttctgggtacataggctctggagccagacaaggagggctcctgtcccggctctgcccgtggtgaccttgtgtaagctttttctgagcttcattgttcccatctgtaaaatgggaaccacagaagcccccactaggagtctcaggaggatgttgcacactcagaactgccatacccgccatggttgtcatggattctaagagtgacacaagccttcaccaccccggtacttcatctccaaatcctgtggattagaggcactagctggtgtggtggctcacccctgtcatctctgaactctggaaacagaggcagtgggctagccaaagggttgaggccaatctgttctgcatagccagttccaggccagccagagaggaagcaggcgcttgcttgcttgcttgcttgtcccataccctcatgcctattttgcataaatttgcatgttgaatcactgggacttgactttcaggtgtttaaggtaaagctaattaataagggtctcccgccgctggttgtaaacctcacactaagggcaaagaaagagcaagtgtcttttagaaacaattttcttttatgtctttgggcaggtgttttgcctgcatatcaacctgtgcactgtgtgcatgcagtgcctaaggaaaccagaagagggcgtcatcccctggaactggagttacaaatgctagtgatcttccatgtgggtactgggagtctaccctgagctctcactataggagcagcaagtgaccttgcctagtgaccatctctcttagcctcatgtctagtatcttatttttaaactgttgactgaatcctatttctgattacagggaagacaggcttacagagggagtaagtgaaggttggttagagggctaatatagtagagcctaccccaagaccatgtttgagtctgtttattctggtcagggacactgagaagggaggacttcagactgcctaggactgtggcttgtccttcagggtctttatcctatagtctgcaaccagcgacacagaaggtgcttcatgcttgtggagtaagcctgggaccgtgggtctctcccaagatgtggcttagacaaagttgtaggcgtgcccactcattgaccagagatgattggagacccccgcctcaagctcagaagcctgaaacccatacctactgtatttttataatcccactgctctagattttatttatcctttatgtgcctgtgtcccggtgcctcctcttgcacctggggccattagtgagtaaaatgaggtccacctgagcatagctgtgcactgcgttaccctgatgcttcacaaccgaggtggctttgtgggacagcctgggaggcagcacacacaacttggctacatcagagaacagctggattgatgtgggggtgggggatgacccatgggagccagagatgagagtcagagcctgcagcggctgtagctaggctgctggcagtactcagtgagtttcagtctcctgcatcattgtctgcccctccccaggcagcctggattccaccttggccagcagagcccttcctcaggagtcaccactgctgccccagcccaggctgctgtgtgcaagggggatccccagaggccacttcagggaggctctttggacagcctgctcccagggaaccgctgtctggctggatgaaggatgagctgcccgcgcagcagcagcagctgtgtctgaagtggccccagatcctataattacatctccctttattacctctctaatggccctccaggtcggcagagaccatcataaattagcagattatgaactccacttgctacaaattatgtgcctttttttttcttttaaattctaggagcacatagtgtcagtggggggatgggggcctgctgtcataagatccactggtgcagataacgcagttttcctggggctgaggcgcatacggaggagacctgagagccaggggtcctgggctgggcagaaccacccagggtgagttgcagggagggcaggccagccttgctggtccggagccctggccacctgagcctctctcagactttctcctccttgctggcctagatcccgatgagttgttcaaggcccagcctgattggaaacactagtggagggtgttttcccaaagttgcttgtgttttacacgactggagaatctactctgctaatgccaggtgtaacagaagtgaacgcaaaaagcctggagtcttggggggtgggggggatgagccagcagccaaggtgtattccctcccctcatgggctcgcatttaacactctattactctactttatcacccaatgatagtaaatacttgagcacttcctctgtgctaagcagaccaataagtcttatgtgtgtgcgcacacatttaacctctgcacctctaacatgggcactgttggccccatttgacaggggagtgtagagacagaaggtggccttgcctagggtcacctttggtggccagcagagtgactactttgaccagtagttggctctggagtctgtgcctccaatgtgtctttgcacatctacataaatagtcctccctcccgtgttggatttatataataatacatgtatcacattacatttccatagtttcctgcctggcattttctgcatgtgagctagcaacaaccccttcctcacctccaccctggtccctcctggagttgactatccccgttttctcttgtagtgtttcttttctcaactgttagaaagcattccaatggtttcaagtagtgccagcacgcacttgctgctgcctggtggctaggaggccgcatgtgtgttggcgtttttttggggacctctcagatgttggagaggaggaagggactctttcccagggatgagcccgctgctcagacctcccagccagccggcccagcggtatgagagtaaagccttcggcacgttctctcccacagcagcctagaaatttccaggtggctgttgtgcccccaccccttcccatggcactccagcctcttacaggggatctaatggggtctctaagcaaatgttttaggttgttttcctgctgtcccagggtcaggctgtggcatctgtctgtccttcactgtgactgcttttgaggctgggtgggtaggaaggcaagcttaaggctcgggagtttcccttcagagctcagccccccaggttgcttgtgcagggattcactccctggactgtccttagttagcatcgatacgggttgcatgttctcagaaccttccagtccaaaagtcttctgaatttttttctttctttttaaaagtctatttattttttggtgggttttttgagacagggtttctctgggtaactctccctggttgtcctggaacctactctgtaaaccaggctggcctcaaactcagagattcactcggcctctgcctcccagtgctgggataaaaggtgtgggtcaccccgttggttggtgacatttagtgactgtgacgtcatctccaccagtgggagttatggtttgggcaagccatcagtcttgcagaggccatgccttgagagatgagcctcaccagcctgtccccatgcccagagcctggcagtaccccactcccagcatgcctgatgccttccagctcatttgtctgttcacttcaccctgtgtgcctcctcctccctcctcggtcggtccttctgctcggagactgcccctccctgtgcggtccacttcttccccacccacatcctcccacgccagctgattggtatctgttaattaatgtcacccaaagcctctcatggacctgataagggaaattggatgcccgtttctatctatcttttattacctccagctttctgccccatcctcccaacccccacccctacccccatccccgcagccacataccctccgtggtactactgagaatgtgggcagatacacagtttaacccccgtgttctgtcctgtgtcctctacccccagtcccaaggatgcatgtcaccaaagcattccgtgattggtcacccatggagtctgactgctaggaggtaatccaagacaaaggcccatgatggttggacttagaaaatggaggcgagataattggccttcaacctcaggttccctcaagagggaagcgacttatcttgggtaggtaacgagaaaaaaaaaagagaccacacaggccctaaaggtcatccagaaactgggcaaatccaaagaggagaaggaagaaataatgactgtaaggatgttggcagcctcctcggtcatccttggcagtgggatgctggcctactgtatgccagaagtggtgtgaggtcttcccacgtgccattcatcctcaggccatgagcagtgactaggtggggctaagttctactccagcaaattccttcactggcagggattacccagaaacaaatcccttgatttcaaattgcacacggcacattgtgcaaatggtggactcttcctgggagttgagttcatagccttacaaatgacctatagtctcagccctgttttgtttgttttgcttgagacaaagtctggctttgaactccagctcctcccaagtactgggattataggcctatatccttcatgtccagctatccccttctcttaataaatgcttaaaatttgactaacctgcgtgagcccccccccccaacttactgcctcctgtttagtggttatgatggttgaaacttacccttttctgttggcttctcataaatcatgctgttaggtaactttgcctaaatcaagtccacacagtccagtctcggtgtgtcatcctcatctggcagacatagacctttgttttgtctcaccattaataagaggagcttatgttttctataattgtcttcccgtatagtgcacagccagccactctaaagcacactctgctcttgggaccgctcatctgttcattccagtgacaaagaggtccaggtttgcagaggttacatgccctaatcaagttccacccacagctagtatttgggccgtcagggtcaagcccaggcaatctttcatagcacattggacaaagcagtgtcctgattctagagactactgtcttagttggggtctctattgctgtgacaaaacaccacaaccgaaaagcaagtggaggaggaaagggtttatttggcttacacttacaaatcatggtacattgttggaggaagtcaggacagaactcaagtggggcagagatctggaggcagagctgatacagaggtcatgaagggatgctgcttattggcttgctcctattggcttgctcagccttcttatagagcccaggaccacttgcccagggatggcaccacacaccatgggtgggctgggccctcccccatcagtcactaattgacaaaaagctttacagctggatctcatggaggcatttcctcaagagactacttcctctctgataactctagcttgtgtcaaactgataacacaaaaccagccagtataccctcttagctcccatttcccctctctggagggaggaggtcgcgttcctgagtagtagtgtccagagcacatctgctgagtcttctcaaggcagagtgacgacagtccaggcagccagagtacgcacaggctgtctttggagccttgccctcccagtagccttggcccaggccatgggcaactgaatccaccttcctggctgcaaggatctggtattaaagcagagagctttcctggagcttgcagtatgttggagacacccatcttgccacccccaaatcctgctattaattcagcagctccttcaattacaaatgcaccttattaatcagtgttgtctccccatgctgggaaagacctagctagacccaatgggcatggtgataataactgtcaatattgactcaactcttattatgtaagtcttttccatgaattccagtgtgactgattgactaaggggatagcaacaggcacccccagggctccccccattactccccacccctgcctccagctgggtctgaggatgcaaggacacagctcaccctcccttgaggctgccctccagcaagcgccaaggaagcccctgggaccatttctgatcattggcttcttccccttctgcaggcttccccagtctgacacttggggaccagatgagcctgctgcagagtgcctggatggagattctcatcttgggcatcgtgtaccgctcgctcccatacgatgacaagctggcatacgccgaggactatatcatggatgaggaacactctcgcctggtagggctgctggacctttaccgagccatcctgcagctggtgcgcaggtacaagaaactcaaggtagagaaggaagagtttatgatcctcaaggccctggccctcgccaactcaggtaagggtggcacgtgaccctcagagggcttcaggggttctgtgggagcctaacaagcgccgcaagcgccgcaccgctgctcagtctgtgggcggggctggcttacggatgtgggaatgaccagcattgcttttatcagcggaacacggcattagttacttttcttttctggtgatgaaaagcaacttacagaagaaagggtttaattttgtcttaggattcctgagggatagaggaggtactggagcagggagcgaaggttccgtgtggcagccggaagtggagggatagcgttttattcacacacagggagcagagggagcgaactggaagtggaatgaggttataaacctcaaagctggtcttccagcaagtctatgcttctgaggttccataacttctatatacaccaccagctggggatcaaatgctcaaatccaggatcctatggggaccgcgcccatttaagccactacatcccgcaagggtagcctggagttcaaaggacagtagtcatggaggccagcactggtttaggattttctaggactttgacttgcacagataccaaaggacattgattattgctaaaggttaggtctgtgtctactgctcttatgatttgcatcactctgagcccaagtgaccataagtagttcctattccacaatttatttatatataattatgttcaccgcataagtaacacacagtagtgagggctcagcttgctaagttggctaggacattatgtacacaactcttattataatcccattttacagatgtggacaccgaggctgggaaagttgtaaatttgtccagggtaacactgtttaaagatgtcagggtaagttcaggcctttaatcctagcattaaacaggctgagaggcaggaggatctctgagttttaagccagcctggtttatgcagtgaggtccaggtcaggcaaggttacacagtgggattccatatatatgaaaaaaaaaagtcagaattaggatccaagccacaatcatgcaattctcagagaacattggctattggctactcttagaatcttcccatcacagatcacccaggtggaacacatccaacttctcatgtggtggcttaacctagtattaaaaagttcgtaaattattctgagttttaagccagcctggtttatgcagtgaggtccaggtcaggcaaggttacacagtgggattccatatatatgaaaaaaaaaagtcagaattaggatccaagccacaatcatgcaattctcagagaacattggctattggctactcttagaatcttcccatcacagatcacccaggtggaacacatccaacttctcatgtggtggcttaacctagtattaaaaagttcgtaaattattcactatttcctaagcttcctacaacttcaactggattatctgggtaactggcagatctgcctgtgcttggagcctctatcctactggaggtactctgggtgctggggaaagagagacatacagggtctctatgtgcatgagagtaacattagaaacacgcacatacaattgtaattccactgcaggggcactacgtggcagagttcttgctctggacagggccaggtggacctgagttcaaatcctgtctctgaggctgaagagagagatggtttagcaattaagagcaccggctgctcttgcagaggaccagagtttagttcccagcactcacaaacttccaattctaactccaaaggatccaatgccctcttttggccttcactggcactgcatacacatggcatatatacatactggcacacacacacacactctgtcacactaacagcatgaccttggttagctctgtccttgagtaggaggtattcccagatacctcaagtacctgtgagctttaaagatcaatttcggataatgcagtccagtgcctggcctagaggagcactcagtaaatattgattattgtccctgctgttacaatgtcatgagaaatggtgttcccagcacatgatgcaggaaagctgactcccaggtagagacactcgtaccagcagactaccgcttcactgtttgtgctgggctttccccgaaagtctcttatctcaggaacacccaatccttagcaacttggctttgctgctgttagctccccagaaacaccctctgctgcctttcctgaggtcaggcattgtcagccgatggagacttcacacagcccagcagtctgccttggacatctgtgttggttcaggccttgacattgtattgttccttttgacttcctgcctccttttccttctgtaatcctcttccactccctccccctttcccctcctcctttcccctccccttccccctccataaatctttaaccctaaacccctgccttaggctttgctcctaaggacctaacctaatacctgttgttgcgttttcttttttgctgtagctgtgtaaacgaacagcgcatggaattccatgtgtcctccctgtccctccccatcctctgtacactctctccactcttcctgttaggtaatttgctgcaattagtaagctaatgaggactgacgcctctccagtttttgagacagtttcaatctgtcgcccaggctggcctgggattgactctatatctcaggctgattcgaaactcacagaaatcctcctgcatcagccttccaagtattgtaattataggtgtttaccaaccactcatggcagtggcccttgcctgctaccagagactccttactcctgccttccataggtttctaaaacccagtaccttgtggtctaggaagggagatctggatggacatgcccctgcaggtcacagtcctgaggcagaacagtgacccaggagcctacagagcatattggatggagaagggatgtctaggagaccaatcagacgcccccaccccccatggctaaagtggatagggtgactcaggtacctggcagaagagcaaagctcatcagaggctgaccgggtccccttgagaatgtgccagctgtcactcacttgcatcccagccatctctagggctctctgacagcagaaaaaaaaaattcatagccattgattttgtaattaacagtttatcaatgccattgatacagacttgctgatggattgcaaagaaattgatcttgcaatgttattttatttcatttttggttgaaagcacctgccaattgtggctccttggggagggtgacaggatggaaaatggggtcagaggtggctggggcccagccctgtaggaattccggaaagtacaggctgggaggagatccccagggggcatgagcaagcatcgctatgcccagccagctgatgcagctgcctcggcgctttggttcaggcgagctctgaacttgtgcactccaatgaacacagaaggctggctcattgccctgtgtccacacagcaagctttgaggctccagttcatgcaggcatcacgggttgttttaaaaaaagtgtttgggtagttctcccacaagactgggaggttccctttgttttgctcagacctagctgtatcccaatgtttcagacggccggccgagttcatgggctgtaagcatcccaagccgatggtgctaaggatccagattcaagcaaggccaagcaagggatacactcatccctgaacgatatccccgccggctccctctatcagcacaccctcccctcgcccccaaacacctagacattgacttccatccctttatatctgttctgagttgtaaggttggtggctgtactgcatgtgagtggtacccatggcccagcatcatcatgaagacgtgatgatgtcagggttaggtgatagccgtgaggttcctaagacccaggtgcttaattgttgctgtataactgtatgaggtaggtatggctaggaaaatgggggacagagaagttatataatgtctcacataactcaaaagggactgccagccagatcccagagtcccccgaacgcctctgagacatccaataggtctgcccatgttcatcggcagtgccctcctggtggtctctctatgagatctgagctcagttctaccctcctcagtctctgactcagccctgcatcaaagatcctcattctactctgaatagtcagtcagcagacagacagacagagacaggctggctgctggtctgtcctccactccagaaatgccttccgtgttggggggtggcagccagcccctgctgacactgcccctctcctgtgtccacagattcgatgtacattgagaacctggaggcggtgcagaagctccaggacctgctgcacgaggcgctgcaggactatgagctgagtcagcgccacgaggagccgcggagggccggcaagctgctgctgacgctgcccctgctgaggcagacagccgccaaagccgtgcaacacttctacagtgtgaaactgcagggcaaggtgcccatgcacaaactcttcctggagatgctggaggccaaggtgtgatggcccagcacatggacggacggacacgatccaagtggagacctccacagccaccagcctcgacttttttcacacccgcatcggggctctgagctgtcccagaagaaggggtcttcttgcttcctggccatgtgcagactcctggggacagcagatggggaggtggggatggggagggtaggggcggggggctcatctgtcacccgcattttctttggaattttttttttccttctccatgggcagtgctaaggcttgggccagggacgacttcccttagagctggagaccaccagaggaagcagccttcctgcaagggatccatttctggacctctccctatttaggacctggaggtatctggatgggcagtgcttagtgcccgggacccaagagacatagattgggggctcctgaaggtgttggtgtcacggtgggcagtcccttggggcagaacgtctctgtggcctatcccgaggctctgttcctcctccatctagctggctccctccactttcccctttcttattgtcccagtacacccagttctcagtggatgctcctgctagagtagccacatccccaccccgaagaacccctcccctgcttcctgcccctacctcagccagccggaactcactggctcagaaaagagttgggttctgtacccactgctctttttgcctgctgtttctccttctcctcttgggcatggccagtctagaaacctatggagaattcaggacctggccccaccagaggtcacttgagggactctcaaggtcagtagcttaggttggggtgtaggatagcagagagacccagcggtagagggaaagtctcattgcacctcggaaaggaaggagctctaaaggtcccccttggcccctcccttacctcataaaaaggcaaggcttggctttgtgccataggagggcagcctcctggcatttgcaccagggatgtttgatgcagccctcctgggtcaattcccggcaagaccctgcagtctggttgtcgtatagggtgctccaccaacccaccgcagtcctaaaacccctcagccctaggcacatgaatgcacctttcacccacccaaaaggcagtcccaggctcatgctgtgtgtgtccttgggtttgggttgacaggatgtcctaaagatgaagcggttcattctggaaaatggacacgccactttcatgacaagtcctccggctttacctgctctgatcccttcctggagtgcaagggtcccctctttcaggcgttctggcacctgccactactgctggctctgcctcccgggtgacacctctaggagactggtcacttcacagacttaatgctaaacttccccagagagcctttccctgcccttttgcccacaaaggggttcatgcctctgcatgggctctccttgcccatgatccaaggtagataccacttttgtgttaaactgggttaactcttaggggctgggtttagctatcctggcttctgaaaactccccccagccacactgtggagagggggtgtcacctaaaattccacctagttctcagaatgtcttctgggcctatgaacacaccagcaagggttggacaaacacccacagctgcctgagcggacacactgctttgaagcagcagcagcagcagttaaatgggcacctcggctcggctccttgatctagtgatgcaagcaccccatacggctgcttacctgccgaagagaatggaccagtgacagttgggtgccctgtagggaagctgggtgccctgggcacctggagtcagagggtagagcccacttgttcaaagactagccagatgagagacatctgtgatgccagggtgctcaaaacaggaaaaagcaagagagaccctctcctattcccacctccccccagtcagagcaaaaacccaggctaccttccatatccatttctggaacccatggagaggaggcctctctctgctagtgtgtattcagataaagattatttcaacccagaaatataaacatagctaaccttgtaccttgtagaaggaggtgctggctgggatctctttctctcgttccctaacctttctgaagattctggatggttctggcgtgcctcccaggttttgcatccgtgaacagatgacttcccatggacagagcttgagaaatacgaggctctcatttgggcctagcagggtcagagcctttactatctgtgcctggtccttccctccagacttgactactcatgagaaacaggtggcaggcaaggatgacagacgtgtgacaaggagacaggagggcccagagtccaagcccatggaacagcaccaaagagaagcactatgtggagagattgctttattttctgataatgacgttgtggctggaatgacttaagatgtatatattttttaaccggcagtccttcgtgctgtctcacccccctgtatggacatgtcctcccacggccctcatgtaaactacatgccctgggattatctcccatccagtcccatgtatctgaaatctaataaataaggaaaggtctgctga

SEQ ID NO: 53 - DNA, 104672 bp, Homo sapiens
aggcgaggcttccccttccccgcccctcccccggcctccagtccctcccagggccgcttcgcagagcggctaggagcacggcggcggcggcactttccccggcaggagctggagctgggctctggtgcgcgcgcggctgtgccgcccgagccggagggactggttggttgagagagagagaggaagggaatcccgggctgccgaaccgcacgttcagcccgctccgctcctgcagggcagcctttcggctctctgcgcgcgaagccgagtcccgggcgggtggggcgggggtccactgagaccgctaccggcccctcggcgctgacgggaccgcgcggggcgcacccgctgaaggcagccccggggcccgcggcccggacttggtcctgcgcagcgggcgcggggcagcgcagcgggaggaagcgagaggtgctgccctccccccggagttggaagcgcgttacccgggtccaaaatgcccaagaagaagccgacgcccatccagctgaacccggcccccgacggctctgcagttaacgggaccagctctgcggagtaagtatggggcgggcggtgaacctcggggcccggctggggaggcccgagccggggagcaggagcgcgcgccaggctccgatctggtttgtcacgtacgtctggggctggcagggggcgagaaactcccggccgccgaggtatcggtgactaagcactgattgtgttcctgactcagaccagttagcggatcccgcgggtctccattcctctctgtaccccttttcccgaccgttttagtggttcctggccactgtacagtcttctcccaagaaaataaaagctagcacgtctcccctgcctcctcccagttctgttctaaatgtgatcatctgggagtctggcctgtaacggggagaggaggctaatgttttggaaagaattaagatcgcatctgtgcttttgagaccagctcagggtattaagtgtggagcatcatcctcaccttcatgcctgacacctgtggggcctgagtgccttgttgcaggccaactgcctggccagcgggggcgtgctggaagtccgtgtggacttcgtggcttttccttgctgactttggaggttcctggtacttggccttcctgggaaattgctcaagaaagcggctttcttcttcatcctactcttcattcattcattgaacaaaccattttctcactaatgatttcctagctttccgtacttcaccaggagcccctaaactcctgacctgaggcatgaacaccatgacctagaaaccacatgctaggtgctccatctctgcagcttccagcgttgcttacaaacgagcactttatttcattaaataatcatgagtctgtttcctgggggtttctgagctcccacaactctcttgggttctaggtaagggacaagactatgtgagggaaagctgcttagctagctagagaaatagccagaaaagattaggttattattatttttttgcctttttttggttgttgtttgcccaaccttcaataaggattgggttcttaatcttttacctgcacactgcagactttaggaagctaattgatgaaatcagaataggcttggaccttatgctctttggtgatttctgtaacctcccttcctttctctagatttttagaaaattttattttttaaacttttatacagatggggtcttgctatattgcttaggctggtcttgaactcctggactctagcgatcctcccaaagtgctgggattacaggcatgagccactatgcccagccaactttctctagattttaataacccggggacctgttggcttgatgacttgttccatccctgtaatgatcacaaggtcgatggtggacctgtggtgtgtgttcagctgtgtttttcagacctgctcccaacagactctcttctttagtcccctctcaatcctgtggggtctattttgcataatactgacttgtataggtagttggattgcattattgcattgcaaacatttgttctttttttttttttttttttgagtcggagtttcactcttgttgcccaggctggagtgcaatggtgcgatcttggctaactgcagcctctgcctcccgggttcaagcgactctcctgcctcagcctcccgagtagctgggattacaggcatgcgccaccatgcccggctaattttgtatttttagtagagatggggtttctccaagttgttcaggctggtggcaaactcccgtcctcaggtgatccacctgcctcggcctccgaaaatgctgggattacaggcatgagccaccgtgcccagcccatttgttcagttttagtatacagtgtttcaccctcttaaaatagactgaaagtcatgactgttgttaggacaagttttgaccacagtggattctggctgagtgttatggcctcattatcctttcctatttgatttggaagtggatactgagtagaagtacctgttatcattctgttgtaatcgtgataccacaactgtattctctcaaggaggaggaatttcattaaaacagtaaaagcaggatgagaagaaactaccccagatttggtggcagaaaaatttggatggtactgggagagtctaaacagtggttaaaaggtaagggctctggagtcaggctaagtttgaagcctagctctgttgtggttttttttttttttttttttttttgacagtctcgctctgttgcccaggccagagtgcagtggtgcgatctcggctcaccacaacctccacctcccggcttcaagcgattctcctgcctcagcctcctaactagctgagactacaggcacgtgcaaccgtgcctggctaatttttgtattttaatagagacagggttttaccctgttggtcaggctggtctcaaactcctgacctcgtgatcctcccacctcagcctcctaaagtgctgggattacagcccggcctctgttgtggttttgtgacctggttcaagtcttttagtctaaggcttaggtttagtttttttcatctgcaaaaatggggctaatgatagaacctacttagcatagttgtgaagattaaatgaggtagtacatagtaaacttccaaagctgttggctgctggtgcctttgttactgcctaagtgttggaccaaaggaaactggaaggtgattttcattcatggtggtagattatgtgttaaggtgcctttgcttctggacaatcaactctccctagtttggttttttgtaccatctgcatctacctctatgactcattgctgtgttacaataggaggcatctttgtgtaggctgcccaagacaaacagggactgtttccctgtgtttcatagcactaatgagagggaaagctgtacacatcttcatctttcacttctgagagtgttcctcaagcaaaatgttccctatcttgggctaccagcagaaagaattctgttgctttcatgatttctgtgattagaccagggcacaattttgaacgttatcagacaatgtgaactaaagaggaagaaaatccattttgacagtaaagaactcttggtaccaaattggcaaggttgcttttcccttggcacctgtgcttacctctaacatagcccttacccagttcagagatggagttgggtaatacgggacctgaagttgatgcaagttgtaggggtcctcaaagaaaaatcatgcaaaaatagctttcttttgtgtattttgcagaaacatgtgagcatattactagggtcttaagtgttagaatgagataatgagataatattgttcctctgtttaaaatgttcttctggttctattgcagttacacaaaatccaaactccttatattggactatgagactgagtgatctgcctgttgtccccaccaccccctcccaccaatctctttaaccacatttcctgccactcctttcttccaccacactagtcctctttcacttcctctatgggatggtctatacgcactgcaggcctctgtacatgctgttccctttgcctggaatgaatcactcctccttccctaggtaggcaggaagcagtcttcacctatttgcctaaatgtcacttcctctgagatgtttataagcatctcagaggaatgtggtccctctttgtcatgtcacctgagctgctgcttttttttttttttttggtatgggggtcttggtatgttgcccaggctggttcttgaactcctggactccagtgattctaccacctcagcctcttgagtagctgggactataggtgggtactactgtgcctggcgctcacctgagcttttaataagacttaatcattgtaatttttcattggggtgttcttaatatttatctctcctgtacactataaactttaagcacagcactgcctttttgttttttgagacggagtctcgctctatcgcccaggctggaatgcagtggcactacctcggctcactgcaagctccgcctcccaggttcatgccattctcctgcctcagcctcccaagtagctgggactacaggcgcccaccactgcgtccagctaattttttgtatttttagtagagatggggtttcaccatgttagccaggatggtctcgatctcctgatctcgtgatcccaaagtgctgggattacaggcgtgagccactgtgcccagcctgcactgcctttttttgactcaccactctgtaagtacacccaaaatagttctggcacataataggtccatagatgtttgttgagtcagtgagtgaatgaaatttctaatatttgcacaacgggtttaataaacctttttatgtcttttccttttcttttcccctttatgctcattccttttttccccattttcttttgttttagtcacccactcaaccattctaagatatttatatggttttataattccacctgttagtctggttatgtgtatacccttgggaagtagaaggatggttttgtatgtatctgcttaggattctaaaatgttattgtgctacaaatctgcatttcatagacaggatagaataggttatgttgaggtaacaaccacaaaatctcagtaatttaacacactttcaggtcagtgggaggctctgtagattggagtcctttagggatccaggctgatcgaggcatcgtctctcaagtatacctacatgaggagggaatcttgtgaagagctacattcaggctcttaaagttttgcctagaggtgagccttgtcatttttgctgccatttctttggccagagcaaatcatgtggccatgttgaccttcaaggagggcagtgacctttttggaagggggagaaccacgaatatttgtgtgttttttttgggttttttttttttttttttttttttaagaaagggtttcgctcccactgcccaggctggagtataatggtgcgtgccaccacgccctgctaagttttgattgttttgtagagatggggtttcaccatgttgctcaggctggtcttgaactcttgggctcaagcgatctgcccacctcatcttcccaaagtgctgaaattataggtatgagccactgtgctggtgcaccaggagtatttgaacagaagcaatgaccatccctaaattttatatcagtttcttctttgttttcttttcttttcttttttttttttttttgagatggagttttgctcttgttgcccaggctggagtgcaatggcatgatctcggctcaccgcaacctccgccccccaggttcaagctattctcctgcctcagcctcctgagtagctgggattacaggcatgtgccaccgtgcctggctaattttgtatttttagtagagacagggtttcaccatgttggtcaggctggtctcgaactcctgacctcagatgatccgcctgcctcagcctcccaaagtgttgggcttacaggcgtgagccaccatgcctggccttagtttctttttttaaccaattttgttttgagctctattcatgatgctatacaatatgtgtctagttcattatttctcttggttgtagagcagtcatgtttgcctgccacattttacttatttatttctctagaattagacatctttgttgtttcccaaccccttgctgcctcaaacagtcatgaccatgcccatccttgcacatccttgtctcctttggatgttgtgagagagtttcctgtggaatgtactcagaagtggaattgctgggtcttagggtacattgtctctccttccaggataaggcatgttatctctttctctctctctttttttttttttgagaccgagtctcactctgttgcccaggctggagtgcagtgttgcaatcctggctcactgcaacccctccccacaaggttcaagcaattctcctgccttagcctcctgagtagctgggattacaggtgcctgacaccatgcccagctaatttttatatttttagtagagacagggtttcattatattgctcaggctggtctccaagtcctgaccttgtgatctgccctccttggcctcccaaagtgctgggattacaggtgtgaaccaccgcaccggctattaatctctttctttaaaacaataccgttaatccagttgcagtagtgaggcagggtacctctcaagatctcactttttctttgaccttgggcaagtcctttctactttctgactcttggtttccttaatctgtaaagtggaggtgataattgtttacaaaatctttaccatggtggcctacaaggccctacctgaccaggtccttagttttcttccagtgttctcttcactcatgcactctagccacactgtcctttgtgctgttgggttgtaggttgggcacattcttatcttagaatctttgcatttgccattcctgctgcctggaaagcttgtctctcaaataccgtatgacttgcttcctcacttccttcacccctctgttgaaatgtctcttcacagaggccatctttgatcactgtaatacagaactccctgtcattttctaccctttgattttgccttatttttctttgtagcgctgatcactaactgatgttacatcgtgtataagtatttatcttcttctgccaccccaagtgtaagcttcatgatggttggggctttgccttgttcattgctcagtgtgtagaacagattctggcacatagaaaatactcagtagatacctgttgattaaatgattgactagatcctacctcagaggaatacctttgaagatgtataaaatttctttgaaggctataaggtgccgaataaccttaggagggttcactgcttggccttagtagcgttcatgattttggattttgaattgtttctatgtaaccctgaaacactcagacttacttattgcattcagggtgtagttcatagcatcagcagttctgccaggtttgtaaggaacacacatctgttagagtgtgaaggccctggaggaagaaaggttgagacaggttgatgtgcttttttttgtctcttatggctctttctgagatgtgtaccatgatgataaccaggaactttttttttttttttttttttgagagacagggtcttgctcagacactcaggctggagtgcattggtgctcactataaccttgaactcctgggttcagggaatcctcctgcttcagcctcctaagtagctagtactaccggcatgtaccaccatgcctggctaattttaaaatttagagatagggtcttgctgtattgcccaggctgggctcaaactccttgcctcatgcaatcctccctccttggcctcccaaaagtgctgggtttacaggcatgagccaccatgtctggcctgataagtaggagcttttgaagtggtttcacactgattttgtagttttgaacttggatgcttcttttgggtagttgatgcagtaactaatactggtgctgtctttcagaacagcttcatgtgaaaaaggcctgcttaagcctgtgtctttgggaagaacatctctgccgctgttacagcagatacagtaatagcaaagaaagtcttaaagatgatttagcccatggcaaggaaatatatgggactcttgtttgaatataaacactcacagaattccagtttcacttatttatgcacctttcaaagaaaggaagaagatactgtggtagagtacagtagtcctcccttatctgagtggcatatgttccaagacccctagtggatgcctgaaaccacagatatcaatagtaccaaaccctgcatatactgtgttttttcctatgcagtatatgcctatgatgaagtttaatttataaattaggcatagtaagagattaacaataataaccaataaaaaagaattataacaatatattgtaatgacagttacatgaatgtggttactgtactcactgtgggtaactggaattgtcaaagcaaaactacatttaagtgggtactcctgtagctgttggccctgccttgcctatctagcttaattttcctctgtttttccgttcacctgctgtggtccacttaccactttctttactctcctcactgtgccaccagcatactgttgcttaccttcttacatctgtctggtcttgctgacatggtttttttttttgtctgaaatgccctcctccactttcttgcatgatttttttttttttttttttgagacggagtctcactctgtcacccaggctagagtgtgcagtcacatgatcttggctcactgcaacctctgcccactgggctcaagtgagtatcgtgcctcagcctcccgagtagctgggattacaggcgcacaccaccacgccgggctaattcttgttatttttagtagagacggcgtctcaccatgttgcccagcctggtctcgaacccctgacctcaggtgatccactgcctcagcctcccaaactgctgggattacaggcgcctggccctcttgcatgtttttatttttgttttatacttgccactacactttaacttctgtgaaaacagggactgtgattgtcttgtgtactggtatttctccaccgtctgctgtggggcctagaataaaataaatggtacccatcttttttgttttgttttgtttttggagatgagtctcactctgtccccagactggagtgcagtggcgcgatctcgcctcagtgcaacctatgcctcccgggttcaagcgattctcctgcctcagcctcccaagtagctgggctacaggtatgcgccaccacatctggctaatttttgtatttttagtacaaaatttaaaaatgatggcctcgatgtcgtgatccgccctcctcggcctcccaaagtgctgggattacaggtgtgagtcaccgtgcccggcccttttgtttttttgagatggagtttcactcttctcatccaggctggagtgcagtggcatgatcttggctcacggccacctccgcctcccacattttcctgcctcggcctcccaagtagctatgataacaggcacacaccaccatggccggctaatttttttatttttagtagagacaggatttcaccatgttggtcaggctggtctcgaactcctgacctcaggtgatatgcctgcctcagccccacaaggtgctgggattacaggcgtgagacaccgtatctgccccggatggtaccgatctttcaagatcttacataaagcttatctccaatgtgtgtagtcttttctgagcaactccatgccatgctcagttacatcactccctacttagttataatagttcttttttctttttttgagacagagttttgctcttgttgcccaagctggagtgcaatggcgtgatctcggctcactgcaacctctgcctcctgggttcaagcgattctcctgcctcagcctcccaagtagctatgattataggcgcacaccaccactcccagctaatttttgtatttttagtagaggcagggtttcaccatgttggccaggctggtcttgaactcctgacctcagttgatctgcccacctcggcctcccaaagtgctgggattacaggcatgagctaccatgcctggcctgtaacgcttctttttttttttttttttttttttttttgagatggagtcttgctctgtcgcccaggctggagtgcagtggcacaatctcggctcactgcaagctccgcctcctgggttcacgccattctcctgcctcagcttcccgagtagctgggactacaggcgcctgccaccacgcccggctaattttttgtatttttagtagagacaaggtttcaccgtgtagccaggatggtctcgatctcctgacctcgtgatccgcctgcctcggcctcccaaagtgctgggattacaggcgtgagccacggcgcccggcctgtaacacttcttaatggtgtgacctcggtcatatcacttaacctcactgagcctagttttcctcattagtagagtaaggctggtaataagaaacccatgagggaagtagggtgggagagcatcatccaaaataacatacacggaagcactttatggggaggcaagagtgggaaaagaaaaaagcactttatgatcactggaatgctatgcaaatggatgtgttaatgatgccggcttttgatttcttccttcttagaaggctgaatggttccttttgttcttaatagcaaattgtaaatgttgataaatcatgttgatttagatatttcatacgctgcttgtccttcaaatctagcccaaacctacatctaatcaagcctttagacctaacttcctgtttatagcaaatacggggatagaggaatgagttaatggcaccaagaggaaacaatcagacaaacctaggatgtggaacattctctaagacaactgacctagtctcttaaaaagtcagtataggccatttgcggtggctcacgcctgtaatcccagcacttcgggaggccgaggcgtgcagatcacgagctcaggagttcgagaccagcctggccaacatagtgaaaccccatctctactaaaaatacaaaaattagccaggtgtggtggcacgtgcctgtggtcctagctacttgggaggctgaggtgggagaattgcttaaatccaggaggcggaggttgcagtgagccaagagcatgccattgcactccagcctgggtgacagagtgagattccatctaaaaaaaaaaaagtcagtataagggtgggcatggtggcacacacctgtaatcccagcacttgggcacttggggagacctgccaagtcaggaggattgcttgagcccaagagctagagaccagcctgggcaacatggtgagaccttgtctctacaaaaatacaaaaattagccagatgtggtggtgcgtgcgtgtagtccctgctatttgggaggctgaggcgggaggattgcttgagcccaggtggcgagattgcagtgagcggtaatcgtgccactgcactctagcctgggtgagagtgggaccctgtctccaaagaaaaggtgatatcaagggaaaaaaaggagagtggtgctgttctaggataggagactaaggagacatacagatcaaatgtactgcatgggttgggcatggtggctcacacctgtaatctcagccctttgggaggctggggcaggaggatcatttgagcttgggaggtccaagctgcagttagctatgattgtaccactgcacaccagcctgggtgacagagtgagaccctgtctcaaaaacaaaacagaaaaaaaaatgtactgcatgaatcccaattgtgtaccggatcaaaaaatagttataaaatgcattgttgagacagttggggaaatgtgagtagagtattgctaattttttttttttctttttttttttgagacagtctcactcttgtcgtccaggctagagtgcagtggtgcgatctcggctcactgcaacctccgtctcccgggttcaagtgattcttgtggctcagcctcgaagtggctgggattacaggcacgtgctaccatgcccagctaatttttgtatttttagaagagacggtgtttcaccatgttggccaggctggtctcaaactcctgacctgaagtgatccgcctgccgcggcctcccaaagtgctgggattacaggcgtgagccaccgtgcctggctgtattgctaaatttttaatgtaatgatggtacagatattatataggagaattcatattcatacataatgcacaaaacttactctgaggttcaggaaaaaaactcaaacatacacaaacagtggataaagcaaatggaacggaatgttcacagttgttttgtttagttagagttttacttttattctttcaatttttctgtatgtttgaaaaaaatttgtaatacatttaaaaagtaccccaaaagcaaaactcattccaagtcttatgtactttaatgtcaactaatatttgctctttcccatccctagattcctttgtgctgcttgtctacattgtatgataaacatcacattaaatgcaatctctcccctcccaccccctctttttttttgagataggatctcgcttgctgtgttgcccaggctgcagcgcagtggtgtggatcgtggctcactgcagcctcaccgtctgggctcaagtgatccctccccagagcctccacttcccagtacccgggactataggcacgtgccaatacacccagctattttttttcactctcgcccaggctggagtgcagtggcacgatctcatgtcactgcagcctccacctcccgggttcaagtgatcctcctgcctcagccttctgagaagctgggactacaggcatgtgccaccatgcctgggtaatttttgtatttttagtagagatggggtttcaccttgttggccaggctggtctggaactcttgacctcgtgatccgcccacctcagcctcccaaagtgctgggattacaggtgtgagccaccatgcctggctatcgcccagctgtttttgtatttaattttagattcagggggtatatgtgcaggtttgagcatgatgctgaggttttggcttcttgcataagtactttattatattactatataatttttattcactaaatctactttatgaatctttttcttattaggaaacatactttttttgtgtacagtgtacaattgaatgtacagcattgctgattcgatatatcattattggtagatttgagaacaccaaaatacatttaaacaaacaaactagcaaaaaaaaaccttttctgctggcttttcttttcttttcatttaagacaggttctcactctgttgcccaggctggtctcaaactctttggctcaagcgatccacctggctcaacctcccaaagtgctgggattacaggtgtcagccactgtgcccagacactttctctttttttcttaactccctctttggaactttttgctagcatttctctgtgtggatattccaccacatccccctgaagtatgagtcaagcagtggtgaatctttctgacacattgagaaagcaaatccagagaacacagagactaggaacaaaatgaggcaaacctgagaaaaaagcttagggttccagctttgtttctgttgttcacttccagaaactgccaatttcgaaaaatcgtcctggtctcttgctgcaacttgattgtgtttttacttcatgtcctgtgcccttgttgctcagaatcccaagagagctgtttagaggctcagttacatgtttgctaagttttcgtcttctcctcccaagatgaatagtgttttgttttgaaatagcaggtgttttctgaatcccatgaagggccaaaagctaaaagtgctgatcctgactctgatttcgctgcataactcccaggggcatcctgctctgatgtcaggaagggagtcaggttaagaagaggtcacctggaggttgaagagaaaatggacaaggtagaaagaccttgagcccctccctttgaatagttgcctgcttaaggacaatgctttaaaatttttgaatgtatgaataccttctaaagaaaaaacctatagacattacattctccagtttaactgtgtttattccattgtatatgtttttggatagtcgagatcagttgattttttcctgatttttacacatggacataatcctcatccttgtcatttttattggctgaagagtagagtttgataggatctggctaagcaaatgacactttgttgattattaggtggcttccagattcttattatttaatgataggcttgtaaatgtttttgagtccatttattttgttttgcttctagatgaattcatctaccaaatcagaggcaatggaccgtgctactgctgttgttacatattaacagaatatgttccaaaaaaagattgaaccaatttacaatgtatatttcaactgtttcctcaagcctcagaactttttttttcagtttagtggtttttgatagtttaataggcagtttaagggctcctttaaaggtcagcttgcttccctttaattgttgtatttttgaattgcatcaattcagtttaaactcatatttattgaatgcttactgaatgtaaatcactattctgggagctgcaggtaggtgactcaagatgagtaacattatctcagccttcaaggatcttaaaatctaatatgagagtgtagggggagattttaggagcacaagaaggaggaaacaatggctgcagagtaagaaaagtgccacagaaaagctacaaagcaagcactgttggagcttggcctgaggagggagtgtgcgcatccaggaggggagatgaagagagccttcatggaggagatgacagttgaactgggtcttgaaggatggctaggattccatgggaatggaggggcgtggcaggaagagagcacgggatgagcaacttcacacaagtgggaaagcctgggatgtgcagagaagccagcaagtagttgagtgtgacgggtgcatcggttcgggtcgaaggaaatgaagctggagaggtaggctgaggtggttttgtggttccaggctgaacattttgaaaaatcacatgcaaatttttcttcctttctgatcattttaaagtatttctgagtagtttttatatgctttgtattttgaagttttataaatgatgtggttactacattgttccattgtgtgtaatgtattaagaaaaaatatttcatttttaaatattcaaaagcgtgttttttgactgggcattatgtatagcatacttttcattagcggtttaacatctgtcatctctacacaactagcaggaatatgtggcttcattttcttctaacctttttcccccttttgtgattaactctttttcccatgtggaattaatatgctcggtatgaggtgtatgtctaagttaatttttctccacagtgaagtctagtgtcttactggagtttactaaacatgatgcatttatccatctgttgtattttcaggtttaccttggtctttatgatatttttatctactaaaacttttaacccactcttacgtagttttgagagtcatatatattttttaatttggtggggttaaggaaaacttcagcaattttcgtggggtatctttccatttgttcatgtgttcctctttctcattttagggtattatagtttcttaataattctcttgcgtcctgagttaatatttcaaatacgtaacattttgatgctgttgttattgaacatttttaagtttgtattttccatctcgactatggtttgttttgtatgaactggttatatccagcagctttgttaaatccacttaatctatctagtaacgttttttgattgaatatatatgcatttgtagatttactagtgtcatctgcaaaacaactttttcttttcaatgtgatagatattttatagctgtctcatcttgcgttgctctcagtagcagttctggtgtctcagggaacactattaagtgtaacgaggtttctcaaggacctcctgggccagggacttttctgttctttccaaggagctgtgaaaaaaggaagcagctgcccagatttatagaagcagagcttattagggctggatgggacctaacaggttctctagacctgggccttcatttgagagatgaggaaaccagacctagagaggtgtgaatttgccagagttcacactgctgcagtggaaggaggtggttgagcttttactcttatttttttatggtacatattacatacagtacatgttttcatttgggaaagttacttggtttgacagttttccaagtttacccaacattaaattttggtaactatgcaatatccttaaaaaaattattttcaagtaattatctgaagctctagaaaaggttacccctctatatcctcactctcctaggtggttgagggaaaagagaataaagaaaagttgtggggttggggctgggacagggaggaaagggtattttagtccttgatccttagtaggagggcctatttttaagcttcataatgtcagttttaaaagcagtggttttcaaaataaccgcagacgaaagtccccttgaaatggatgcctttctggaattgacctattttgagtttagctgttaccagaagggttcagaatctcgaatgctcttaaatgcatttacttttcagacaaagtggaaattgagtgcataatccacgtgggttccagattcaggttaaatttagaaatttggggagttgtggagagaagacatgaaatgagtcaatcgttgttttacaggtttgtccgaatccaggttaattatatttccttctttattgaattataatttgtatatccaggttagttttacaaattagatcagaccctcagtccatttgagagtagactcagagtcagaattatttgccccctttgctgctttcataccaccctttagtaaacagtcctcaagaatgtccttatgtcggggagggcagacctcagaagttagcaagaattccaagctcactgtaaaccttttgtttaatggtttactcaaatccagatagaaattctaccaaaatgccagcctgtatttcagctcctctttcttggagtctttaggatggtgggaaaacaggcagaagaaagctgtttaacattccaataattattaataatagaaaatgtatcctgctaatcaggcactcatttgcgtccactgataaaactaggtcattggagccaaggaaaggtaccgttcactaaaggaaagaccagtagatagtcaggcatggtggcgtgtgtctgtagtcccagccactcgggggctgaggcaggagaatcacttgaaccagggaggtggtggttgcagtgagcggagatcgcgccactgcactccagcctgggtaacagagtgagtgagactctgtctcagaaaaaaacaaaacaaacaaaaacagtggaatattgggctaagctcttaacacattatatttagagattgcaacacttcaatatttactggaatactcctataaaacggtctcttttgccttgttttattttggtaactaagtgaatgctgggttagccataaaggtagcttgctgcatttctatttcttgtgttctaaatcactgaataattttttaaaaaagtagttctaaagcatttccagttaaaaaggaaggcgtaacatttattaggggaagtcaaggggagaggtagtgaggaaagtaccagaaaccaccaacaggtgtttcggttacgttgaacaaagaatcagcttgatatgcagtccctgggaagagtttgtaaattcctgaaggagggtgagagctggaggggacacggtgagcggaaatggtgagcggaaatcagtggttcctgaggcacagaggacttgggttaccggaggcttgccctcagctgaggacctgggaacaattcctgagcaagttgcttttttgatagacaaggatgcatctgtaggaccactgctgttaatctgtggggcaataagaattgatcctactgcaagaaagagagtaggataagtcagaagacatggaacttgtatccctagaggacatcgcaactggaaaaatagctaccatttatgaaggcctacctcatctctttgcattcattatcttgaatttgcactaaaattctgcaagaaaggtcatagtattctattttacaaataaggaaaattaagctcagggaagttatttcataaggttgcacaactagtaggtggtagagctaagtttagactcaggtctgtcctactctgataggcatgctttttccacacggccctctcagtactgtgtaaaatgccagagggctttctggatcttcacttcccaaaactgctaaatttaaattaattaaaattaaagttgaaaaatcagttcctaggttgcactgcccacatttcaagggctcagtgtccatgtgtggctagtggctactatactggaccagcacggattagaatgctttcttcattgcagaaagttctattagtgctggtctagaggtcattcagttttgcccctttatttaattttttcccccttttattccacaaaggagaaaatgagggacaaagaaaggaagtaacgttcagcatcagacagctaattaatccagttttttggactggttgcctgttagattttcccatgccccacattcttcccttaaaaaaatgaacagaatggaaatgtgagaaatggagtgactccgctactctcccagctttgcctggcctttaaactagattctttctcccaaagaatcctgcattttaccaagttcaaagggcatgtccggattagtttccccaaaggaaatgaaatatatttgttggaaaggaattccattcttaatgtatgaaatagcacttggattccctctggttctttctctgacttcctaccaagcgctttgtaattgaacttgcagctgctaaccatttgtcttccaaaggagaccaacttcaaacagttcaaatgacagagggatgtatactttgaatgcaagcagctgcctattatttgccattgattcaaatggcatttatgttagagtcaaatagatttagattatggccaaaattacaacaatagatttctaacttgtatgttaagagtaagatgtattaacagtcattgaactgatgtttagtgtttaactcatacataccaggcactgggttgcaacatgaactaaaaggacttttgctgaaatggaaaaagatgtcttattatggacaagttgaatgcattttaaattcctgtctgaattatattgctggtatttgccatccatgtaccttcctgtttagccttgaaattcagtaaaagcctcagtgtggatcatacttcatagctctgaagtaaagtgaggagtcatgtgcaaatgtccttttagtagatgctattaaaaggcatttaaattatacactccagtgtctaaatgacagtctgaagtgtatgtgtgtttggaggatgggcaagtgggagcaaaaggaggcattgtgctggggcgattgatatttttaggaagcctaaatgtaatgtttgatttcggtataactaacagactcatggtttagaaaagttgtctatcaaaaactgagaaattgaggttttggtttcttcttaaagaaatgttcaagtcatgtgcatgagtatgctcagagagattaaaaatggagagaaattggaatggtggcaaggtatccaggaaagtacctgtcttctctgagagtccaagggcaggagcagaaaggactttaaagatggtggcaacaggctgggtgcggtggctcacacctgtaatcccagcactttgggaggctgaggcgggcggatcacctgagctccgcagtttgagaccagcctgaccaacatggagaaaccccatctctgctaaaaatacaaaaaattagccgggcgtggtggtgcatgcctataatcccagctacttgggaggctgaggcaggagaatcaattgtgccattgcagtccagcctaggcaacaagagtgaaactctgtctcaaaacaaaacaaaacaaaaaaaaagattgtggcaacagctggaaggggtccccaggagctctgacacagggttttccaactgcccaacatcacggggttggggagcagagcatccagagggctccgtgtattgttttgtagtatagggtctaacttctagaaagttgggaataggcttctgagagttttggagtcaacaggcctgaatgcagaatgatcaaaagaagatggctattcctctcagagtggtgctggttttgggggccagcagtgcagtgaaaagcccaatttcccaatcctattttgaatatttctgcccccacaagcgtttcatttgactccagagactaaccactcttccagagggtctagaagtcttcaggcttcagaatttttaggccatagtgctttggaataacagtcccttgtgtagaaaagtgtgagatctgagctcttttcctggtcaacctgtgaagtcactgcatgaccaactctgtgcctcaggttttttctctgcaaagtgggagtgatggtaatggcttcctacctttcagggtttgtatatgagctgcacatagtttcatgggttaccactcagcatgctttcacgcaagtagagattacattttattgttgaaagaaatcttggttgtcttctgttgtaatcttaccttgaatccagggctacaaagaagggttaaagctagatatggctcatgcctgtatttccagctacttagaaggctgaggcgggaggattacttgagcccagaaggttgaggctgcagcgagctgtggtagtgccactacaccccagcctggccaacagagcaagacttcgtctgttaaaaacaaaacaaaagaaaagaaaaaccaaagtaaggttaagagaagttggctatgtcacacagtatgttctatttggaattttgtgacttttgagtaacataacctaaaggccgtgtggcacagtggaaaggctttgtagccagcagactttgagtttgaattctgaccctgccttactatgtctgtggtcttgtgcaagtgcttttacatccttgggtctgttcccacatctgtaaaatgggcataacaacatttatccaacagaaaggattcatacactctgtgtgtaaactgctttttgtgattaacaagactaatgataacagccaagattagatccccagtgcaggttgccttactttctatcaggtgagaaggagagaaaattcttatttcccaaagaacttacagtgacggggctcttcagctgctctttatccaacagacttagaatagagacaacaccgggcatacttgcaattttttaggatgtgcaggaagcaaaagaattattttcagtgaaacaggagtctgcaaaaggtgccttaggaaacaactgccacacagtacatcccaatatagactcctcccagcttctctagggcagccatctgcctgacaggccccacccagataagcccagctttcttctcccaagagtttaaggaagatttcctgatgtatgtgtgcgtgtgtgtgggggtggtatggggttgtgttgggcgggggtcaagaggggtgttaatttgggatgggtagtcactggcttttggtggcataactggaaggtaacactccctgtggctgaatcctgatccctgtggggatcagcgcatggttcatccagacatcttcctcagtgggtcctggcctctgctcatactatgtcttctactggggattcccgtctccacctccaatatacgtatgttgaaatcttcatcttacgtcaaagctcaacttggaggtcatgtcttatgtaaatccatcacagacctctcctccaccccatctgggcagcggtcatctgctccaccctccggagcactctgtacatattccatcacacttcagttacttatgtaattgtctagtcagcagaagatactcctctccaaagggcaaggttctgctaaccgctgtgaagcctggctttgagtttatgaggggtgattcttttcagtttataatttcttggcacaggagggtcacagtgttgttggtaaccgtagcatctgtcctgggaggctctgtatgctcttcattgttcatacatccatttatttcttcactcagccacatgaggcatgtgggatgtatgttatctctgcttgatacatgaggaaactgattctggttaaaggacttgtgcctgtcatacaggcagctaagagtgcctatagtcctttgtattgccttttcagccaacagtcccatcccagcccaaaggaggaaacatttggggagcatatactggtgagaacatcttccctattctgtggcgttctcttagccttatgcctggcacagaggaaggctctgggaatgtttgggccggatggatctgggagcctcttttgcatgccaagctgcatacttatccctagcaaatgctggtctccttgatggatatgtgacatgggtggctgaatttacatggcacctggtggcttctcacactcctccgccacgcctctggggactaggataggacagatggccacagacaggattctcagctctgcaaatcacatttgggaaaaagttaagtttgtgcaataacacaattttggtaacatggtttcatgctgctggtaaattctataacactctctggataaatcacacttcagcagaactcacttgggaacagagtttaatttcactgtaggtggctgtgattcccacccaccagtcttcacacccccgctaatatatctaggctgataaggtgaatgctgtgctaagcaggctatttctgggcccaggatagaattacattgtggtttttaaagaatttttttctgtatatttttctattcacagaccctttgaaagaagaattacattatgttaatcatccgtttccccatcagcacctttaattccttctccccagagtataaccacttgtccttaaaatgacagaggtggaaaagatcttgatagttcagcctcctgtatgtatatatgaagaggttgaggcccagagagactgggcagcctactcagttgtcagatggctggtgaagacctgcatccggatccgttgacttctctcctgtgcagggcccttgttttttgccctgccctactgcttaaccttgtcttctgtcttacaactaggggagagtctatggcatgttcagtttgaaatgaataaaagtgaatacttgttcattgttaaaggaccccaacacagaactaatttcctgttaacccttacattttctcttgacatatctttggtgaggaccattaaaggcttaacacatttctgtacagtgacatgcagtcctaggggttaactgtgtgggtttgagcgataggatttaacttttaggaaaaaggggaaaaaagagagaaggttgataagtgtatttggagagagagaaaaaatagttaatttttctcttaacagttaatctgaaatgataacacaattgtgccttttggctctaaaatcaccatatttttgatatataatccaaaggcaggtatccagactgctgaaggcttattaaaatgtaacaataggtccaagtctagaacttgaaaaaacttctcatttgtcaaagaagttccagtattctacattctcttgctaatgaatttggggagccttggaagctcagcaactgggatgccatcgacaggtttgcggtcctctctagtctggggtaggtcttaaggggaaacttttgggagggacacacatacagtacagtgaaactgtacatgaactactcaggagacagatcacttggcagggatgtggcgatctttgtacatatttgttctgctttactagctacattgtaagcttctgcagatgaagagttcagccttgatgtcccatctcccgcccaggcctgccatgtactagttgatcagtaaaagtggaatgaatgaaagccagtgttagtttacagagcttctgtgggacagaagctttgttcagttgagtttccatcaatatcaaatgcaatgttatgtgcgttgagtttcttgataactgttcttgaggtttctttttttttttggtcctttttgactgattaagcaaggctggactggttggagaccccagatgggaccaagaaatgcgaatcctgcctggattgttgtaggtagagtgcttaatatggggcctggcatgaaggaagttgggagtattatctggtcaactggagtttagttattaggttgtaaatgactatggtaggtacagatgtcatgaatatactagggtctcagggtctgaaagagttaaagctcctctcagaatagcccaggcagttcccaggaagtagcttcttaggcaggatgtggcaaaccagtgggtaaatgagagcccttctcctttggaagaaaaggaagtaggtggggagaagtgaagaggaagagcttggtagacaaatctttttatctgcttcttttttaagtgccagacagaccctgcagatttttgatccaaagtgaccaaagtcctaagaatgccaataatattggttttgctattgtcttttccctgcagctaataactcaagtttaagatccactagagtgttgtttcaatagattttgttttctaattttgatcattggtgtattcttcagtgcgctttcaagattcacagtgaatgtggtgtcatccaaaatcacattcttttctaaccaaggataagtcagaagaaaagatatatatatgtatattagaaaagtgtctctttaatgtgtttacctatttatccattttaaaacacattcccacccattctctgtccaggtgctcataacagtcccttgtgatacaggacaagagtgtgcttccatttaaggcaggagagagatcttgcccatggttagatgaccagttaccagcagagttaatagagggctccagaccctctgacttcaagttcagggttgtttccacaattttggtcctttttgttaagaatatagtttatacattggagacaaattattgatggaggctgcaattttgcaaataaaaataaccctcaaaaatccagtaatgtgtatgtgaaatgaaataggtgaactgaatttggtgagctttagtgtcgctgtaaaagcaactatcctttgtaaacttactgcatagctaataatgtaaatcagtgttgtgtttaggaatcagctccaggactgtggtttgatatgtggaaacacctctgcgtttgctgtgggctggtagacagaatgggctggacctggctgtactgtgaaaggcttctttgagctggttctttgaccaggtaatgaaaacgttaagcatctaaaaacgaagtctttaggaggcttccaaggatctggaaagctgaactcagcaatttttagacttcagttttctggacaggacagctcttctagtcaaggaagccagtatctcctgcatttgtgtagctcttgactccatttctttgaaggtttcaaatgataatttttacacttacccagataatctactctgcctgagcacataattggtaatttggcccaaagactgcatacttagattgcatcctggtcacactgatatcttacatgcattttagatatttaaatattaaaacaaatattcttatggcaatttttgtttgttttgagatggggtcttgccgtattgcccaggctggagggcagtggctattcacaggtgcagtcatagtgcactgcagcctgaaactcctggcttcaagccatccttacatctcagcctcctgagtagctgggactacaggcgcatgccactgtgcctggcccttgtggaaattttatttatttatttattttattattttattattattattattttttgacacagtctctctctgtcgccctggctggagtacagtggcgtgatctcggctcactgcaacctccacctcccaggttcaagcaattctcgtgcctcagcctctaaagtagctgggactacaggtgctcgccaccacgcccagctaatttttgtatttttagtagagacagggtttcaccatgttggccaggctggcctcgaactcctgacctcaggtgatccacctgcctcggcctcccaaagtgctgggattacaggcatgagccaccacgcttggccccttgtgtcaatttttagaagctaggatgtcaggctgctctttactgaaccctaaatatcctgaagcattctgggctggtgtctaggaccatcttgatcctaagggaataagcttgactcttctcctcttggtgcttcagcactgcattttcctcagtgggattggaacaagcattaaagcaaaacaaaaagttgtaaatgagacttagggcaactaacctgctctagccagaatgaaaaatttgttgacgtttaaagttctctgacctccctgtgtctacctgttcataatactaaaacaaattatgaacttaagtaataagaaaaaagattatggcagatttcacacagctaaaataattacaagaattcagcaaccacaaaaatatttctcactgcaaattctcatccatttctgtattgtaggcatttttttttttcttttggttttagtgtttattgtatacctcacactgggttagactcaagtttgggggatacttccagcttaattgagggtatgagcatgtaattgcaaggcattgtgacacatgctctaactctggtgtgtgatacagcacaggctatgggaactcaaagggtgagtgactaacgctgtcttgaggagtgaaggactgtatccccaaagcagggatctgggcctgtcttggggtttttgggtcttctgttttgttcttatttttttcttcttcttcttttttttttttttttcctgtaaccttatttatggtgaagggacttttttttttttaattgtttacacttgcccttttgatatcctctgcattcgtggctcttatcatcatcttagacttgtgaacctgcctcaggtctctgttaggagtttctggcctatctggtcagccatatactgagtagctccacacgtagagcctgcaggttatctccaactcaccttttccaaaaaatagatttataatcctcttgtcgcctgtgatgacctctcatgctaactacccagagtcaggcagacctcataggttaaacacacagtcctctgtaagactgcccttcataagactgttacaatctaaggggtttcctgaccacacacacttctgttgaactagctacaaattggggttttcactatcctctcaggttccatagtttgctagagcaattcacagaactcaggaatgcactgtacttctgattacaattttattatagcaaaaagggtacaaatcaggagcagccaaaagaagaggcatatagggtaaggcctgggagggtcccagatgtaaagcttctggtgtcttcacctcttggaatcagggcacagtcactctcctagtacattgatgtgtaacaatatgcacagagtattattaaccagggaagctcccctgagcttcagtgtccagagtttttactggggccccattacataggcatgattaattgaatcattggccatgtgattgaactgaatctctagcccttttactcactgcaggttaggctgtattacatggctcagagccccaaccttgtaatcacatgattggtctttctggtatggccagcccccatcctgtgtctttttttttttttttcccccagtcatcttttatttggaggttaattcccattaggatatgaaaggattcagcaacgatcgagactgtgttccttatggaggggctcgggccaagaaggtcatggcggggagtgcagagcatgccctcttcttcagtggtacttgcatagccacttgtgcttgagctccttgtaggaaaggcagtagctgaagagcacgtagcttgccagcaccatggtaacccctgagatgctccccttcttcatgtcaatgcactgcttgtagtaccagtaataacctcttcaaaatgctccggtagtgccactattgctgaagtcctgcatcaagctccagcttggcagctcccctagtttgacctccagaagtttcttgttcttcactggtatgactgatgccatcttggagtcctggtgtccactgtccctgtgtcatctttttaagcaaactgtgggcccacattgaatcaccttattggcgtaaactatcagggcccactgtgaataacaaagacactcctattacttgagaaattccaaagatttagaggttacctccagaaaccagggacaaaggccagccaaattctttattatacaacatcctcctaacccccaaagctgtctagtcctcatctttgtgatgtggtaagtcagatccctctggatgcccagccagaaacctggcatcaccctcaactcctccctccctccccccatatccagatcatcacccagtcttgccaactctgccttcagtttctgtcccagctctttattgcctggctgctgtggtgttcaaattctcatcttgtcttgttttccttgttgccttcaagctgactttcctggcttggctctcccatttctaagttgccagactcttggttccaaaatataaaactgatcttgtcactttctttagaatttgctgttgcagaacaatgtgtgtattataattccattttcgttaaacaaaacatactatatatattcactggaaatgtatttcaaagaaatctagaagtgtatatattctacagtgttaagagtagttatctgagggaaggtggaacatagagttttactttagactatatatttctagactagttggattttttcatactgagcacacattagtttttttaggcctggtaatattacagaagtcaaattacagaagtcaccctagctccccactcgccttctaaacctaattctttagcatggtgtgctgtgcccttcatggtctagctcagtttacctgcagccccatctcatcactcacctggatgcatccactctcaggatattctcaggattaaacttggggattacattttctgaccttcactttccctcccttatcttagatggaattagggagtttttctgtatgttcccatagctcccaatgcctaccttgcttttagcattttgacctaccctaccctgtagattgttgttacacttgtatagttgttgctgtacttcttcttagtatcctttcctatgtttggcttacattgtgatacacacccccctacaatcccccccaaacacacacacccacccacacacccacctttcagactgccttgtgaggacagggatcttgttgtcttcatagcctagcctctagtatacatagtgcttgtcatggagtagacgcttcatagtaaatctgcattgtattttcacagctgtaggcataaatggatgtaacccagagattcactcaagttacctatcccatgcccttttctagattggagcactccccgaggtttagattctcatcatcagttctgctgtgggactcacatttccctttctatgttttttctctttttgctctgttcttgaactagcttggaatttggctccttttccttggtttccactataacaacagtgagaacaaagtatacacaaagctatttgtgtgcacagcagattggacttggaaggtttggggtggggagggtatattatattacagcaatacaggtaacttaaaatctaatggtgttaggtgtctttggtcttaaatgacctttgctaccctgccatggtacctcctttccttctgctcttgctgctcttaacgagtccccaaacaagcttttctcattttattttgcaacgtaattcagctctccagctgcacctctacatgctgttcagggctgcttctgcccaccccaaggctgaggagcaggcccttctaaactatgggcaagctttctggttctctagtaggaccagatcccactgtgaacaggtattgttagcccaaagacttatttccccaccccacatcttttttcagaagacagaagcaagcactatcagttttggttttaattaagtttctttctgtgatattacttcttctaggtaggttttgactttactagaccaattgctgttaatttgatggtctaactagtaattttctacccctagtttaacatgttgaatgttgaccaggtgcagtgtcttacgcctgtaatccccgcactttgggaggcttaggtgggtggatcacctgagccctagaagtttgagaccaatctgggcaacatagtgaaaccctgtctctacagaaaattacaaaaattagccaggcatggtggcacgtgcctgtagtccagttacttgagaaactgaggtgggagggaggatcgcctgagcccaggagattgaggctgcagtgagccatgattgcaccactacaccccagtctgcgcaacaaaatgagaccctgtctcaaaaaaacaaaaaacctatgcttaagtgagcacctgcattgacttccagtcctgatcctgaaatcaggattccctgaaggttgttggaaagtgatctgggggtagggttttttcccagaggtgatacgtgctcagggatgagatttgctgaccctcctgtgtgtatttgggcagggagaagggtccagctgtaacaaacagctgttcttgtatataagggggaagcaagtctggagaattgacaatttctcctgtggactagaattggagacatattttgagtgctgtgtttcatctgactgtatcttcctgcccttgggtgtgcttctgggcactggctactgaccttttgccttggggacccgaccgtacttatggttctgttaaagttggagggtgtccaggttcttggcatcttcaacaaagaattggacaaaatgcacaaagcaaggaagggacgaagggatttattgaaaatgaaagtaccctccacaatgtgggagcggtcccaagcataggagctcaaaaggccccgttgcagagttttggggaatttaaataccccctagaggattccatttgttattttgggtacgctgtatgtaaatggagaggttgaagtaaagttacaaagtcatttgcggcctatgacctatggagaggatatttcctgttatagctgaagagtgaattggccttatgttccctacctccagacccaattttcctgcctcagttctgagttatgaggtttaactgattgggtcacattggatcctgtaccttctccctcattgaagagcaaactgcattcctgattgatagaccagcatgggccattattatacagggattttctaaaaagctctttttctttttttaaatttatttaaactattttttcctcattatgactggaaggataaaagatatttttctatatcagcttctcaagaacagggaatgggtaatgtccagtacgtcatctttctaaggccatagccagcttgtcttttcagtaacagccagccccactgtttagtggtcaccaccagacccagggctccctttgtttttctgatgctgaccacattttttttttttttgagacggagtctcgctctgtcgcccaggctggagtgcagtggcgggatctcagctcactgcaagctccgcctcccgggttcacgccattctcctgcctcagcctcccgagcacccgccaccacgcctggctaattttttgtgtttttagtagagagagggtttcaatgtgttagccaggatggtctcgatctcctgaccttgtgatccgcccacctcagcctctcaaagtgctgggattagaggtgtgatccactgtgcccggccttttttttttttttttttttttccttttttcttttttttgagacagagtttcactttgttgcccaggctggagtgcaatggcgcaatcttggctcactgcaacctctgcctcctgggttcaagcgattctcctgcctcatcctcccaagtagctgggattacaggcgtgcaccaccatgcctggcttcttttttgtcttataacttctgtttttttttcccccctctccctccaaactccatcacttttccttttgtacttctacagaagcctgatcctttaaaaattatctggctgggcgcggtggctcacacctgtaattctagcactttgggaggccgaggcggatggatcacctgaggtcagggattcaagaccagcctggccaacatggcaaaaccccgtctctactaaaaatacaaaaattagtcgggcgtggtggtgcatgcctgtaatcccagctactggggaggctgaggaaggagaattgcttgaacctgggaggtggaggttgcagtgagctgagattgtgccactgcactccagcctgtgtgacgggagcgagactccatctcaaaaaaaaaaaaatttcatatgcggctaatatgaaacacattttatatactgggacagaaggaaccataggctgtcacttgttttaagcaacaatatgacaccccctgtctgattcaggatgttattcaatatttgaggaaagtctttgtgagtgggtggtcctcatgactccagaggctcctctgtgtgtgtgtatgtgtgtgtttttcaacatgactgcagaaacatgttgtgggaaggtaatttatgtgatttcagaagactgtttgattcccagggggtgtttttgtttgtttgtttctttttaaaggataggaatatgtgattcttattctacctgggattctttttaatcaaacctgtttttatgacataaacaaaaaaaaagtctgttggcttggaaactacctgatttacagtgaaattaaaaataaatgccttggccaggtgtggtggctcacacctgtagtcccagcactttgggaggtgaggtgggtggatcacctgaggtcaggagttcgagaccaccctggccaatgtggtgaaatcctgtctctactaaaaatacaaaaattagctgggcatggtggtgggcacctgtagtcccagctactcgggaggctgaggaatgagaatcacttgaaccggggaggcggaggttgtggtgaaccgagatcacaccactgcacttcagcctgggtgacagagcaagactctgtcaaataaatgaatgaacgaatgaatgaatgaatgaatgcctttcagccgtgcacagtggctcacacctgtaatcccagcactttgggaggccaaggtgggtggaccacttgagcccaggagtttgagaccagcctgggcaacatggcgaaacccagtctctacaaaaagtacaaaaattaaccaggcatggtggcccagctaccccaaacgctgaggtgggaggatcacctgagcctgggagatcaaggctgcaatgagctgtgactgcactgctgcactccagcctgggtgacagagtaacaccctgtctcaaaaataaaataaaataaatgtctttcaacctggggaagccgattgaaaaggtaaataaatttaccttatttatttttcaaaataaatttacctgtcctttcattttcttatttttttattttaagctttattcccctaatacttactcttggcatatatatatatatatgtgtgtgtgtgtgtgtgtgtgtgtgtgtgtgtgtgtgtatgtgtgtatatatatgtgtatatatatgtgtgtatatatatgtgtatatatatgtgtatatatatatgtgtatatatatgtgtgtatatatatgtgtgtatatatatgtgtgtatatatatgtgtatatatacacatacatacatacacacacatacatacatatatatacacacatacatatatacatacacatacatatatacacacacatacatacacacacatacatacatatatacacgtgcatatatatacttataatttttatatgtacaattttatatatatgtacacacatacacacacacatatatacacatacacacacatacacacacacacacacacacacacacacacacatatatatatatataaatttttttttctgaaacagggtctcactttatcacctagactggagtgcagtagtgtggtcttggctcactgcaaccttgacctcccgggttcaagcgatccttctgccttggccccccaagtagttgagactacaggtgcatgccactacacctggtgcatttttgtattttttgtagagatagggttttgccatgttgcccaggctggtctcaaactcctgagctcaagcgatccgctttggccttccaaagtgccaggattacaggtttgagccaccttgcctggcctggcttataatcttttttttttttccttaagtgctaactgcgagttaatggtttataatattcctaatcctaattctataccattgtcgctgggtgcagtggttcacgcctgtaatctcagcactttgggaggccgaggtgggcagatcacttgaggtcaggaattggggacgagcctagccaacatggtgaaatcctgtctctactaaaaaaaatacaaaaattagcctggcatagtggggcctgtaatcccagctacttgggaggctgaggtgggaggaacacttgaaccaggaggtggaggttgcagtgagctgagatcgtatcactgcacttcagcttgggtgacagagtgactccatctcaaaaaaaaaaaaccaacaaaaaacagcaacaaaccaattctataccattgttcacagattagcccctactagaatgccctctttctctttttttttttttgctatctcattattttatatcattctagaccagtttgagcctcatatccccacaaaacttactctagcatatcctcaactacacagctgcctgtgttctaggccctttgtgagaattaggcgaactgtggtacagtcattgccccagaatcacttttgaagttggtggtgaaaccataaaagcaataaaggtaattaactacattgtgcattttccccagattatttattgcatgaacaacatgaaaacgtggggattaaatcaccttctaccctgccacagcaactgatttcatttatctatgtttctttgcagtgcttgttcgtatacattcatttttcccccataggtaatacaatataattcatttgcacctgagagtgtttgtcaaaatttctgatacctataagtgtgtgtgactttggataagtcacttctcctgagacccagtttctccgtctaaaccaggggtttagactacatgtcctgtaaggcaataatcatgaaaatatcttctgttgtggagtatttcacagttgcttgaacatttgtattgttattctttaccataactacatgggattgagtggaatatgatattccttttttacggattgggaaactgaaactgaggtagccaaagaaaacactcttaggtgaaaatgaattatattgtagtacctatgacgggaaaaaaatgaacgtatatgaacaagcactggaaggaaacatagataaatgactttaaggttgactttttatctctggtttttagcagtttgactatgatgtgtctaggtgtgggatttttctttttttaagtattgcttagggtgccctgtgttttttcgatctggatgtttgttgttttttgttaattttgggaaattcttggcctttatctcttcaagtatttcttctgtcctgttccctcttgttcatccaagaccccaactacatatatgttagacgattggatcttgtcctacaactcttggatgctctgttctgatttcttttattctttttttttgctttagtttggttaatttcttttttgtttttttgtttttttgagacaagctggtcccaaagtctgggcctcaagtggtcaagctggtctcaaactctgggcctcaagtggtcctcctgccttggcctcccaaaatattggtattacaagcatgagccaccgtgcccagcctccatttaaaaagttctgtcgacctatcttcagggtcactgattgttccctcagctccatgtaatcggctaatgagcctgttgacctctgatgccacgtttttaaaatttctagcattttaatttgattctatttttagttttcacctttgctgaaattcctcatttgttcatacatgttgtcacctttaacatattaatcatagttattttaaggcctctgtctgatagttccaacatctgggtcatctgagtctggttctgtttatagcttatctcttgataaggttgttcccccccatcccacttcccaacccttcttgatttttgtgtttttctttccttttttttttttttgaaacagagtctcactcttttcacccaggctagagtacagtggtgcaatcttggttcactgcaacctccctcccggtattaagcaattcttctgccttagcctcctgagtagctgggattacaggtgcctgccaccatgccaggctaattttttttttttttttttttgagatggagtttcactcttgttgaccaggctggagtgcaatggcgcaatctcggctcacggcaacctctgcctcccaggttcaagtgtttcttctgcctcagcctcccgagtagctgggattacaggcatgcaccaccatgcccggctaattttgtatttttagtagagatggggtttcaccatgttggtcaggctggtctcaaactcccaacctcaggtgatctgcccaccttgacctcccaaagtgctgggattacaggtgtgagccactgtgccccacccatgcctggctgattgttttatttttagcagagatggggtttcaccatgttagccaggctggtctggaactcctgacctcaggtgatccacctgccttggcctcccaaagtgctgagattatggatgtgagccaccgcacccagccatgtcttgtgcattttttttttgaggtggagtttttcttttgttgcccatgctggagtgcaatggtactgtcttggctcactgcagcctctgcctcctgggttcaaatgactctcctgtctcagcctcctgagtagctgagattacaggcatatgccaccatgcccagctaatttttatattttcagtagaggtggggtttcgccatgttggccaggctgatgtcgaactcctgacctcaagtgatctgcctgcctcggcctcccaaagtgctgggattacaggcatgagccaccgtgtccagcccgtgtcttgtaatttttgattgaattttggatattatgtggtagaacagagaattaggtaaattgtctttatcctcagaaatgggcatgcttttctgtcatgctgttagtttgtgttaggctgttagccagatttgagctgggtttgggctttctttttaatattaacttaaatgcatcacatgcttcaaatttctccagtaatgggtttttatcttgcacttagcggggagcctgagttgcatacatttattttttttctcagtctttctactgcttcttcagctctgaactgtcccttaatcctttgccacaaagggactctttctctacactcttgcccctttcctaggggtaagctgcagttgctttttagtggttcttggcttgaagtagaggtagggaggttctcattgtcttgatccaatctcaatctttttttttttttttttttttttgcgatggaatttcactcttgttgctgaggctggagtgcagtggtgcaatctcggctcactacaacctctgcctcctgggttcaagcgattctcccgcctcagcctcccgagtagctgggattacaggatgtgccaccaagcccggctaattttgtatttttagtagagacagggtttctccatgttcgtcaggctgttctcaaactcccaaccttaggtgatctgcccgcctcggcctcctaaagtgctgggattacaggcatgagccactgtgcccagcctcccgtctccatctttagcagaccctgtgagtatagaccttgggtttggggttttcccagcattctttcccttcctgtgtatggcagccagactttgccttgtatctgcggcaggtcttgggcaggagaaagttttgtatacctccttcagcagttagtagacttttgctttctgttggtgttgagcacagctttaggcttagattcttcatcaactaggagaagctgtgcttcaatacagttattcgtttgcatggttcctaatgtgcttcactcaatttagcagaatttttttttttaacctcttccttgacgctagctgcttgtgcaaatcacatcttggccgcctactcttcttcacttgctgacagatgtgtaggtgagaaaagtctcatagtcattgttcctgaaagaagcttccagacccacttctagggccagtgacatatgcaggaaatcagctgcttctgggccaggacagagctggtcttttttttagtgggggatggcgggcagtggggcaggggacattcaaaatttattttccaacagacagatagcatcagcaggtacaactacaagggtatctacatagatcatacattcacaaggcattattagttcaacagtgagaaagccactcgtgggttttctgtaacaatatcccacttcatagtgtaaacaggtactattttgttcacttacaattccggaaggaagggcacaccttgcaggggggaagaaaaggggaatcctaaagtaaggtgcaacaattaagagacaacactttggctaacaatcttggatccacatttcagtcagggccttccacatagaggggaaagacttttctctcagaagttagaatctttcttcctcctttcttgttaaactgagagcagtgttttgtttgctcaatattacatgtacaaaaggagattagaagaaaatgcatcacaaaaccatcttgaacgttcagctcttcctgccaatacatcacaactcttaggttttagacggggcctgggaatacgtaagtgttttttcttttttttttttttttaagtgaaagcaagtttattacgaaagcaaagggataaaagaatggctgctccataggcagagagcagcccagtaatcttaaaataggaaaatagacactatggctacaaaaaataaaaaataaatgaggtagataaaattttcacacccaggacttgcctgttccaacttcatagccttcatgaaatattcatcaagaagacaaaaaaaaaaaaaacctttataattacttggcataagtcgcaacaagaaaattcaacaaaaaaattagcatgtatacctgtgataggaaacacatccttccatgagtttcttctcaagaatgaaaacctagttcttcagtagagtaggcactggcaaactaagtcacctgagatttcctgctcaggtgccctcttcttctggggttcaggaagaggaaggcatctaagaagtgtgggaaaggacattggcactctcagggcagagctggtctttcacattgtggtgaaactactagaaagaagaaaaacatgcttgtggctactctgtgcctgcgaaataggtgtgaagcctttaggagtcagaagacctgggttcaactctaatagtcacttactctgtgaacttgtgcaagtcacttctctgtagtttttcttacagttaaaactttaaagttttgtccagtgctaaaattctctaatcctaacatatccttctgtagtgttacaaggatagaactctccaggtaaataccaaggctgtgcttttctgcaagcatagtggttagcttctcgtgttatatggtttgaagccctagttgttacttcttgcctgcatataaaccccattgacgatgatctcattttgtttttcctttgagaataaattgattgttttgtcttcccaggtctttgagaatgcgtaagttccggcactagaaggccctcagtaaagtaactaaaggagtatatacagctaagggcaatttaagtcaaaatgtgataataagtaaaaagtggttgtagaaattaaatgagagtgaaatatttttttaaaagttggaatcatctaaatgctaaatgcatatttaatattgttttgctactgtaatctaattagttaaaaagaataacatttgggctgggggtggtggctcatgcctgtaatcccagcactttaggaggccgaggcgggcagatcacgaggtcaggagatcgagaccatcctggccaacacagtgaaaccccgtctttactaaaaatacaaaaaattagccgggtgtggtggcgggcgcctgtagtcccagttgctcaggaggctgaggcaggagaattgtgtgaacccaggaggcggagcttgcagtgagccaagatgcaccactgcactccagcctgggtgacagagcaagactccatctccaaaaaaaaaaataataataataacatttgatagtatttattgagcacctactgtgagctagatgagtgtgggtgagctcctttagtctcctgacaaccccaagatgtgtttactactgttagccccattttactgatgaaaaacctgaagcttaaggcttttaagaaacctctctggccaggcatggtggctcacccctgtaatcccagcactttgggacgctgagcctggcggatcccaaagtcaggagttagagaccagcctggccaacatggtgaaaccctgtctctactaaaaatacaaaaattagccgggcgtggtggcaggcacccataaacccagctacttggaaagctgaggcaggagaatcgtttgaacccaggaggtgaaggttgcagtaaaccgagattgcgccattgcattccagcctaggcaacagggcaagactctgtctccaaaaaaaagaaacctctccaacttgacgtggctattcagtggccaaatagggcttcatacccagatagcctgactcccaggttcgggtcagggtacatttttatgtatcataaaagcatagttgatgaattctcagaaaccgaacacaccatataaccagccctcagatcaagaacagggcattactagcacccaggaattcccctccttccctatattagggttcaccagagaaacagaaccaacagcagttgtgcgtgtgtgtgtgtgtgtgtgtgtgtgtgtgtgtgtgtgtgtgtgtgtgtgtgtgtatgagagggttattgatgtttattttagggaattggctcatgtgattatggaggtctggtaagcctaaaatctgcagggataagccagcaagctgaagacccagggtagggttgcatgcggttcaagtccagaggcaggctaccagcagaattccttcttttgggcaggtcagtctttgttctcttaaggttttcaactgattggctgaggcccattcacattatggagagtaattcactttaagtttaccaatttaaatgttaatctcatccaaaaaacccccacaaaaaccaaaaacattttcacagaaacaccatggcccagccaagttgacacgtaaaattaaccatcacacaccccctcttagttacttccccctgaagggtaatcactttcctaatttataattgcaaagattagtgttgcccttttttgaattttctttccttttttttttttttttttttttttttgagacagggtctcattgtcacccaggctagagtgcagtgacgcgatcttggcttactgcgacctccgcctcccaggctctggtaattctctcacctcagcctcctgagtagctgtgattacaagcacacgccaccacgcctggctaatttttctattttttgtagagatggggtttcactatgttggccaggctggtctcaaacaactgggcttaagtgatcctcccgcctcggcctcccagagtactaggattacaggtgtgagccagcatgcctggccttgaatttttgacagatggaatgacatagtgtattagtctgttttcacactggtttataaagaactgcacaagactgggtaatttataaagtaaagaggtttaattgaattacggttctttatggctggggaggcctcagtaaacatacactcacggcataaggcaaaggggaagcaaggaccttcttcacatggtggcaagagagagaagtgccagtaggggaaatgccagacacttataaaaccatcagctctcatgagaattcactcactgtcacaggaacaatgtggggaaaactgcccccatgactcaatcacctccctctctcaacacatggggattacaatttaagatgagatttgggtgggaacgcagagccaaaccatatcatatagtacatactcttttcgtgcctggcttctttcacagagcacatatacacattcctagaatttgatttcctataggtagttgaacagcctctcctagagtaacctgaaggattgaggtatgggaaggtatagaacgccttccccaagatgttgactggggctgtcccttgccactgggtctgcactgcggcgccccccccccccccgtcccccccaacacagatgggctagcctggggtggaatctggaagttggtaagctgtgcttttggcactctctgccttcctctttcaggtccattctcctttcctgtcttactactccttatacgcctaactctcaatcctcagccatccatggtttgactgttcagagacccatggtgccagttctttttgttctcatattgccccctgtccattgaagctcctcagcccctcaacttgaacacgcccccgttcttattctgtacctcctcagattactgtcacattgacggacttgaacctcagagatagacaacttttcccttccctcctctcctccttcccatatacttttcttatggatatggaactgaggaccagaaaggaaggtaacttacccaagatctcacagatgggtaaataggggtagaaggtgtggatcaagggattgtatgcagcctttatctctaggtgctggtctctcttaccttgggtctgtctcttttgcctctcctttcctctttccctgctacttgacttgtttcctaccctggtagcattcctgcttgccagatgccacaggggaaggagaactttacaactccctgggctctctggtaagaacacccacctgcacggggacccttcctctccttcctacagtgattggttgtcatcctcttcccttcctgcagtgtaccctcctggcagaggcaaggctgccatcgaggctagagcaaggctcagattgggtggcatgcagttgtggcctatttctgtttgctgtgtggcagtttggagatcccatttctttttctggatatcacccccctacctcctcctgtcattccttaggccagcctctaaattcagtgaccatcagggttgaaaagggcagtgtggggcctagaaaggagctctctcctaggagttaggagacctgccagcagtgaactgtgtgaacttgtccctttgggcctcagttttctcatctgtaaaatgagaattggataagttggtcttcaaggtccctccctgagatacattttatgctgctgcttgatttaaaccactgagccacaaatgaaaggttccagttgcaacagtgtaattaggcttagcagatgggtgagatgaaaggaaggacatgttcttgcccataggattatcctttcccacccatttccttgcacctcactggtgtttccaaaaagcaaatgacaacccttgtttttctctgcattcccattcaaacctttaatcttcttttatcttgatgaacttgtatttaccgttagacagccatgatgcagaattcacattacagtgtgtggttctaactctgccatggtgaatgtgatggaggttggagccgatcacagctggtccctggagagagggctgtgtgtgtcagatttattgtgctgcagctccagttttgttttggtttagtttttaaatccccagtgtcagttttgctgatttcagttaaaactaaagattgtgaagggagacagagacaggttcatgccctctgagttttagagattggtgatatagtcgttgggtgagggccctctgtcttatatcctttgcttaaaacatttcaccttggaaaggcagaaattagccttgttgaacttcaactccctctgcaagaggaagaaatactgaatactgtttcattattgatatctttttaatgagtactgaaagccactacaggatctttgtttcaccttcagataaaatgtttcatctttcattctctgaaaaaaaaaattgagtattttaagaataattaaaggaaaggcagtagtttctggatcctgccgttgctgccttggcctctcctgccttttctccacttccactcctctccctctatattagtgtagaaatgtgtcaaaaatttcttgcttcttccattagtttctattttgacccaccccagtgaatgaaataagcatagaattgttacttctattttacagaagagaaattcttatttttttgttgtttttatttttaagttcaggggcacatgtgcaggatgtgcagatttgttaacataggtggacctgtgccatggtagttttctgcacagatcatcccatcacctaggttttaaggccagcatctattagctattcttcctgatgctctctctcctcccccactgacaggccccagtgtgtgttgttcccgcccctgtgcccctgtgttctcaccattcagttcccacttactagtgagaacatgcggtatttggttttgtatacctgcgttagtttgctgagaataatgacctccagctccacccatgttcccgcaaaggacgtgatctcgttcctttttatgtctgcatagtattccatgatatatagaggagaaatctgaaatgtggcaaggttaagtgacttgtccatggtcacacagctggttgatgaacaatttgtgataagaatccaggactcttgaatactagtgatttgtcaacacgattccatctccagtcctcatccatacacacctgccattaggaaagtctttaccaccccagcctatagtctttgtcatttctctcactggccagcttctgaaagtacaggtcagaagccagttcattagctggtagggtgggtggttaaacggcaaggcataggaggtagaggagggagaaaggaagcacaaagctcaggcttagtttttcctccagaaggtgtaagaattacttatttcaaagagtcagaaaagtgaacagagtcagcattcccttttcctttgcaaattgattgaatttctatggcgagtattagctgcaaggcagtgttaatctgctccagcagatccatcatcagattgatgtgcaggggagacaggattgtctctggtgcaaaggcctttttgtgtagggcacaccatctttatgtatgattgaggcctggtgtgttaaatgcctcacactgggatcttacccatgtttgtcagttgcctcccttgaaagtattgagctttttgaagataatatagcatcatggttaaggtaagacattcgttctctctgcctgaatttgaaacgtggctgtgccacttaccagctctttgacctttgacatcttagttcacctgtctgtgcttgagtttgctcatctgttctaattaggggttgtggattaaatgacttaataaatgtaaagcactgaggagagttacacagtgttgtgaggaaagcagtttttcttccatgcagccctccttccattcccccatcatgcacagtgtgtgtgtgtgtgtgtgtgtgtgtgtgtgtgtgtgtgtgttgacagcttttcgaatctgcatttctagctggcctgctgagcctgtcaggcagctgtaacctcactcaggttttagctgtggggtccatctacatttgacatgtgtttctaaatgtggtcctcagtaagctcctttgtggggagaccttggagaaaggaaaccagagagtgtgcactgtgcacccccagccacacatgttctgggttcccacaccttagggactggggacactgcaagacatagccgaaccttggatgaaaatattgagtagctgcctcagtttgcttggactgctatgataacatatcatagactaagtagcttagacaacaatagtttattttcccactgttctggaggctgaaagtctaagagcagggtgccagcatggttgggttttggcaagagccctcttcctggcttgcagatagctgccttcctactgtgtgcttgcatggcctttctttgatgtgtgcagcaggtggggtggggggaaaatcagtgaggaaaatcagtaacctcggccttgcatcttctttggtcccatgcatgatgttatttgtaaggcagtgtcagatctcctcatacatggagaggcattaagtcttcatttccctgtcttctagaggtttgggatagagggtgtgaaggaagagcagattatgcttactctatcttttaagctcagaactggggtgtgtgtgttggcaggaacaccaacatgatgatgtataatgaaggcctatcttgtcacctgtgtcacttcagccaccccacacaattgtcactgacatgcttcacctcccgggacttcaatttgaaacccaatgaaatccagtgaaacacagtggaaactcttaccaccttcctgttaaccaactcacaggagtgatgaacacttttcagttccctggatgaaacactcttgagcaatgcccacagcatgctgaatgcactgcaggcaggctgctctctgccatacccactcgcttcagcacccactggctgaattatgtgcttaccaagagccagcttgttcccaaacccatttgttcagctgtagctggtattgtagttaagtaatgtatttaggtatcagataaactgatgaaatgtagctgcaaatgaagtgatttttttcccctatgaacactagttaaaagctgtggaaagacttataagtccaagtcactaaaacacattactgtcaaactagatgaacattaagattgggggaaatcataaaactctagaattttatattgtgattactctgcaagtaatcacaatataactttaaccagctttaacaaatcaggaataggaaattgtcgacaatgtattatgttctggtccatgtgcgaaggatgatgtggacctcttaaccagtgggtcctctttggacccttattcaaagagtcttgccctatgttaaagaatgggcgaatgaatgcagatttatatacattgagtaaaaataagaattttagatatgtaatttttatgattttttgctgtgacttttttgattaacctggttcctggacctgattacattgaaaatgaggatttctactgttgtgattcagtttaaagttggtttgatttcattttagtgaatttagggtattttattttgcgtatggtaaaaacaataaaaccaacagtagtggggctttttaaactggggttttaaagcaaattaaggtggctcattctggattttagtaggttcttttgttcctctcattgacttgcagcatactgagtgagaaagacctaattttttcactttataaatgaggaaattgaagccctgagaggtaaagcatgttggtgatagtcatcccgggtggctggagtgaagtgggcagagccacagtgggagggggcctcctctctagcctcccactttgattatctgtctggccccagacctggagctttctttccatgataggagtacttctttgggttgacttctctggtgacagtattgacttgtgctccccactttggaacaggaccaacttggaggccttgcagaagaagctggaggagctagagcttgatgagcagcagcgaaagcgccttgaggcctttcttacccagaagcagaaggtgggagaactgaaggatgacgactttgagaagatcagtgagctgggggctggcaatggcggtgtggtgttcaaggtctcccacaagccttctggcctggtcatggccagaaaggtgagtttgccttgattaacaggtaattggattatttctcagggtacttagaagcctggggaccagggtagaaggaagactgattttactcaatacctttttgtgctgtttgaatttttttttttttttaagacggagtttcattcttgttgcccaggctggtgtgcaacctccatctcctgggttcaaacgattctcctgcctcagcctcctgagtagctgggattacaggcatgcgccaccatgcatggctaatttttttgtatttttagtagagacagggtttctccatgttggtcaagctgatctcgaactcctgacctcaggtgatacgcccgcctcagccccacaaagtgctgggattacaggtgtgagccactgtgcccagccgtgctgtttgaattttgaatgcttgttatctatattagattatggataaacacactaatgactgtgttagtgtattaatccccatcccatctggaaaataataagtgactcttttttagccttctgtgtgctgtggaaggaatgccaggatacctgtttattacttatcaagtgctggagaagctgctttcattcacccagccccagcgatgcacaaaacaaggatttcaagttgtttccctcttgtgctccagccctgccagtgaatcccctttatcttcctgcattatagcatctgaactcctatcatagcatgtacttgtagagctggacttccctttcctatctacccttggtcctcttttggaatacagccccttgctccagagaggttgggctcttcaatgtttttttgcacatggtgttcactcctgtgcccataatttttttgtgtgctgttgcttctgtcttttcaaacagtgcccattttctaggtccacctcttgtctagcttttaccaggtgccccagcccacactggtaaccactgcatccatgttctctgacactcgctgtctgtgggatttttttagaagttcaaccttactacgtaactatttaatgtgactgtcacttgtctccccagctggaacaagggaaaatgttaggatgacataaggtagcaccttagactttggcttagtctcaaccacatcaggctcctgagctcaaggaagaatcttttgggcagcctaggttagcatacctgagttcctcatacccttctactttcacaactcttgagtgtgaaccaagtcctcaaggtcaatttcttttcatatctgagctccaaagcctctcttggagtaagccctcccttaactttgttcctgtctaggctcccaggagccgaggcacagctggaacagcctccagtgccaatgcctgccttagtacaatgacactcatttcttggttgagcagaaacttgtttgtaacaacttaacctgtttctcctccctctaccttaaagagcttaaacatttaacaagactatatctttcatcccttcctccctctttctttcataaaacctctctttcttccacctttctccagctaattcatctggagatcaaacccgcaatccggaaccagatcataagggagctgcaggttctgcatgagtgcaactctccgtacatcgtgggcttctatggtgcgttctacagcgatggcgagatcagtatctgcatggagcacatggtatgtgacaccctctcagcctctggagcaatggccttaagagttgggtggctctggcctaatctttggtctgggaggtgaccagctacctccctgctgctcctgggatccacatcactatctggggcatctgggaagtctaactgtagagcttgggatattcacaagatggcaggcctcctttctaggtccttgcctctcttgaaggaagtgggcagtattcctggtgggtgtacctagagcacctctcatagtttttttgattctgattaccctaagatgtgatgtaagtaaaatctggtaaatacagtttaaatccatttcttgtgtacaatgctgtatgctaggtgcaaggctctggagttaaaaagatgacataatctactgtaagggcagcctgaagggtttctctgggtttctgtatgatgcacgttagtggaaggagagggcaatggagagagagggcattcatgggctaattaatcatatgcatgttagctgccaatcattttaccactatgttcttggagtccctccttttcttcagatataagtcttccaacacactgtgcaacttagggaattctgcaagtattagtctttgctttattctccctgggctgatggcttagagatgagggctgacgtgagtctgcacacttggtggctgttgtgctttcagtccagtattgtgtctctcagctcctaccccattttattcctgatacttgagacctgccctgacctttagaatagggatcctggtgtgcagccttaatgaactttagaagaaccctcctgggaggattctctacttgtgcctccattattttgaacctctcttcattgtaatgatcacgaagtgctgcatccactgttataggcatctgctgacatttgtgggtgccatatggaacctaaatcctaaaaacgtcttctgcacatctaaaggttagagaaagtgcttgttccttctttcctcaatgagagcagagcattctctgtgggaagcatatgaacatttctggcttggtcctagtgcttggcctggggtgctgattattttctgcttgggtcttggcttcccctcagggagctgtttcttatcccttgggtctcttgtgttcttttttttttttttttaatttatttttattttttagggtgatgaagggtttttttcccctttctttttttttctttttgtttttttagacagagtctcgccctgtcacccaggctggagtgcagtggcgcgatgtcggctcactgcaacctccacctcccaggttcaagtgattcccctgcctcagcttccagagtagctgggattacaggtgcgcaccaccacgccccgctaatttttttctatcattactagagatggggtttcaccatgttggccaggctggtctcgaactcctgacctcatgatctgcccgcctcggcctcccaaagtgctgggattacaggcatgagccaccgtgcccaaccaatctttttatttttcttacattgacctcttttgagatactaggaggcttcttcatttacattgaccttttttgagatgctaggtggcatccttattctggaattctttattcactttgaacttacagatgttgatcacatctcttgtgcccttgccatgtcctccccttccttcaagccttcctcctccttcaggagaaaatgacactggaaatgactggagttggtttcccattctcttagcccatttccagtgactgcaggtcagtttttccccccatggatttggctctctggaaatagtgagatgttcctgcacaagtctctggagttatcgtggagagcatgagactgggaggggaaaatgtttcaagggccaagcacagtgtctggcacctgttaggtggtatgtgttgagtgactgaatgagagtggccaggatggggaagacctggtcaggcttgggactcgatgggggagggttaggccttggagcctgccataggaccttttggccctgggtgtacatagacccagagggcagctagaatagtcagtcagtggtagtgaagaggctcaggtgctgccggagcgtctagatgggaccatgtaggaagcagctgtggcctgaagaccaggcagccatgagagccagagtggctttctgcttcagctctgggcactctcagcccttccttattcctgagcaggtcctgttgcaggaaaggccctgccctggcttcctctggatggaaaattctgactatgggctgctgcttcccttggaccttctgctttgcctcagcttcagtttttcaaaggtgttgtcaggtagagagacctctgttcgatagccacatcccagcttctgaaggtctttggtcctctctctgtcacagtctttgcatgagttttgtgtcatgaatattattttcccaacactttattatgaaaattttcacaggctgggcatggtggcttacacctgtaattccagcactttgggaggctgaagtgagcgaatcacctgagttcaggagttcaagaccagcctggccaacatggtgaaaacccatctctattaaaaattacgaaaatggccagacacggtagctcacacctgtgattccagcactttgggaggctaaggcgggcagatcacctgaggtcaggagttcgagaccagcttgaccagcatggagaaacaccatctctactaaaaatgcaaaattagccaggcgtggtggcacatgcctgtaatcccagctacttgggaggctgaggcaggagaatcacttcaacccagaaggtggaggttgtggtgagctgagattgtgtcattgcactccagcctggacaacaaaggcaaaactcagtctcaaaaaaaaaaattacaaaaattagctggcgtggaggcaggtgcctataatcccagctactcaggaagctgaggcaggagaatcacttgaaaccaggaggcagaggttgcagtgagctgagaccacgccattgcactcctgcctgggtgacaagagcaaaactccatctcaaaaaaaaaaaaaaaaaattctagcatgcaggaaaacctgaaggaagtgtacactcgtacacccaccacctagattctacaacttatgttttgagatatttggtttaccatatatccatttctccgatcaattttggggggcgcgtggggttctgtttttgtttgtttgtttttgagacagggtcttgcactgttgcccatgctagagtacagtggtgcaatctcagctcactgcaacctctgcctcctgggcccaagtgatcttcccacctcagcctcctgagtagctgggactacaggcacatgccactatgcctggctcatttttgtgtttttagaagaaatggggtttcactatgttgcctgtgctggtcttgaactcttgggctcaagcaatctgcctgtctcggcctctcaaagtgctgggattagaggtgtgagccaccacgcctggccctgggaatgtgttttaaagtaaatttgtgtcatcagcattggttgagccctgtcttctaaagcactcagccaggggctgatctttcctagaaataagctctgtgtgcactgcccagtctgaattttgagacccaaggagggaaattgatgctctctgatcagaacaggaatgcttttatctttggggaagtagattgctgctcaggttggtagctgagccaaccggagaactagggacccagagttaatggttcttgtgcaggaataaaagcttttgaactgttattttcataaagcatttgtctcttccatagaaaaccttcacaaaagcaccattgacttagttaataattggcttctaaaaataagcacaatttcagcagcttaaggcaaggacttggcaacagtgaattagaattagaaagttgtatggttagttgcaggcaaccctggggaatcctgactggtgtatgccccttacattttgtaattccatcgttcacactatactctgcttgaagctctgtggaggttaaagggaagagagccaatgtttcctttttgttttaaaattaactgattaattttacagatacggtcttgctctgttgcccaggctggagtgtggtggcatgatcataggtcactataactttgagcttctgggctcaagcagtcctcccgccttagcctcccaagtagcaggaggacaacagatgtgcatcaccatgtccagctaatttttattttttgtagagatggagtctcactactacgtggcccaggctggtcttgaactcctggcctcaagcaatcctcctgccttggcctcccaaagatttgggattacaggcatgagccactgcacctggtttgttttttcctttttaatagagatatttctcttaccaacccccaggggaagtgtaaaccaagacagttatctgggctgccccctgtcctaggctgcatttagggtcagttgagaggtagtgctggctgagcacagtgactcacacttgtaatcccagcactttgggaggctgaggcaggagaattgcttgagcccatgagttcgagaccagcctgggcaacaaagtgagactccccatctacaaaaaaaatcaaaaatagctgggtggggtggcacgtacctgtggtcccaactacacggaaggctgaggcaggaggatcacttcctcctctgagcatcagtagcattgtctgttctcttcattcaactgtttgttccctgccttgtttcagaggaggatttaaaatgccttacctcttatgaatatattctgtctccctaaggagagagtgtgttctatctttatcttaaaggtttaaaaaaagacaaaaaaaaaaaaaacctagttcttacatatacagaggcatttgataaatgatagaagatgatgataactgctcaatatagacaggatactttagaaaatttgttttgagttttcaggaattaggtctacatctgagagtaattttaagttgcaagtggtaactggctacacctgaagccataggggaacttaacctatttctgccttgatacatcaggatccccttagtgaggcatttcttcaagatcgcaggttaaaatgtagaaccccttaacgggagcccctggtatgtgagccctgcagagcctggcttcacaccatacttgcatcctctcttgtgctctctttccactgcctctgtccggcaccccattcatgtcatctcatctccttaccagtctctctgcctccagagtcttgtttgtctccctcagctgctgtgattctcatctttaaacactcaggttggattcttttacttctgactccataaagtcaagtcccggttccttggtggggttctggtcacagccggccatttctagcttgcacctcttcatgcaccaacagtgaaatgaccacatcatcccaggagtactcagcaacgtgatgcgtccctgctttgatcttattgcagtgctctgttcttctctcccttttctcctccccttttccaggtatagaaatcatgttcatcctttgagtaatattcagctcaaatgccatcttttaagtgaagtcagaattacttctcccttcttctgcatgtctgtatcactttcttaggcagttatggtttcattgtaatgttgggaaaaactcccagaccgtgtttttcctttactgtcacaccacaacaatcaacacagaagacttatgtgaccaaaagtgtggagggattttctctacactctaagcagtggacaccagctgggtgtcctcctgtttaattctgacactaccagatgatcatgtcagatcccatgggttcagggctcagtccccaagactgcaccaccaccagttgccagtctgggcctccaaaatgtctgactgactggctttaagttgggactcccatgatcctatctttgagttcgattaatttgctggattggcacacagaactcagggaaacacttaattttactggtttattataaaggacattgcaaaggatacagatgaagagacacataggacaaggtatgggagtggggtacgaagcttccatgccttccctgggcgcaccaccctccaggaacctccatgtgttcagctgtcctgaagttctctgaacgcagccttctggggtttttttgtgtgtgtatttttttttttttttttttttttgagacagagtctcgctgtgtcgcccaggctgagtgcagtggtgtgatctcggctcactgcaagctccgcctcccaggttcatgccattctcctgcctcagccacagccgaaagttatcacttgaaagaatagttagaacattgtcactaactggtctggtattctcgatcttaggatggaggttctctggatcaagtcctgaagaaagctggaagaattcctgaacaaattttaggaaaagttagcattgctgtgagtatgttatgaagtttttcttctaagttcctcattgataagttaatgagtcggtaagaaatggacaagagaggaagatgggaagtcaatgaggggaaagtttataagaaaagtggtattttctcactagactcttccctgtctggagtctatatacactattctctctcacattagaatgagaaaagtgactttctttatattaaaatctgtgtgtcttgaaaaacgggccaggcacagtggctcgcacctgtaatcccagcactttgcgaggccaaggcaggaggactgcttgagcccaggagttcaactccagcctgggcaacatgatgagacctcgcttctacaaaaaaataaaaataaatagctgggcgtggtggtgcacacgtgtagtcccagctacttgggaagctgaggtgggaagatcacttgagaggctgcagtaagccataatccatgattgtgccattgcactttagtctgggcgacagagtgagaccctgtctcaaaacaaaacaactctttataccatgtaaaaagatggttgcttgataaggcaggttaagaaaatgaaacaaaagagtaaaaaataaggggctgggcgcggtggctcatgcttgtcatcccagcactttgggaggcggaggcgggcagatcacctgaggtcgggagttcgagaccagcctgaccaacatggagaaacccccatctctattaaaaatacaaaattagccgggggtgttggtgcatgcctgtaatcccagctactcgggaggctgaggcaagagaatcgcttgaacccgggagggggtggttgtggtgagctgagatcacggcactgcactccagcctgggcaacaagagcaaaactctgtctcagaaaaaaaaaaagcccaggcacggtggcttacacctgtaatcccagcactttgggaggccaaggtgggtggatcacctgaggtcaggagttcgagactagcccgacaaacatggagaaaccccatctctactaaaaatacaaaattagccgggggtggtagcgcatgcccgtaatcccagctactcagggggctgaggcaggagaatcacttgaacccgggaggtggaggttgtggtgagccgagatcgcgccattgcattccagcctgggcaacaagagtgaaactgcgtctcaaaggaggaaggcaaatttgtgatgatgataaatgaagtattttcctagagtattttaaaatagattgagtatttttcttatcaccagtattttcttttcttttacattccctttcctctaggtaataaaaggcctgacatatctgagggagaagcacaagatcatgcacagaggtaagaagttatttgctagttattttgctttgaattttagatataatccaaaggctgttgcttcctcttttttctatgttttgttttcgtgtaaaagccttttaataacatgttaaatcttttattaaaagtctttgtttagtttggtggctgaggcagcaactcctaccctctttttggtcttgctacacctattgcctatagctgtgatggacaatagtcatagtcaccctggaagcccagctaagagcctcaaccagcacttagttacccagtctccggtgtcactattcactggaacagtgaacagtgcatgtgcatatgcctaaagccaggactggccagctgcatatgagttttactataaaagaaactgatttattgctgggtacagtggctcatgcctataatcccagcactttgggaggccgaggggcagcggggggaggtgggggggtggatcatgaggtcaggagttcgaaaccagcctgacccaacatggtgaaacccccctctactaaaaatacaaaaattagccgccagccatggtggcgagcacctgtaatcccagctacttgggaggctgaggcaggagaattgcttgaacctgggaggcggaggctgtggtgagccgagattgcactgctgcactccagcctgggtggcacagcgagacacagtctcaaaacaacaacaacaagaagaacaaaacacattaaaaaaagaaagaaactgatttattttaataaaggtacacatacacttaaccatgtgaccataccatcttaggcatttgtccaagataaaatataacatgcatccacacaaatgtttaaagaagctgtatttcttgtagaaacaactgaaatgtccttcaacaggcaaagagagaaacaaattgtagtatatctatacaacagaatactcttcaacaataaaaatgaaaagactactgataacacctaactttgaatttcaggaacatttatgctgagtgaaagaaggcagatacaaaacagcccaagctgtttccatttatgtgaaattagagaataacaacaaatccatagtggcagaaagtagatcagtggttgccttgaggggtctagggagagattaaaggagcatgaaggaactttttggggtgacacaaatgttacatctttttttttttttcaagagcacacatccacttctatgtattgacttctcattagtttaaatccttgaagggggctgggcacggtggctcatgcctgtaatcccagcattttgggaggtcgaggcgggcagatcacctgaggtcaggagtttgagaccaccctggccaacatggtgaaaccttgtctctgctaaaagtaccgaaaattagccgggcgtggtggcgggtgcttgtaatcccagctaatcaggaagctgagggagaagcttgaacccgggaggcagaggtcgcagtgagccaagattgcgccactgcactccagcctgggtgacgagcaagactccgtctcaaaacaaacaaacaaacaaaaaacattctggctaacacgatgaaaccctatctctactaaaaatataaaaaatagctgggcgtagtggtgagtgcctgtagtcccagctactcaggaggctaaggcaggagaatggtgtcaacccaggaggcggagcttgcagcgagcagagactgcgcaccactgcactccagcctgggcgacagagtgagactccgtctcaaaaaaaaaaaaaaatccttgaggggtacagcatcacttggattctgtttccaatagccatagtaggaagagtgcttcagaatttggcacaaactatgccactggttctgtgggcccgagttacctttctccagattactccagtgttgtttggtttaccaccaggagtcactgtgttgttctttgctttgtatacataagcacatctcttgcccaaatagaattctgtttcatctcgggcataaacactttcaattttaggaagaactgcctgctcccattggttccggataccctgcttatagccggcaaaaatggccttgcaccacagccttccacatatttccttttagaagtcctgttcccagcaggcctccatggcatccaagatggcgggaagtgcaaatgttatatcttgacaatggtgatggatacatggctatatacattcgttgaaagtcagctgtccactaatgtgactgcattttatagtatgtaaattatacctcagtatagttgcttttaaagaagatgaagccagaggacaggaaattggtaaacatagtgctgtcggccatgtcccttcagccacagcactgccaacactgactggtgttgagaggagagctgaagcggagatgagtggactagggtgggctgttggaactgactggacagcttacaagccccgtagattaggtgatacatcactggtgagcaagctgagcactgagtggagccacctttgacatggctgactcctggatgcattttttttttttttgacgtcccccttctctcccctagtgttctttttgttagtctaacttcttccagatactgatctttcaggtcttcagttagaggtcacttaattatgacagtgtttgcaagtgttggagggtggttctgattcagtaggtctggggtagggcacagggacctgaaaatttagaaataggcaattagctgggcgtagtggctcatgcatagtaatcccagcactttgggaggccgaggcgggcggatcacttgaggtcaggagtttgaaaccagactggccaacatggtgaaaccccgtctccactaaaaacacaaaaattagctgcgtgtggtggcgtgtgcctgtaatcctggctactcaggaggcttaggcaagagaattgtttgaacctggggggcggaggttgcagtaagctgagatcatgccattgcactctagcctgggcgacagagactctgtctcaaaaaaaaaaaaaaagtttaattgtaaaaaatatatacataaaatttaccattttctcaagttttcagtgtatagttcagaggcattaagtacattcacattcttgtgcagccatcaccaccatccatctccagaacttttttcatcttacagacctcaagctgtgtccatgtaacaactctcaccgggcgtggtggctcacacctataatcccagcactttgggaggatgaggtgggcagatcacctgaggtcaggagttcgagaccagactggccaacatggtgaaaccccctatctctactaaaaatacaaaaattagccaggcgtggtggcacacgcctgtaatcccaggtacttgggaggccgaggcatgagaatcacttgaacctgggagacggaggttgcagtgagctgagattgtgccactgcactccagcctgggcagcagagcaagactccatctcaaaaaaaaaaaaaaaaaaaaacccactatttccccctttccccatccactggaaaccaccaatctaccttctgtctctatgagtttgactactctaggtacctcatatgagtggaattacacagtatttgtcctttagggactggcttgttttagttagaataatgtcttcaaggttcatccatgttgtatgatgtgctagacactggttcttaagtaagtgctggttctaatgctgtggtccatagccacattttgggaaacactgcattgggggtagagtgagtagctaggtgggctgtgtagaaagaggagtaatggcagcttgtcctagtgggatttgtcgggagaaaagaaatagaaaatgaagcacaaagaagaatattgtgcaagtgttccctctcatttccagggaaaatttctcaaaatattgaaagatttctgtccatggcagacttgtagttggaatttgcatgaccagcttatagcttgtacatatggttcagttttgtgcatctattaatttcaacctgggccaccaaactgcattgttaagaactagagactattggctgggcacagtggctcacgcctgtaatcccaacacttggggaggccgaggtgggtgaatcacaaggtcaggagttcaagaccagcctggccaacatggtgaaacccccgtctctactaaaaatataaaaaattagctgggcgtggtggcggatgcctataatcccagctactagggaggctgaggcaagagaattgcttgaacctgggaggcagaagttgcagtgagctgagattgcgccactgcactctagcccaggcaacagtgtgagacactgtctcaaaaaaaaaaaaaaaaaaaaaaaaacaacaacaaccaaaaacattcagagagaggacaaccattttggaaaacaggtattaaaatttcttgttaaattataccaccatgaactgcactccttggcatttacctaagataaatgaaaacatttgctcatgcaaggacttgttacacaaatattcatagcagctttatttataattgcccaaaattagaagcaacaaaaatattattatcagatgagtgggtacattttagtgtattcaaacaatggagtacaactcaggaataaaactattgatacatataacttcgatgaatctcaaaaacatgctaagtggaagaagccctgtacaaaagagtacatactgtgagagcctgctaatacgaaattttagaacagacaatccacagtaacatatagcagatgagtggctgcctgagggtttagaggtagggatagtttaacatcaaagtgcataagggaacttttttggagtaatagaaacactaaatcttgtttgtggtaataggttcacaggtgtgaacatttttgaaaatgcatgaaagtatacacttaaaatggtaactgtaggctgggtgcggtggctcacgcctgtaatcccagcacttcaggaggccgaggtgggtggatcacctgaggtcatgagtttgagaccagcctggccaacatggtgaaacccccgtctactaaaaatacaaaaattaagccgggtgtggtggtgggcgcctataatcccagctacttgggaggctgaggcaggagaatggcttgaacctgggaggcagaggttgcagtgagccaagatcatgccattgcactccagcctggacaacaagagcaaaactgtcaaaaatcctcaataaaatactggcaaaccgaatccagcagcacatcaaaaagcttatccaccatgatcaagtgggcttcatccctgggatgcaaggctggttcaatatacgcaaatcaataaatgtaatccagcatataaacagagccaaagacaaaaaccacatgattatctcaatagatgcagaaaaagcctttgacaaaattcaacaacccttcatgctaaaaactctcaataaattaggtattgatgggacgtatttcaaaataataagagctatctatgacatacccacagccaatatcataccgaatgggcaaaaactggaagcattccctttgaaaactggcacaagacagggatgccctctctcaccactcctattcaacatagtgttggaagttctggccagggcaatcaggcaggagaaggaaataaagggtattcaattaggaaaagaggaagtcaaattgtccctgtttgcagacgacatgattgtttatctagaaaaccccatcgtctcagcccaaaatctccttaagctgataagcaacttcagcaaagtctcaggatacaaaatcaatgtacaaaaatcacaagcattcttatacaccaacaacagacaaacagagagccaaatcatgagtgaactcccattcacaattgcttcaaagagaataaaatacctaggaatccaacttacaagggatgtgaaggacctcttcaaggagaactacaaaccactgctcaaggaaataaaagaggacacaaacaaatggaagaacattccatgctcatgggtaggaagaatcaatatcgtgaaaatggccatactgcccaaggtaatttacagattcaatgccatccccatcaagctaccaatgactttcttcacagaattggaaaaaactactttaaagttcatatggaaccaaaaaagagcccgcatcgccaagtcaatcctaagccaaaagaacaaagctggaggcatcacactacctgacttcaaactatactacaaggctacagtaaccaaaacagcatggtactggtaccaaaacagagatatagatcaatggaacagaacagagccctcagaaataatgccacatatctacaactatctgatctttgacaaacctgagaaaaacaagcaatggggaaaggattccctatttaataaatggtgctgggaaaactggctagccatatgtagaaagctgaaactggatcccttccttacaccttatacaaaaatcaattcaagatggattaaagatttaaacgttagacctaaaaccataaaaaccctagaagaaaacctaggcattaccattcaggacataggcgtgggcaaggacttcatgtccaaaacaccaaaagcaatggcaacaaaagccaaaattgacaaatgggatctaattaaactcaagagcttctgcacagcaaaagaaactaccatcagagtgaacaggcaacctacaacatgggagaaaattttcgcaacctactcatctgacaaagggctaatatccagaatctacaatgaactcaaacaaatttacaagaaaaaaacaaccccatcaaaaagtgggtgaaggacatgaacagacacttctcaaaagaagacatttatgcagccaaaaaacacatgaagaaatgctcatcatcactggccatcagagaaatgcaaatcaaaaccactatgagatatcatctcacaccagttagaatggcaataattaaaaagtcaggaaacaacaggtgctggagaggatgtggagaaataggaacacttttacactgttggtgggactgtaaactagttcaaccattgtggaagtcagtgtggcgattcctcagggatctagaactagaaataccatttgacccagccatcccattactgggtatatacccaaaggactataaatcatgctgctataaagacacatgcacacgtatgtttattgcggcactattcacaatagcaaagacttggaaccaacccaaatgtccaacaatgatagactggattaagaaaatgtggcacatatacaccatggaatactatgcagccataaaaaatgatgagttcatgtcctttgtagggacatggatgaaattggaaaccatcattctcagtaaactatcgcaagaacaaaaaaccaaacaccgcatattctcactcataggtgggaattgaacaatgagatcacttggacacaggaaggggaatatcacactctggggactgtggtggggtcgggggaggggggagggatagcattgggagatatacccaatgctagatgacacgttagtgggtgcagcgcaccagcatggcacatgtatacatatgtaactaacctgcacaatgtgcacatgcaccctaaaacttagagtataataaaaaaaaaaaaaaaagaaaaaaaaaagctaaatatagaaagccacctgctttctaattgtactggctgccatcttgtcttctttctactgacaagaaagtatcaataagaggtagtgattggtttgagggggaaacagtttttctaccagtttagtccttaatctgtggcttcttaagacctctgagttccatgttagaatattttaatgtattagtttctaggaaataggagtagctgaaaggagaggaggagtgaacattcttaagcatggagttatgttctaggctgcgattgacatatgcagtctaccactatgcaaggacgaatgaggtcagtgttgtaggaacatctggtggagtaaaggcatcccatcatctgtgaagtggagtccgcctgcctactcagaggttgctgtgaggattaagaaattacatatggaaagcaactggcaaagtgttttgcttatagaaagctctaatatgctaattgccttccccgtttctttatataatttataaggaaactaaaaaccagcgattaaaaccttagctttggtttctatatgtgtaaaatatagttcttatgtttgtctctcattaacctgtaagtttcttcaaatctgggaacatgtctaattgctgtgtatatatcttcagtcctgaagatgatagtagaaaacagttcttctttgaaggtttgttacatggatggatggatgattaacttgtgccagaacacacaggagtcaacagtgaaactgggccaaggacccatgtctcttactcttaacacagtgtttctttctagtcctgtgtttttctgtactatgtacctactatggatcatgccctgtgttttgcaatgaagacctctaactttatttccattccaaggagagggaggtttcagcacactcctggaacaaccagctttcttttcccttccgcctagtgctgcccccacctgcttagggctttcttttttggcttcaccaattgttgctctttggcatgaagagatgctttgtgagccagatgggtctctgaacagatgtctttgatggagagtttaccacttgcacagccaagaaagggaagtcactagaaggacttctgtgtgggctggcctggctgctcagcatttcagactcctgttgtttacaagtcttctccagaagccctggaagaatgaactgtaaggcctggactatggaatggtacctgtgcaccagcaattcctgagcaagcagcacagtgagtaggtgattcctggaaacctgagttcaggtgaaaatgagagagagcagtctccttgtccctgcctatgggcttcctcatggccagttctacctctgttctaaatatattcttcactgatgaaatttcaacttcatttattcttctgtccttgaggaaaagtggggaagagtaaagaggtcttttctctgcctcaaatttttatttgttcttatttgttgatacttatttgctggagatagcttagtggtttttttctctttctttttgagacagggtcttgctctggtgcccaggcttggagtacagtggtgcagtcatggctcactatagccttggcctcctaggctaaagcgattctcctgcctcagcctcctgaagtgctgagactacaggcatgagctgctaggcttgggttgattatttcaattaccatttgctatgtaacgaggctccaaaacttagtagtttaaaataataatttattaccttacacagtttattactttttctgtgggttggcaggtcctctttccccatcctctgtgaggctaaagccctggtttcttccagtagcaagagggggtaaaccctactacttaagtaccctttaagcctctgcttatgtcaagtttgttcatgtccatttggctaaagcgggtcatgtgtttcaagccaagatttaaaaagtagagtgaagtctccatctcttgttgggaggagctatgaaatatggtggcccgtttttttccactgtatcacagtgataaagttgaaggttcaaattgtgactgtgctacttgttgtgtaaccttggatgagtcatttaacttctccaaacctcaggaaaatggagaaaacagaacctacctaaagggttgtatgcagattaattaatacatacaaagcacttagaatagtacttaacatgtagtaggcacttaatacattttacctgttgcttagataaattggtagaggtttttatgattaccagcaacagaaaccagcctgacttggtttaagcttctaaaaatttattcattagaaggatctggctgggagcggtggctcatacctgtaatcccagcactttgggaggctgaggtgggcagatcacaaggtcagcagttttgagaccagcctggccaacatggtgaaaccccatctctactaaaaatacaaaattagctcggcgtggtgccgtgcgcctgtaatcccagctgctcgggaggctgaggtgaaagaattgcttgaacccaggaggcggaggttgcaatgagccgagatcgtgccactgcactccagcctaggtgacagagtgagactctgtctcgaaaaaaaaaaacaaaaaaagaaggatccaagggaagttcagagagtcctttgacaagctgatcctacaaaccacggtagggtgggaaccaaggctactctagttgggaggttggctcagtcaggcagagaaatagctccctggcgtacaactctaacagtgctattgctgctgggccaactgtcctctcctagccttatttagggggtaggcatgggctcagtgatctcccagaggggtccagagtcagtgcctctgaagaatccactctcaccacagtcatgcagatatcaaggggacagcatcctctcctgctcagtgttgggggctagttgatagtccattgcctagtccaggttgaaagtgatttctgagtgtgccctgctctaataaaaagtaacgtacaaaaatagtttataacacaaggtgctctgggtgcaatgttttgctctttcaaagcattcactctaggtaggattcttcaaatagaagttttcatagaatcttgaaaaaggcaagcaaattacatcaatttgattcatacatttcttcttaggaatatgtcagtgatttaaaggtaggtattcctgcacttaggaatttttaaatgagaagaagtgcctcgtggtattttgaggaagattagctgttttcaggtaccatttagttactgtttttccacctaggtggtagcctcttgaacatttttcagttatctttcttcagctgggtgagtatgtcctggtcctagtttggtacattgccttggttgtacacatggtagttttcctacatttctaatgtgtctgcaccaggtgggaacccaaaggcaagcatgttctcaccctcattcctgaagtgatttgtctctgccataatggagcaggacttcttgggcagaataagttcaactgacagtcccagtgccgaagctctggctagctcaactggtccactgtgatttgttctgttattatacagaacattgtattctatttcccctgggtgttcaaagggagaaacaatctgtgtggtttagcctgatgtatgtgatttgtgagctgttgatcagggggtgggtatagatctgtcacccctttggggagtgttaagtttctctaaaatctctgggtgacattctgacagtcatgggtaggtacaggtatatgctcctccgtgtctattcgcctacctcctcagtcttttcccccatcaaagagaagtaattcattttgtaaaatatttatagaatacctgccaagtgcaaggtattaggtgaattactcgttaggcataaagttggctcataaatgaattgtgtcctccaggagcttagagtctaatgggaaagggacatatctgtaaatgactcttgtatattgtggaacatagccaatatcatttttttgtgcgtgaatcactaccctgccaactttcagatagaatccgatgtgacatagtgacatagattattagtcagaattctttggtgtggcagaaacccacctcaagattacttaatcagaaaagagaatgtatggtttgggtcaccaggaggtcggaaggcagggatgaatatgaggttgaaatgatggcctcaggtcacctctcagctttgctcattcttgtgtgggcttccttttcagtcagattctcttcactggaggcaggatggacctcactagccccagacacatctagtccttagtgctccctatcccagagaaagtactccacccactctccccagcatccagatcagtgtttgaaccactgattggcagactgcctctgcttggagtgcttgcccatggctggaccattcactgtgtccaggggactagtgttgcctggtgggccaccctgggttatacactcacccctgtggtacaacagatggcgcctcttgatgaacaccctagcagaaacagttgatgctggggaggagtgtatcccaaatgaaaaggaggggctttgttaccaggagatggggagaatgaatgggtgctgaaagcaagcaaatttttaaaaagttttccgcttacaaattctgttaagcattgggtcagaaagacaaaacactaacataggatgaaaacaacaagcagttaacacaggtgtgagcaaactggtccatgggctaaatttggcctgctgcctgtttttgtatggcctgcaagctaagaatagttttcaaaattttgtgacatgtaacaattatacaaaattcaatttattattatttttattttttgagaccgagtctcgctctgtcacccaggctggagtgcagtggcgtaatctcggctcactgcaacctctgcctctcaggttcaagagattctcgtgcctcagcctcccaggtagcggggatcacaggcatgtgccactacgcctgctaatttttttgtatttctagtagagacggggtttccctatgttgcccagcctgatctcaaactcctgggctcaagtgatccacctgccttggcttcccaaagtgctgggattacaggcatgagccactgtgccctgctggaaattcagattattgtgtccataaataaagttttattggatcacagccatgcttgtgtaaatgttgtctgtgcctgcttttgtgctataatggtaaatttgagtagttacttgtgaaagagatgactgtgtggccctcaaagccaaaaatatttactctctggtcctttttttatagaaaaatcttcctaaccaaaaggggaaggagaatcccttgacagaagctttagaatttaagcacaaaactgggcttttaagcacaaaactatggtggctgtagcctgtaatcccagcactttgggagatcaaggcgggtggatcacctcaggtcaggggttcgagaccagcctggccaatgtggtgaaaccccgtctctactaaaaatacaaaaaattagccaggcatggtagcagacgcctgtaatcccagctactcaggagcctgaggcaggagaatcacttgaacccaggaggcagaggtttcagtgagccgagatcgtgtcactgcactccagcctgggtaacaagagcaagactgtctcagaaaaaaaaaaaaaaagaatttaaacacaaaactaaacttttaaatgtgtcagctttaagttctcaaggaaaacatgataagtgacgtgggtaggagacaggattatttttcctgatcctggagctctgaaaagaattagctgccaaaatttatgtcgagtcttttcatctgaagctgaaccaagtaggtagttgtgctgtgagttaaaaagggttggaggtgaagagggcgctaggatactgctctctttcattctatttaaagcaataatttgcattgccaccctgccgttcttaacctgctctaattatcaaggccttattttgactaagaccctgaaaaagcgttgcatgatttagatcaatacgcagttcatccaacttagccgtaaattatttctgccttggagttgttagctgataaagatcaataaatgttaacaacagttttaaattataactcaacttgtttttcttttccttctatctaatgaaaccatgtgtaacctagatttttaaattttacgtatttatgtgtgacatgtatgtgtgtatgtataaatgaacgaatgacaggtctcgctcactctgtcgcccaggctggaatgtggtggtgcgatcatggctcactgcatcctcaacctccccagctcaagcgatcctctcacctcagccttctgagtagctaggactacaaatatgtgctatcatgcctgactaattttaaaaattttcttttctagagatgcggtctctctctgttgcccaggttggtcttgaactcctggactcaagtaatccacttgtctgggtctccctaagtgtgggactactggtgtgatccactgtgcttagctgccagcttagatttttgaggggtacatagcccactgtaattggatacctctcttcagagccatagtagcttattataccttggggccatcctgcttggagtgtgcctcaaaagtgttcctttattccctaggttagagagttatgtaaaaacggggctctcaggtcagaatgagatttaaggcttctgcagagcctatatgaaagtgtttttgggccgggcacagtggctcatgcctgtaagcccagcactttgggaggttgaggagggcggatcatgaggtcaggagatcaagaccatgctggccaacacggtgaaaccccgtctctactaaaaatataaaaattagctgggtgtggtggcacacgcctgtaatcccagctacttgggaggctgaggcaggagaattgcttgaacccgggagtctgaggttgcagtgagccaaaatcgccactgcactccagcttggcaacagaacaagactctgtctcaaaaaaaaaaaaaaaaatgtttttgggctgggcacagtggctcatgcctataatcccagcactttgggaggccaagatgggtggatcacttgaggtcaggagttcgaaaacagcttgaccaacatggtgaaaccccgtctctactaaaatacaaaaaaattagcctggcatggtggcgggtacctgtaatcccagttactcaggaggctgaggcaggagaatcacttgaacatgggaggtgggggttgcagtgagccaagatcacaccactgcactccagtctggatgacagagcaagacaccatctcaaaaaaaaaaaaaaattttttttgtatccttttcctggggagagctgggagtctccaaagtgtctcacggtgtcccagtgacagcctccagcaaatggggtcttcagcaatggtcaggattacaacctctaaattcttcctctccattcagacttgttggcactgatagcaagatctgaagtggcttgtttggttttgttttgttgttttataagctgtttgtagcagactcacacgtaatgatttgagtggtttcttctgcaatttttgcaaggaactatgctgcctctgccaggcatcgctgagcagaagtcagagtggcccctgcctccaccagcctgaggctacacacaggattctgttctgagcatggttcctatctgtgtgtgactaaggactgttgtctgatccttgaaacacagaaggttgcccatggtatatacacaaggtgctcctggctacatctctctcccatcacagccatcccatagctgtgtggcttacacaggaagggattccttttgactgtgtcagactgccctgccttaaagatggagggagacagagtggctcattagtagtggaaaattcagtatgctggtctcttggttagaaatgtgagtctcgttttatctagaattatttcatctgctagattcacagtgatgattatagctccaggtgagtttgtctcttagctccttaagagaggcttagatctctttagggaagcatggaggagatggtatttgagctgagctttgaagcataggtagaagttatatatgtggcagggtcagggaaaggaattccaggtagagggaagcatgaatcatggcatagaggcaggaaaacacagacatgtttttacaggaaatagcaagtggttcaagttgtctacaacaaagggttcctgatggcaaggggtgagaattaaagtaagaaatagttgaagcagtgaggagggtcttcactgccatgttcaggaagtggattttatcatgggcaacaggaagcagtggaatgatcctgcacagagaagtgagatgtgctgtggtttaaggaagaggactctactgttacggctaaggtgagctggagaggggagaggtcaattaggaggccgttgctatgggccagtgagagataagggggggtctgagttaggatagtggcagagtgaagggacaggatggggacagatgggagagagatggtgcaaagggcagggactggtgtgggaagatgggtaggggagtagcagggagacttggccttggcccttcctggggtggttgtggtgggaaggagcctgaggcccatggccgtgctccagggctgtacgtggagagctgtgttctcctcctcctcagatcacaaagcctcatttctaatggaaacctgaggctggggctgccctttcctaagttacagattatttcctgaggaggatcccagccctaagagagctggtttgatttgaaaatctggacacataggaatgaaactcagagtgaattttattaaccactacccaaagcaagatggaacttagctcatgatgcccaacaccatagaggaacaagagtgggctgggcgcagtggctcacgtctgtaatcccagcactttgcgaggctgaggcaggtggatcatgggagggcaggagtttgaaaccatcctggccaacatggcgaaaccccaactgaaaatacaaaaattagccgggtgtggtggtgggcacctgtaattccagcaggcttaggcacgagacttgtttgaacctgggagatggaggttgcagtgagtcaagattgcgccactgcactccagcctgagtgacagagtgagactctgtctctaaataaataaataaataaataaataaataaataaataataaaataataatagagtctagtgatatagctcagcttgaggatgggaaccagcataaggcttgataagaccaaactaattagaaacaaacacgatggaattttcttttttcatttgaaaaaacatttcaaagtttattgttggaggtaagtgcttaccaccctgtgaagtgcgtgcagggctgtcattaggtggtggtaacaggcaccaaatccccaagaagctgctacccaccaagtgacctccgagccactgtgtcctctccctttacctttctggctatgcatagaaccttatggaagtttccttctagcctggctgttggcttcctgggtgatcctggcagagttgtttattatttctgaatctcaccttcttttagaggtaatctcaattccttttccatctcctggaactgtcctcaggatcagatgaaactctgaccaagtgttgtgtaatagcattaaagttatggcatttaaaagcacattgcgtatacaatgctgggctccaaagaggcagaagagatagttcctatcctcttagagctgtgagtcctagttggaaaagcaagactgtactttacaagtcagatgaaaggtttatgggtgaattaacacatgaggtctgggatttgccttaagacattccactccctcccaccctgcaaagaaaaagctgggggttataatgaaataagattggggcggggcacagtgactcacacctgtaatcccagcactttaggagctgaggtgggtggatcacctgaggtcaggagttgagagtagcctggccaacatggtgaaaccccatctctactaaaaatacaaaaattagctgggcgtagtggcacatgcctgtagtcctagctactcgggaggctgagacagaattgcttgaacccgggaggcggaggttgcagtgagccgagatcgcaccagtgcactccaccctgggcgacagagcaagactctgtctcaaaaaaaaaaaaaaaaaaaagattggtaaaaaaatggattattgttgaagctgggtgatgggtacatggttactgtctctacttttgtgaatatttagatttttctgaaaaaaaaaaattggctaaaagaaaatagcatatgtactgacataacaagtgacatacatgataaaaaacctcaagggttccaaggagagggactcttgtgggtggacagctgtcaggggaggcttcacagaggagctgggagctgggctttgtttcagtgaggattcttggttacacataacagaaaccaacttgagccagtgtaaacacaacaggggacttccttatagggatccagggggcccttagggaacgtgaggaccagatgtagtcagtgctcgggaagggatgggacaagacagggaccagaaagccactggaattctaggcggccttcctgcttattctgcgtgctttgcacttgtttctttgcttctctgtccagagggcaggaggaagacaccacctctcagcaaccagtgtgtatcaagtccatcccagacacagcccagattcaacctgaccctcttagcacaattcccaagtctctgagtaatccaccaacacttatatagtgtacattgtgggtggggctccttcgggtgagtgaagggaggtaattagggggatacatctgaattaggaagccctcctttctcccttcttcatttgtctgaatcagactggaaggacagtaggatatacgtgaagagagaagatatctcgattgaacagtaagtgcttcagagtcaaacacgaagggaacatatatggaacagtatagatcctcctggcactgagggggtgtgaaccccaaatatctgagactactctcagttaatttagaaagtttattttgcctaggttgaggatgcatgcccatgacacagcctcaggaggtcctgacaacatgtgcccacggtggtcagggcaggggttttttcattaatttttgaaacggagtctcacctcttgttgcccaagctggagtgcaatggtgcgatctcggctcacttcaacctccacctcctgggttcaagcgattctcctgcgtcagcctcccgagtagccgggattacaggcgcctgccactacgcccggctaattttttgtatttttagtagaaatggggtttcaccatgttagccaggctggcttcaaactcctgacctctggtgatccacctgccttggcctcccaaagtgctgggattacaggcgtgagccaccacgcctggccagaggttggttttatacattttagggagtcgtgagacatcaattaatatacgtaagatgtacactggttctgtctggaaaggcaggccagctcaaagcagggaggaggctttcaggtcacaggtaggtgagagacaaatggttgttttcttttgagtttctgattagcctctccagaggaggcagtcagatatgcatttatctcagtgactttgaatagaatgagaggcaggtttgccctaaacagttctcagcttgacttttccctttagcttagtgatttttgggggccccaagatttattttctttcacatttccccccttttctttttaaaaacttttgagaaagcattttagaagaaaatgaatctttcgtctcaggtttcatcggatctctcgcggctaggacagtttattcctagacaggtaggtaggtcccaagttactaggaaagctcatttttagcaggttgtggtctcatgtcctatgatgagaaaatagggggagaaagggagaaaaactacaataaacaaaagaataattctggaaaagtgatataggccacattattctgaagtccatacatcagtaggcaggtatgaaggtggcttatgtatgctgttattttcttttgaagttgtctagcttcggttcacagggctttaagaaagcacagcttagttttcagtaatttcaaattaggaaagatgggaaaaaggaaaagaaattgaaaacattgttttttttgtttttgttttgagacggagttttgctcttgttgcccaggctagagtgcagtggcgtgatcttggctcactgcaacctctgccttccgggttcaagcaattctcctgcctcagccatcctgagtagctgggattacaggcatgcgccaccatgaccggctaattttgtatttttagtagagacagggtttctccatgttggtcacgctgtggtctcgaactcccaacctcaggtgaatccacctgcctcggcctcccaaagtgctgggattataggtgtgagccaccgtgcctggctgaaaacattgttttagagacctgtagccaggaaaaattagaattaagtccaaactgtaaaaaatgataaaaattgaaaaactaggtaagactagaatctaacaggtgtactatagccaggcacagtggctcacacctgtaatcccagcactttgggaggtagaggcgggtggattacctgaggtcaggagttcaagaccagcctggccaacatggtgaaaccccatctctaccaaaaatacaaaaaaattagccgggcatggtggcgcatgcctgtaatcccagctacttgggaggctggggcaggagaatccttgaaactgggaggcggaggttgcagtgaactgagattgtgccactgtagcaggacaagtcgcagacaaaacccctcagacaccgagttaaagaaggaatggctttattcggctgggagcttcagcaagactcacatctccaacaaccaagctccccaaatgagcaattcctgtcccttttaagggctcacaactctaagggggtccacgtgagagggttgtgatcgattgagcaagtggggtacacgactgggggctgcatgcactggtaatcaggttggaacagaacaggacagggattttcacagtgcttttctatacagtgtctgtaatctatagataacataaccgattaggtcaggggtcagtctttaactaccaggcccagggtgtggcaccaggctgtctgcttgtagatttcatttccgccttttagtttttacttcttctttctttggaggcagaaattgggcataagacaatatgaggtggtctcttccctcaccaccacactccagcctgggcaacaagagcgaaactccatctcaaaaacaacaacaacaacaaaaaaacgggtgtactatagtttttgaaacgtattttttctctctccactttcctgtttttactaaagacaaatcatggtaggaccaatttgctttattatacttggacagattatttctatgaagtacagtaagaataattatttttcacataggcttttaaaattggccttgatggaactttgctctgtagaaggaatctcagataagactttttttaaagataagacttttttaaagctgagcccagccatggatttgtaccatcaaatacatacaagttgggtgaattcctctcctcttgatgtcccaagataacttggggctcctgggcctatcagaaagtgacattctttacttaccacaggccaagatccctgtacagggactgtgtagacaaggtatgaggccagttttcccaaggggcttttattggctttataaatcaagttggattccttaaaggaaagcacaccattctagtcaaagccttggtaaaacaaccagtttctccaattgtgtcctgttacaaatgaaaacagatttttattgcacatatgcagataactatattgccgtaagttaagaatactcccacatagtttccaaattctggagtaatcaggtagagagaaacaaatatgcttcaatttttttcataggcgtatgtatactttattgttaaaacctggctgggcgtggtggctcacgcctgtaatcacagcactttcggaggctgaggcgggtggatcacttgaggtcaggagttcaagaccagcctggccaacatggtgaaaccccatctctactaaaaatacaaaaaattagctgggcgtggtggtgtgtgcctgtagtcccagctactcaggagtctgagacccaagaatcacttgaaccctggaggtggaggttgcaatgagctgagatcatgccactgcactccagcctgggcaacagagcgagactgcatctcaaaaaaacaaacaaattgttaaaacctgtcaatagctcaaaagaaaagtttccgtgactctgaaaaacaacacaaagaatcagcagcatttaagcaaaaaaataaaaaagattacttcagtctcctgtaagttcagttcatgcagttaattcctgttctgcttgatattcatgaacatttcagctctccatgagtcatgaaagtttttcctctgttttgatgtcacagtctttaaagttatcagaagcctgtattcaggagcacctgttagagttttatagttgattataaaaccaccttttaaagagaaactgcagggctgggcatggtggatcacctgaggtgaggagtttgagaccagcctggccaacgttgtgaaagcctgtctctacaaaaatacaagaaattagtctgggtggtgatgagcacctgtaatcccagttactcgagaggctgaggtaggagaatcacttgaacccaggaggcggaggctgcagtgagccaagattgtgtcattgcattccagcctggtcaacaagagcgaaactccgtctcaaaaagaaaaaaaagagaaaccatcattgcaaaattataactgagacagtgaaaaagatctgaccgaactgactccatgttgcttctaatctccaagctgtccttgttcattcctgggcatagacagaactaactttgggaggaacttagtttatagttgagctttgaaacaaagacgataacagccttttccccaaacccccttcctgcctggggactaggctgcctaaagccacatgattagaagttatggttattttactaaataattcaagacttagctattttcactaaaccaatgtcagtctctttcaatatttacagaagcaaagatcttttttttttaaacaaagtctggctctgtcacccaggctagagtgcagtgacatgatctcagctcactgcaacctgcgcctcctaggttccagtaattctcctgcctcagctttctcagtaactgggattacaggtgcctgccaccacgcccaactaatttttgtatttttagtagagatggggttttaccatgttggtcaggctggtcttgaacttctgacctcaagtgatctgcctgccttggcctcccaaagtgctgggattacaggcatgcgccaccgcgcccggtggctcacaagcaaagatcatcctgttttgggctgggtttatagttttgtaatccctatgccaaattttgacaccttataatatttggcagggatacatatgaaatttcttgatcaaaaaatgcaaacaaaaatgtaccctggctattcttaaggcatttctaatagtactttaccaacaattttaaaggtagcttatctatcaaagattttacgtaaacttgagaaaacatttgactagtctttcattttctgataaggtatttgatttgtgcttttatttttccttaagccaattaattagagctgttttatattttttagtagtaaatcattgtgtacacaacacataaatacgtggacatattagacatactgatagaagtacatcttaaaggtaagacagacctcctttttttttccccccttctgtctaagacttgcaaactcttgataacctgtttcattatgcttggcagttgtcagctaaatagctcctaaatctgcgtattgaaggacacaactctttggtgaaaaatcagatagcaaaatttacatcataaagtacagagaggaaaagtctggtggtgctagaggaagattaaaggtggatgccaaatcaaacatacaattatagaaatctatcataggattgtataaggagaccaatttatttagataggtactacctatcttaactggatctctgagttctgagtagagcccacactgaattctgggtctccaaaaaggaggctagaccacatgatgcttttaaaaaaaatttttttttggctgggcgcggtggctcacacctgtaatcccaacactttgggaggccgaggtgggcggatcacgaggtcaggagttcaagaccagcctggccaacatggtgaaaccccatctctactaaaaatacaaaaattagctggacgtggtggtgcgtgcctgtaatcccaactacttgggaggcttaggcaggagaatcgcttgaacccaggaggcggaggttgcagtgagctgagtctgtgccactgcagtgagctgagtctgtgccactgcactccagcctggcaacagagcaagactccgtctcaaaaaaaaaaatttttttttttggctgagcacagtggctcatgcctgtaacctcagcactttgggaggccgaggcgggtggatcatgaggtcagcagttccagaccagcctggccaacatggtgaaaccccgtctctactaaaaatacaaaaattagcaaggcatggtggcaggcgcctgtaaccccagctactccggaggctgaggcaggagaatcgcttgaacccaggaggtggaggttgcagtgagccgagaccgtgccattgcactccagcctgggcgacagagcaagactccgtctcaaaataaaagttttttaaacaaagacatttctaagtgtctaaactacactcttcattaaaaacccaagagtagcctctgttgcaataactattttagtcagaaaatcaggtaacacaatacaaaagcagtttaatagctgagaggaacttgtttatactcttggggagacccataaggaaaaacaggtttctcccccaaagggagtctggtgcctcctttttttttttttttttttttttttttgttgaggaactccaggctattataaactattttaggtttctcatgcagcagagggtgcaagagaaaggagagagagcagaagtaaatgaagaaaacagaattctgtcaactgagaagaagaaaaatttgtctcaaaaaaagacagggtcctagacagagaaaaaacaaacccaaaacataaaatccttttaaagacacacacacacacacacacacacacacacatatcggatgttagcttttaattaagctgacttttaaccattgagctcctttaaaaaaatctgtttaaatctcattgccgtatttctgcttggacaaattgctgctgtttcagaagtaccaaatatcaaacctttcagaaagggcttgatttaggaaccaaacctaggctgtcatgaaaaaaagaaggcagaaccttatgtatggaactgcagcctgaggtgatagctattgctccttcagtttggcctggctagcaaaaacgtggcattgttttgtgaataaagccccttaaggagtcaaataaaaaatctttcctttttttcttttgctggccgtttttctccctccaccatgccacttttttttcttgttttttttttttttttttttttttgtgggaatttagccacttcagaggcctcgttccccataatttggaactttccttcaaatttgatcaagttgcatagagttggtcaaacccaaggggaaaaagaccgaaacaacaacaaaaagaaacagtaaagcaaaacaaatgatcacacaacctatacaagtactgagagctctaatggtaaggagaaattaagaccagctggttgttaatcataactgtagccaagacaaaccctaattcagttacttagggatgggtttcatgctgaagactgccctctaccatcctagaagcaggaaaagactcaaacctgtcctccctgttggaagcaagctcaaaactccgtaaaggagttacttgccttccattgtcacggaagcaggaaaacttgccttccttgtgtcggaagcaagtaaaactcagaaacaaaaaaggagttgtacagcaaaataaactttagatcacctccaaattttgggagatcggggattctctggaggaggtgcttccaggcgtcagcaaattgtctgattggtttgaggcacaaagatagctcaagctggtaccagccaccaataggagatttgtcaaaggtcaggggcacctccactcagaatcccttggtggttaccaaaatgtgaaccctgaataactgagacaggtctcagttaatttagaaggtttattttgccaaggttgaggaccctgtgacacagcctcaggaggtcctgatgatatgtgcccaaggtggtccaagcacaggttggttttatacattttagggagacatgagacatcagtatatgtaagatgttccttggttctgttgggaacggcaggacaacttgaagcagggagggggcttcgaggtcccaggtaggtgagagacaaacacttggattcttttgagtttctgattagcctttccaaaggaggcaatcagatacgcatttatctcagtgagcggagggatggctttgaacagaatgagaggcaggtttgccctaagcagttcccagcttgacttttccctttagcttagtgatttctggggccccaagatttattttcctttcacaggggccatgttatgtagaagccaggctgagaaggaatctgattccttatattggttatatttttttctgaaataaatgttagcttttattttccctccaagctgcaagagccattgaactctgacttctgtgcttctcacatttaaagcctcctgatttgagtacttagtacctgccagacattagcaggtaggagttactattcccacctgacagtcaaggaaaggctcagagaggttctgtaactgggctggggccacagagctagtagatgatagagctaggattcaaacccagatctgcctaacttcagatcaaggttagtggtgctgtttccacaccaccctaaatggcctacttaataatgaaatttatgatgccagctgatgataagaatcactgggtgttaagattcttggttgctaatgaacttgaattagctcaaacaataaagatgatttttttttttgtatcagctaaccaaaccccaggaaggatagaaatacagctggcctgatggataattgtatccagggactcaaatgccattagctcttatactttgattaaaatatactttaaaaagatgctgttagtggccgggcatggtggctcaccctataatcccagcactttgggaggccaaggcgggcagttcgtgaggtcaagagattgagaccagcctggccaacatggtgaaaccccgtctctactaaaaatacaaaaattagctaggcgtggtggcaggtgcctgtagtcccagccactcaggaggctgaggcaggagaatcggttgaaccggggaggcggaggttgcagtgagctgagatcgcgccattgcactccagcctggcaacagagcaagactccatctcaaaaaaaaaaaaaaaaaagatgctgttagctagcctggccaacatggcgaaaccccatctctactaaaaaatacaaaaattacctggatgtggtggtgggtgcctgtagtcccagctatttgggaagctgaggcagggagaattgcttgaatctgggaggcagagttgtagtgagctgagatcgtgctactgcactccagcctgggcgacagtgtgagacttcgtctcaaaaaaaaaaaaaaatgctgttagatctctccctctcacttgtttccctttcgatgttggctttcttctctcgggccagctgtctaccagatggaaccatggtttcctgctttacagttttgttatcagaagagtttttctcacttcaattagaaagttctgagtgaggactcctgattggactgttaggggtcgtgtgcccagacctatgagatcaccgtggccaggtgacagggagctgtaagtggcccagcctgggtcagggggctgccctgtagccagggacaaggttctcattgtgtcagtctccaccttaagctgcatttgccccaaagaagtatgtgtgatgaggagacaaggaatgcctgacatctgtctttaaattgtcaaacacattcttctaagtctttccattacgggttatcccaagctaggaataactggtgagtagtttcttgaccttttttccagaccttttttggtgaattatgttaagctgtgacccaggcacaaatggggaggccatactttggtggagcctgggtcacataaatatggtgaccttactagaaattctttcctacttactcattgtttaataatgaacagaactctggcctatcttcttttgtcattgtttaacacccacctcactacctcccacctctcctgctaaacaaaattagccttcagcaggtcaaaacagatttttagctaacttccgtttcttgaatagcatatgataagaactcaagttagccaggtttgttctcctgcctgtaggtggttgattgggtttgtgatactgtgatacattgcatatctgctcctctgaggtagcccaaataatctggtgggggaaatatgctgttttaatgttattttgtgacctttggcaagagattttatcctccagcctcaacttccatatctgtaaactaggactattctgccaaatattacgaagggtcatgaaaaatgagagatcaggctgggcgtagtggctcacgattgtaatcccagcactttgggaggctgaggcagtaggcttgcttgagcccaagggtttgagaccagcctgggcaaagctgggagaccctgtctaccaaaaaaagaaaaagttacttgggcatggtggcgtgtgctgaagtgggaggatcgcttgagcctaggaggtcgaggctgcagtgagccatgatcatattactgcactccagccaaaaaaaagagtgctgtcagggaatctgggattcataagcatttcccttgactgctcttctttcctttcttttattatacctctcttctctctgtaccccctataccttttgctctggcttttgttacatcctgtattaaaattttagataatttatgttatttttcttttttgagacaaagtctcgctctgtcacccaggctggagtgcagtggtgcaatctcagctcactgcaacctctgcttcccgggttcaatgagttctcatgcctcagcctcctgagtagctgggactaccggtgcacaccaccatgcctggataattttttttggtatttttagtagagacagagttttgccacattgcccaggctgatcttgaactcctggcctctagcaattcacccgccctagcctcctgatgtgctgggattacaggcctgagccaccatgcccggcctaaaaatttagataatttattggaatgttgtgtgccaatgaaaagcaaatcctaagctcctgcaacatcatctcatgtttaattgtcagggtttgtgggccctctgggtcaggggatgagcagtgaattggcagagaggggtgtagggagggtagagaaggagagcatttcaaaactaatgaggcttggaagggaaggaagaaaagaaacttaaaatgcagtttctgggcttggttgtaaaaatcttgaaagtgagggagataaaaatagttgcttgttaggacctggcaggcatgctctggaggctccctgtttgaattcagttgctaatcaggaggtgggaaacaacctctggttcctgctgttagcacctttcttgcagttggccttgtcaagaaggataatgggctggagctgagaaagaagcatcgtgctcactcgctaaactggagtggagaactattctctccttactgaatttcagggatttcagcctgccccaagtcaaatccttgttcccagaaataaagctcattacatctgtaatgtgaatgattccttccccggccacagctcaataagggctcttgtgaaactttggagtacaacttattatgggttgcctttagtcctgttgtctgggccctgattttttagatcctggagagaacgctccctcaggggtctgagttctaacccttggccctatcgttaactccctgtgccaccctaacaggtgacgccttcctattctaggcctcagtgtttctcatctgtgtgcaatggtttataatgcttacctcacagtgttactgtaaggattaaagaagatagtatatttgaactggggaggcggaggttgcagtgagctgagatcatgccactgcacgctagcctgggtgacagagtaagacttgtctcaaaaaaaaaaaaaaaagtatatttaaaaggcctgacatagcaggtgttccataaatcagagctgttgtaggatcttcttaggtctgctaggctcgcctgcacctctcattctcccacctagtctctcagctgcatcctggcttttttttcccaatgctcttggggaaggaaatttgggtgggggaaaagagcttacaggtaatggctaattgaagagttggggattttctcagaattttaattatctctgctacttaattagctccttgaggccatggatagctggaggtggctctgtagagggtgcgatttgactcatccaggtcagctccctttctctctgtttcttcatctttagtggggagagttattaaggctttgccaaggatactaagaagaggttgtttgaagcctaaagtcgccattttaaaaaatcttcatttgcctttttttaaaatcctttaactgttgcttatctacttttggattcagcctttgtcacagatgagcaagaatccagcttccctgtgtcactctgcttgcttctcagcagccccttgctccttccttccacctcttctctttcttttgggctccccacttcacccctccactgcctttctcttcccccaagccccaccgtcttccatcttgccttagggaattcagctgcttttaatattagcctaaaccaaacaaaatgaaggtattaggatatagtggaaacacatagaaggccgagattcaccttggttcatctacctgccgggggccttgtcagctactcaggctatcatctgatgggtggcacccatcccacctggttggaagaatttagaacgagtccacggggccttgaccacatcttcatctttgcccttacacgtgcacatgttcttgtcatttgttggattctgtctcccctgatggtgacaatccctgtgtcctttttactcttagctcagtgcagatactctgtgtttctagaataaataaatgactccctaaattgttttatccaaacaccttattttagaggggtagaaaatacttaatagttaaacttcaaaatgtgtgctcttgagggaaaaatcaggaggctttgaatagtgttattcctgggacagaaaatatcggagaagaacatactttctgagtttttcataaaacctccttgttcatttttgaggaaggaggggttacccatactcattgtcacagaagctgagcagaattggggttattagatctcagcctcctgtgggattcctagggaagcttatgagcctgggagcctactgggtggttgatgcttcctccagaatgtagcctggccagccagctgctggggaccctctcagcatcacctttcagttatcaaaggatcagaaagagaacgcaaggcccagaggtggcctcaggaagtagagaaggactgggcctgtgatttgaatgtttgagggctctgctaggagaatgtgagaggaagcccagttaatcctcccaggactccaggagcagggcattatcccaagttgggaaggggattcagaagaactaggcatctaggagtagaggtgacagggtgatttgaaaggaagactttttagatgcaaggaccagcacaagagaaggcgagactcttacacaggggcagttagagaggcaggccagccccaaccaggaagaagtggatgtggagacgtgttgtggtgtgaagttggagaggaaaggaagaaacagtggagggcatggaaaggcaggcagaggggctggggactgtgctctgaggcagagggcagccatggcaggctctgtgcaggggctgtcccgctggaggagtgctggtttctgtgtaggcggggggagggagaagatgctggagacaggaacagtgtgtgaagggcctggctattgtgggaagcaagtgtggggtgctgaggaagatcaagaaatgaattctctctggacttgtctgccatcatgtacctcttttctgtccccagagaagagctagacttgggtgtggcaggagcaggggcaagagggatgtcctagcctggcggctccagcagcatgctctggggttcagtgatctcatgtgcccaggtttccaggtggcttcttgtgaggccctccgggatctggctcccaggaccaatgtggtctagcagtgaaaagcccctcagaatttcccttctcctcctctccaaccccttccatctctgctgcctcctaggcagtgtttttccctggagcgggtgggagaagctggagctgacagccagggatggtggcaagctgtgttatgtaagtttgaaaaaaggaggcttgcttgccatgtgaatagagatcagatacaaggacagctagaggcagcacagccatgcctgagcagcagctgtagtctgaagagaggtgtctgagccagcagaggaagaagctgctggactgggtggaggagactgttcttgtggggaaggagaggtgtctggttctgtgaactgccgatcttggagggcagcctgtgaagcaatcattgtctattcctataacatggtgtgctgcttatatgccatgccttattacatcaatcctggtctgtaacttgtgatggtatgagagccgccattgtgactgtttcaatcatggcaaaccatggcccagaaaagtcaagtgacttgctcacggctgcatgtagagtaagtggcagggtcaggatttgacacagggcttctgtctcactagccagtgctgctcttttactctaaaacaggcttaacagatcatgcctaaacagcccatggggagagtgtgggccgggtgagggagcctggtgccgtgtggcctggcatggatgagaggcaatggcactgggtgggaggagtggaagagggcttgtgttggagccccttggtgtgccgccccagcaggcgctgtcacaccccttacccttctcagtctcgttccattttcagcatcattttccaaatcctgaacacctgacctccaggggccaggtacccaacaccggtcctctgaggggccatgggcatggtgggatgaggaggtacacctccaacaagcaactgctggactcatgcctcggctgaagtgtttgtgggctctgtcctaacactaggcccagggaaagaacagagctcgcccctctcctcccgaagttcagaatctccccatggttctctgagaggctgcatggctcgctccctctctctgttcacatcgttgctcaaatgtcctctcctcacagggccgttccttgccaccctgtcacaacagtacccccttactctctctgtcctcacagggttttattatatatatatataaaaatctgtgtatatatatttaacatatatatatatactatatatacctgtatatatatagtatatatatatgttatatatacacacatatatgttaaatatatatacacacatatatgttaaatatatatacacagatatgtgtgtgtatatatatatatacacacaggtatatatatatacacacaggtatatatatatacaggtatatatatatatatacaggtgtatatatagaggtatatatatatatattttttttttgagacaagagtgtcactctttgcccaggctggagtgcagtggcacgatctcggctcattgcaacttctacctcccgggttcaagcaattctcctgcctcagcctccctagtagctgggattacaggtgatgtgctaccatgcccagccaatttttgtatttttagtaaagacagggtttcaccatgctgacctcaaatgatctgcctacctcagcctcccaaagtgctggggttacagacgtgagccactgcgcctggctgggttttatatttttctttgtgccacttaagaccacctaatgttacatatttgttcattgatttgtctgtctcctcacaataaaatttaagcttcatgacagtgggggacttggtcagtttcttgactgcccacacagagcccacaggtaaggtagcaggtgttcagtggacagtaggtgatgaccgttagagcatggcagcagggtgggtagaagaggacaggtgtaagtgtcagagggcctgggatctgctttcagctttacccagtttttgctgtgtgactttgaacaagttgctggatctcttgggccttagccttctttttttttttttggagacagaggagtctcactctgtcacccaggctggggtgcagtggtgtgatcttggctcactgcaacctctgcttcccgggttcaaacgattctcctgcctcagccttctgagtagctggggattacaggcgtgtgccaccacacctggctaatttttgtatcttcactacagagaaggtttcaccatgttggccaggctggtcttgaactcctgacctctggtgatctgcccacctaggcctcccaaagtgctgggattacaggcgtgagccaccatatcctgctgggccttagactttttgttttcatcatgaaggggaggaactaggtgccctctaaggctgcttttggcacctctcttctgaaagtctatgtgtaggagacgagggtcgcagaggggtttgcaaagatttgtatcctgtgttcctttactgaagagcctgacttgggtctgcacactgtggggtaggggagtgacatgatgagggctgggtcttaggaggactacaccagtgatgcagtgtgtgcatgcatgtatccatggtgcatttagaaccattcattcaacaagggcttttggagcacctgccctctgtcagatacagtttgggctcagggcttagagtggtgaggcagacagccaacgtcctgccctcctgcagctgattggggcagagagaggctagagctggcctggaatggtgattacccccaggctgaagatgaagaggggccaagtggagttggggcactgggatattagagggtcatgatttttttttattatttttatttttatttatttttttgaggcagagtttcactcttgttgcccagactggagtgcaatggcgtggtctcagctcactgcaacctctgcctcccaggttcaagtgattctcctgcctcagcctcctgagtagctgggattacaagcatgcgccaccacgctaattttttatttttatttatttatttaataaatatattttttgagatggagtctggctctgtcacccaggctggagtgcaatggcatgatgtcggctcaccacaacctcctcctcccaggttcaagtgattcccctgcctcagcctcccaagtagatgggattacaggcgcccaccaccactcctggctaatttttgtatttttagtagagatgggagttacgccatgttggtcaggctggtctcaaactcctgacctcaggtgatcttcctgccttggcctcccaaagtgctgggattataggtgtgaggcatcgcccggcttttgtttttcaatttgtccttggaaagatacttaaatagacctgtttgaatctgtttaagaataaatagccagccatggtgactcacgcctatagtcccagctacttgggaggctgaagcaggtgtgttgcttcagcccaggagttcaactcagcctgggcaatgtagtgagactctgtgtctaaaaaaaaataataataaatgcattcatataacagtatcgaagagaaaaataatgaaacgttattagtggctctgctgggttgtattataggaggtttgggttttttctgtgattttctagatgtcctatatggtgtctatattatgactattaatatagacaccatataggtttgggatgtcatggtttagcatgtttcctagatatggtctgccctcaaagtgagtgtcattgtttgctgatgtctgctccacaaagccctgctccaggggccttcaccaagtcccagccttggtttgctcacctataaatgaggataattgaccctggtctatgcacattacaggacagttgtatgaatcagaggatacagcggaagaaaaaatgtttggaaatttaggtctctgcaaactaagggccaatgtactggtatttgtgacagtgaccggatgggtgggatggggtgataataagagtgcaaggaagggggatgggggcatcgttttgactctgaggagcagctttaaggcctctcacattccagctccaggtagcaaggggttccccttgactggcagggtagatgtacctgtgtaggctgttaggtgagtgactccagtggaatggaatggaatcatgactcagctcccaccctgccacacatatttgtaagaaaaagacccacatgctccatgcctggtgcagaagtctagaatgggaattcccgccaaaccctgtccccttctagcctgtgtagcctcagcaagcagataggtcttattacttgtttttttctgcctccttcatgatccagccatagatactatatcttaccagtaggggtggttgaagcaacagactttgaaatcctgactgttcatgataacggactccttcctgtggatcatctggccaagtctgcattcttagagagtggaaatcgactgtctttctgttctacttctacagcagctgctcatttcatctcctgacagttgcttcttgaactcagaacaaagggccttggtgtacagtgtttgcaagccaagggctgcctctgatggcggacgggggtgtggtcctgggactcgtggtcagggctggtctgtgtggaatgctgatccttctcttccccaatctacctgtgtcagttccctccttttctattttctcttccctgcagatgtcaagccctccaacatcctagtcaactcccgtggggagatcaagctctgtgactttggggtcagcgggcagctcatcgactccatggccaactccttcgtgggcacaaggtcctacatgtcggtatgaacagaagtttccattgcttgagcttcttgtacggtcagggagaggagcccagtgggtgcctttcctgtggagccagagtcttgtgctgggtaggggacaagaagtgagggaggaggcacagtgctctgccctgaggagatgaagttgaatgggaagatggtcttggtctttcttaggccttggagcataactgggatattggggccttgactcactgaaaggactgtccagctccagagtgtggctttctttctgaaggattgtgagctccagctcccctctgggcatctctacatgatagtcttcagatccacaaacccaggatgctcagatataatccaccccaaactacctcaccttctccttttctcttagcagtaaatagacagcatcatctccctggtttcccaaggtagaaacctgagcattggctcttaacctgccttctcagcagcccgtcctttcagtatcttgtagctcccaactcctgagagtctgttcagaattgtccagcctcttttctccctcctcactatgtctgtcagacatgtacccctccttctaactgcagcatacctggacccctcgccagagtctctgctccacttcagccaacaccctgtgttgagggtatttcctcctgctcctggctctgctggctcacactgtcaccagagcattgtgtggggccatcctcacactatggcagcaccagcgtgttttcttccctcctccataccaccggttccttggggacagggacaaggtgtctctcttgtccctagtgcctggcatggggcctggcatgtggtaggtgttcagggaatgcttggcaagtgggtagatgtttagttggctgagtgggagggtacatggataaaacatttctgagaatgatttggaaaggtggaaacgtgagtctgggccagtgctgaagtgcggcaaagtggaggagcgttggagtgagtaggcagtctttacagaagtggcggggagtgcaggcccgcgtggagagggggacaggcgcagaggctcagatcttaacttgtacaaagcattttatgtgttctctgtcaaagcacatgtcatgtccctggaaggtctcatttgatccatgtggttgtcccaggaaataaagattattgttcccattttagaggtgaggaagtctagattcagggaggttaagcaacctgcctacttaaccttgctgagccaggattgaaagctagctgcccccttgccaggcagacgccctttgcacagcacaccctcatttgcctcttggggaggatttggcacctgtgcccagatcccagtgtgaacacatcctcattccttcttgctggcacctaccccccactgtgactccagccactgtcaacatcactcacctggcactgacccacatccccacccctcccctccagtgacccacagtggaactctctttctctgtcatctcctcattgcttcttccctaaatgtctaataactgagcagctggcatcctgggccatttgactgccaactctcaagttcaaaatccattaacaggccctgggagttactaatcaagggtttaatggttggggtttttgtggttatatggtcagttacgaaatagtccagtgttggagttagtgaaaaatgctactggagaagttaatgtctacgtgaatatactatgggcagaataaagattttttcggtagggttcttgaaatacatgtgctatttcaaataatgctcattaaaaataatgcttttgtatagcactgtatactttttttctctttggcttttcccaccaatatcaaccaatatttgtattgcattttacaacatttgacatacattttctttttttttttttttttgagacggagtctcactgtgtcacccaggctggagtgcagtggtgcaatctcggcttactgcaagccctgcctcccaggttcactccattctcctgcctcatcctcccgagtagctggaactacaggcgtgtgccaccacgcccggctaatttttttgtatttttagtagagacggggtttcaccgtgttagccaggatggtctcgatctcctgaccttgtgatccacccacctcggcctcccaaagtgctggggttacaggcatgagccaccgcgcctggctgtacattttcatttgatttgatcttcttagtaatcctaagtagagttttcttatatcattgttactgtcattttcatcatcatcagccaccacccccccccacctttttttcttccgacatggagttttcgctcttcttgcccaggctggagtgcagtggtgcgatcttggctcactgcaacctctgcctcccgggttcaagtgattctcctgcctcagcctcccaagtagctgggattacaggcatgcaccaccatgtccagctaatttttgtatttttagtagagatggggtttcactatgttggccaggctggtctcgaactcctgatctcatgtgatccgcctgcctcagcctcccaaagtgctgggattacaggtgtgagccactgcgtcccggcccagcagcagccccattttatagatgaggctgatattcaggatcttttagcttgtaagtcccggaattgggatttaagtctcaggcccactgaccccagatcttttgttctatgtatccacggcaccacctcactcccaacccgcattccacaagcttcatgtttcagattcagtgacaagatgagcctctcatgctgggcttcggacaggctgccctgcgtgtgcaagactgtggccaagctgggtaaagctggaaccacaggctgtagtggcagccagggcacagctgattacatgtggtctgtcaatttaggccagattataggagaaatagagcagggatgaggggttaaagccacagaagccagctaggatttggtaaacacagtgttgggggtaggcaggaggccaaattcaagaggttagtggagctcttgaaacaggatatgaactattgagaagggacagaagagaaaatgcattagcagacccaggggtccaagttaggttaggtgattatcactgtctgtctctcctgcagccagaaagactccaggggactcattactctgtgcagtcagacatctggagcatgggactgtctctggtagagatggcggttgggaggtatcccatccctcctccagatgccaaggagctggagctgatgtttgggtgccaggtggaaggagatgcggctgagaccccacccaggccaaggacccccgggaggccccttagctgtgagtagcctggtgtgtccccatcttggactgttggaggggagggtcccttactttcaggggtttctggagggctgattctctgtacattctgccaagactgattctctgtccctggatgccaggctagggccaggggaagcagcaagggtctccaggtgggtgttgttactaccaacaacttcctaccatttgttgagtacgtactatgttctaggtactgcacttaggactttatacattatctaaccttttgtatttattatttttattattaagggtcttgctatgtcgcccagtgcagtggctagtcacagtcttcaactcctgggctcaagcagtcttcctccctcagcctccagagtagctgggactacaggttataatttatttgcgggggttgggagggaaggggctcactctgtcacccaggctggagtgcaatggcatgatcacagctcactgcagcctcaacctcccaggcccaagtgatcttcctacctcagcgtcctgagtagctgggaccacagtcacatgccaccatgctcagctaggttgttgtttattttgtagagatatagtctccttatgttgctcaggttagtcttgaacttttgggctcaagcaatcctcccgcctcagcctcccaaaatgctgagattacaggcatgatccaccatgactggcttctaatttgtgggttttttttgttttgttttgtttttgatactgggtcttgctctgtcacccagggtggagtacagtggcgccatcatggcttactgcagccttgacctcttgggctcaagtgatcctcctgcctcagcctcctgagtagctgagaccacaggcatgcgccaccatgcctgactaatttttttaatttttttgtatagatgaggtctcactatgttgactaggctggtctggaactcctgggctcaagtgatcctcctgccttggcctcccaaagtggtgggattataggcatgagccactgcattctaattttttaatcatgacttttggtagatttattttttattgagatatagaattcacataagacaaaattcacattttaaagcatgtagttcagtggtttttagtgtattgttccatgttgtgcagccatcaccactgtcttattctggaacattttcattaccccagcaagaaaccccatcccccactcccccctgcctgatccactgacaaccactaatctactttctgtgtccacggatttgcctagcattatataattttaatagcatttcatttgtgatcacgactataatctgaattttaaagatgaggaaactgaggcacagtgcacttgtcaaggccacataggcttgcaagtagccaagtctgactcccaagatgataaacactgtgcagtaccacctgcctctctgaatgtgaatactgggaagtaaacctggtactcagggaatagcctgacctagccaactgttttttatgtagctcctgtctggccagggatacctgccctgtacctccatgaggtccacatgagagagagcttgtataaaggggaaagcagagggggctagaggtagctgatggcaggtcattggaggggctggtggctgtggcctctgaggctcgccagtgactctaggagacaaaaggaagaaacgcaacttcatggagaattaaaactaagtcctttagttatttagttgctatctcatttgtgcctctctcaatagaaggaagggggaaaggacagacataattattatgtctctgctttacaaaactcagaactttgtttggctcagcagtgaactgatttgccaaaggttacgaacttaagatgtggcagagcccagacttgtaccctggcctttgctggtcccctctgtgttcaagccttatctgtggctgtttaatgtttattgtccatgaccctgttctggtcccagggatccatgcccaaccccttgcctcatattaacaagtaatctgtttctgagaagtattttttctttttataaaatttgtagcatacggaatggacagccgacctcccatggcaatttttgagttgttggattacatagtcaacgaggtaagtactgcctggtttccttcaccttggaatttacttgctcatcttaagaaaacacccaggtggccgggtgcagtggttcacgcctgtaatcccagcagtttgggaggctgaggcgggtggatcacacgaggtgaggagttcgagaccagcctggccaacaaggcaaaaccccatctctactaaaaatacaaaaattagctgggcatggtggtgcacgtctgtagtcccagctactcgggaggctgaggcatgagaattgcttgaacctgggaggcggaggttgactctgggaaaaacaaaacaaaacaaaaaaacaaaaaaacacatcgctgtcacaggttcagtctactagggagtttaatttaacctctctttactgtatgcacagctttatactaagcaccatgggctgtagaaaagcagtttcaggattagttcgtcgctgcttaaggatttgagggaggcagagcatgttgcatttgtaggagtcagaaaaaaagccatccatcctctactgctggggacctaggctaggtggttctgggtggtagtcatattaagggaagggatatctgaggttagatacgccattgcgtctcctagtgtgcactgctttcttccaaattttcacattaatttcccatgcaattctcccaagcattgctgaggtaggccaaattggttcctcttcaaacaggtgaggaaattgagcctccgagatgaaaagtagcccaggtccttcccacccagtgctctttcttccttgccacctcccacctcccattcttacctcctaggaggcttggctgcatggcagttgttctactgcagcctctgctggcacacagcccctctgctgcctagctctttcctgttcagaaggaatggatgctgcctctggaggccaagctgctggtctcctctcttccttgaatggtcccttgattccctcagcagtggggacagtctgcagaatggggcttgctctgggtcactgttctaagagctgagttctagtcctcacctaagatcagactgacatggccctcaaaggaagagcactaggttgggctttgtggtggggatcagtgtctcatttttagtcccaaattaaaaacgagattttgggctgtacatcagagcagtgacatcatggacattatgtctgtgggtcagcatgggtacacacagctcccagcccaggtacataagtgggcccacatttcctggactgcatggaacgccatgagcccagtgctccagagccttgtactgtatagtgctgcatgatcaccatgggaaaatctgaaaacagcctcatttctggaatgtacaggtaacattcttccagatccagccctctgtcagttaatgttttattaacttttcactgcttctctagggctcagaaaagggatttttaaaaaccggtttgcttctgcaggtgctgtcagacctgggctatgcctggtggtttgcacgtgcccctagctgttgctgccagtaaattgctggttacgttcccatgccgcactccaagatttaccattgtagagtgtcagagcttgaaagggtccctgagatcattaggcccaacctcttcatgtcatagaagagtaaactgaggctcatagaggaatagtgattagttcaaaatcacccgacaagtgagtggacttgacttggtcccaattctaaatgtgctatttgagatcagtggttccaacatggttacccaacaggcagcactggccttctacctgtgcctttccttgactggatgagagtagtactgcctttggactgcagagaagactttaaaaaaaagtagcactggctggtgggaggggtgggatggggagaggagatggctggagcaaggagccaggcatttttcttatctcaacatgtgtttgcagcctcctccaaaactgcccagtggagtgttcagtctggaatttcaagattttgtgaataaatggtaagttggctccttgttctctggaagcgtatactctggatttgtcaggctccccaccccatttctggaagcaccagcattgcttctgcaggcagagttttgccctttaccctcccgtctgatgattcttggctgctgccataagcccttttttagagtgccaagacttatgtggcatgtctaactacatcatggatgtagtagctgctccttttggtacttgctctccagggattggcacgttgctttttgaccttagtttaactcagcaagaatgtattaacttactgtgggcatgatactgtgcttagaacaggaggatgaatcaagcccaggcaatcctcggcctctagtgtgcagagaagacaggcatgcaaacatgttatttgagctagaaccagtgccaggcaacagctcttaccttgtctttcttcctttaagcttaataaaaaaccccgcagagagagcagatttgaagcaactcatggtgagtctatttattccggattcttacagtacctgtttattcatttgttcttctctgtcagtcatctgtgcagtacttccagagcccattcattccctgcccactgtggtccagctgagcctggggctgcagaataccaaacaccagtctcctttgctctcccatcagtttaagggaaagctggggtgacccccgcagcctgagtaagcatatgccagaggaaatgcctgagggggccatgggaaagaaaaggccagcccacccccttcatggggatgcggcctttccctaatactgactgcctcatcttacattcagcctccttccagagtcactctccgcctgctgtctcgtttggtggcagtggaaatagctaagtaatactgtaaatatctggacagccatagacggtgtatatagtatataatatgcactaagtccatcattttctttgtcccttctaacaagcctgtgaggcatttaaggcagagttactgtctccatactgcacgagtaggctccaagaggtgacttgcccaaggcctcacagctgctgtgactggtggagcaggtctttgggcctgcagctggccccactgttgctcaggggcaggtgccaggtgctctttccaagtgcagcacaagctctagacctgaaactcttggattttccttcctggtgggttttgtttttttgtttctttttaacaccacgtcctctcgtttccttacatgcaggttcatgcttttatcaagagatctgatgctgaggaagtggattttgcaggttggctctgctccaccatcggccttaaccagcccagcacaccaacccatgctgctggcgtctaagtgtttgggaagcaacaaagagcgagtcccctgcccggtggtttgccatgtcgcttttgggcctccttcccatgcctgtctctgttcagatgtgcatttcacctgtgacaaaggatgaagaacacagcatgtgccaagattctactcttgtcatttttaatattactgtctttattcttattactattattgttcccctaagtggattggctttgtgcttggggctatttgtgtgtatgctgatgatcaaaacctgtgccaggctgaattacagtgaaattttggtgaatgtgggtagtcattcttacaattgcactgctgttcctgctccatgactggctgtctgcctgtattttcgggattctttgacatttggtggtactttattcttgctgggcatactttctctctaggagggagccttgtgagatccttcacaggcagtgcatgtgaagcatgctttgctgctatgaaaatgagcatcagagagtgtacatcatgttattttattattattatttgcttttcatgtagaactcagcagttgacatccaaatctagccagagcccttcactgccatgatagctggggcttcaccagtctgtctactgtggtgatctgtagacttctggttgtatttctatatttattttcagtatactgtgtgggatacttagtggtatgtctctttaagttttgattaatgtttcttaaatggaattattttgaatgtcacaaattgatcaagatattaaaatgtcggatttatctttccccatatccaagtaccaatgctgttgtaaacaacgtgtatagtgcctaaaattgtatgaaaatccttttaaccattttaacctagatgtttaacaaatctaatctcttattctaataaatatactatgaaataaaaaaaaaaggatgaaagcta

SEQ ID NO: 54 - DNA, 102651 bp, Pan troglodytes
  misc_feature (10892)..(11259): n is a, c, g, or t
  misc_feature (31852)..(32175): n is a, c, g, or t
  misc_feature (52822)..(53038): n is a, c, g, or t
  misc_feature (67995)..(68720): n is a, c, g, or t
  misc_feature (75089)..(75901): n is a, c, g, or t
  misc_feature (95360)..(95974): n is a, c, g, or t
cgggtccaaaatgcccaagaagaagccgacgcccatccagctgaacccggcccccgacggctctgcagttaacgggaccagctctgcggagtaagtatggggcgggcggtgaacctcggggcccggctggggaggcccgagccggggagcaggagcgcgcgccaggctccgatctggtttgtcacgtacgtctggggctggcagggggcgagaaactcccggccgccgaggtatcggtgactaagcactgattgtgctcctgactcagaccagttagcggatcccgcgggtctccattcctctctgtaccccttttaccgaccgttttagtggttcctggccactgtacagtcttctcccaagaaaataaaagctagcacgtctcccctgcctcctcccagttctgttctaaatgtgatcatctgggagtctggcctgtaacggggagaggaggctaatgttttggaaagaattaagatcgcatctgtgcttttgagaccagctcaggatattaagtgtggagcgtcatcctcaccttcatgcctgacacctgtggggcctgagtgccttgttgcaggccaactgcctggccagcgggggcgtactggaagtccgtgtggacttcgtggcttttccttgctgactttggaggttcccggtacttggccttcctgggaaattgctcaagaaagcggctttcttcttcatcctactcttcattcattgaacaaaccattttctcactaatgatttcctagctttccgtacttcaccaggagcccctaaactcctgacctgaggcatgaacaccatgacctagaaaccacatgctaggtgctccatctctgcagcttccagcgttgcttacaaacgagcactttatttcattaaataatcatgagtctgtttcctgggggtttctgagctcccacaactctcttgggttctaggtaagggacaagactaaatgagggaaagctgcttagctagctagagaaataggcagaaaagattaggttattattattatgttttttgcctttttttggttgtttgcccaacgttcagtaaggattgggttcttaatcttttacctgcacactgcagactttaggaagctaattgatgaaatcagagtaggcttggaccttctgctctttggtgatttctgtaacctcccttcctctctctagatttttagaaaattttattttttaaacttttatacagatggggtcttgctatatggcttaggctggtcttgaactcctggactctagcgatcctcccaaagttctgggattacaggcatgagccactatgcccagccaactttctctagattttaataacccggggacctgttggcttgatgacttgttccatccctgtaatgatcacaaggtcgatggtggacctgtggtgtgtgttcagctgtgtttttcagacctgctcccaacagactctcttctttagtcccctctcaatcctgtggggtctattttgcataatactgacttgtataggtagttagattgcattattgcattgcaaacatttgttcttttttttttgagtcggagtttcactcttgttgcccaggctggagtgcaatggtgcgatcttggctaactgcagcctctgcctcccgggttcaagcgactctcctgcctcagcctcccgagtagctgggattacaagcatgagccaccatgcccggctaattttgtatttttagtagagatggggtttctccaagttgttcaggctggtggcaaactcccatcctcaggtgatccgcctgcctcggcctccgaagatgctgggattacaggcatgagccactgtgcccagcccatttgttcagttttagtgtacagtgagtgtttcaccctcttaaaatagactgaaagtcatgactgttgttaggacaagttttgaccacagtggattctggctgaatgttgtggcctcattatcctttcctatttgatttggaagtggatactgagtagaattacctgttatcattctgttgtaatcgtgataccacaactgtattctctcaaggaggaggaatttcattaaaacagtaaaagcaggatgagaagaaactaccccagatttggtggcagaaaaatttggatggtactgggagagtctaaacagtggttaaaaggtaagggctctggagtcaggctaagtttgaagcctagctctgttgtggtttttttttttttttttttttgacagagtctcgctctgttgcccaggccagagtgcagtggtgcgatctcggctcaccgcaacctccacctcccggcttcaagcgattctcctgcctcagcctcctgactagctgagactacaggcacgtgccaccgtgcctggctaatttttgtattttaatagagacagggttttaccatgttggtcaggctggtctcaaactcctgacctcgtgatcctcccacctcagcctcctaaagtgctgggattacagcccggcctctgttgtggttttgtgacctggttcaagtcttttagtttaaggcttaggtttagtttttttcatctgcaaaaatggggctaatgatagaacctacttagcatagttgtgaagattaaatgaggtagtacatagtaaacttccaaagctgttggctgctggtgcctttgttactgcttaagtgttggactgaaggaaactggaaggtgattttcattcatggtggtagattatgtgttaaggtgcctttgcttctggacaatcaactctccctagtttggttttttgtaccatctgcatctacctctatgactcattgctgtgttacaataggaggcatctttgtgtaggctgcccaagacaaacagggactgtttccctgtgtttcgtagcactaatgagagggaaagctgtacacatcttcatctttcacttctgagagtgttcctcaagcaaaatgttccctatcttgggctaccagcagaaagaattctgttgctttcatgatttctgtgattagaccagggcacaattttgaacgttatcagacaatgtgaactaaagaggaagaaaatccattttgacagtaaagaactcttggtaccaaattggcaaggttgcttttcccttggcacctgtgcttacctctaacatagcccttacccagttcagagatggagttgggtaatacgggacctgaagttgatgcaagttgtaggggtacccaaagaaaaatcatgcaaaaatagctttcttttgtgtattttgcagaaagatgtgagcatattactagggtcttaagtgttagaatgagataatattgttcctctgtttaaaatgttcttctggttctattgcagttacacaaaatccaaactccttatattggactatgagactgagtgatctgcctgttgtccccaccaccccctcccaccaatctctttaaccacatttcctgccactcctttcttccaccacactagtcctctttcacttcctctatgggatggtctatacgcactgcaggcctctgtacatgctgttccctttgcctggaatgaatcactcctccttccctaggtaggcaggaagcagtcttcacctatttgcctaaatgtcacttcctctgagatgtttataagcatctcagaggaatgtggtccctctttgtcatgtcacctgagctgctgctttttttttttttttttttttggtacgggggtcttggtatgttgcccaggctggttcttgaactcctggactccagtgattctcccacctcagcctcttgagtagctgggactataggtgggtactactgtgcctggcgctcacctgagcttttaataagacttaatcattgtaatttttcattggggtgttcttaatatttatctctcctgtacactataaactttaagcacagcactgcctttttgttttttgagacggagtctcgctctgtcgcccaggctggagtgcagtggcacaacctcggctcactgcaagctctgcctcccaggttcatgccattctcctgcctcagcctcccaagtagctgggactacaggcgcccaccaccgcgtccagctaattttttgtatttttagtagagatggggtttcaccatgttagccaggatggtctcgatctcctgacctcgtgatcctcccgctgggattacaggcgtgagccactgcgcccagcctgcactgcctttttttgactcaccactctgtaagtacacccaaaatagttctggcacataataggtccattgatgtttgttgaatcagtgagtgaatgaaatttctaatatttgcacaacgggtttaataaaacttttgatgtcttttccttttcttttcccctttatgctcattccttttttccccatttcgttttgttttagtcacccactcaaccattctaagatatttgtatggttttataattccacctgttagtctggttatgtgtatacccttgggaagtagaaggatggttttgtatgtatctgcttaggattctaaaatgttattgtgctacaaatctgcatttcatagacaggatagaataggttatgttgaggtaacaaccacaaaatctcagtaatttaacacactttcaggtcagtgggaggctctgtagattggagtcctttagggatccaggctgatcgaggcatcgtctatgaagtatacctacatgaggagggaatcttgtgaagagccacattcaggctcttaaagttttgcctagaagtgagccttgtcattttcgctgccatttctttggccagagcaaatcatgtggccatgttgaccttcaaggagggcagtgacctttttggaagggggagaaccacgagtatttgtgtttttttggtttgttttttgtttttttttaagaaagggtttcgctcccactgcccaggctggagtataatggtgtgtgccaccacgccctgctaagttttgattgttttgtagagatgggatttcaccatgttgctcaggctggtcttgaactcttgggctcaagtgatctgcccacctcatcctcccaaagtgctgaaattataggtatgagccactgtgctggtgcaccaggagtatttgaacagaagcaatgaccatctctaaattttatatcagtttcttctttgttttcttttgttttcttttttttttttttttttgagatggagttttgctcttgttgcccaggctggagtgcaatggcatgatctcggctcaccgcaacctccgtcccctaggttcaagctattctcctgcctcagcctcctgagtagctgggattacaggcatgtgccaccgtgcctggctaattttgtatttttagtagagacagggtttcaccatgttagtcaggctggtctcgaactcctgacctcagatgatccgcctgcctcagcctcccaaagtgttgggattacaggcgtgagccaccgcgcctggccttagtttctttttttaaccaattttgttttgagctctattcatgatgctatacaatatgtatctagttcattatttctcttggttgtagggcagtcatgtttgcctgccacattttacttatttatttctctagaattagacatctttgttgtttcccaaccccttgctgcctcaaacagtcatgaccatgcccatccttgcacatccttgtctcctttggatgttgtgagagagtttcctgtggaatgtactcagaagtggaattgctgggtcttagggtacattgcctctccttccaggataaggcatgttatctctctctctctctctttttttttttttttttttgagaccgagtctcactctgttgcccaggctggagtgcagtgttgcaatcctggctcactgcaacccctccccacaaggttcaagcgattctcctgccttagcctcctgagtagctgggattacaggtgcctgacaccatgcccagctaatttttatatttttagtagaggcagggtttcattatattgctcaggctggtctccaagtcctgaccttgtgatctgccctccttggcctcccaaagtgctgggattacaggtgtgaaccaccacaccggctattaatctctttctttaaaacaataccgttaatccatttgcagtagtgaggcagggtacctctcaagatctcactttttctttgaccttgggcaagtcctttctactttctgactcttggtttccttatctgtaaagtggaggtgataattgtttacaaaatctttaccatggtggcctacaaggccctacatgaccaggtccttagttttcttccagtgtcctcttcactcatgcactctagccacactgtcctttgtgctgttgggttgtaggttgggcacattcttatcttagaatctttgcatttgccattcctgctgcctggaaagtttgtctctcaaataccgtatgacttgcttcctcacttccttcacccctctgttgaaatgtctcttcacagaggccatcttcgatcactctaatacagaactccctgtcattttctaccctttgattttgccttacttttctttgtagccctgatcactaactgatgttgcatcgtatataagtatttatcttcttctgccaccccaagtgtaagcttcatgatggttggggctttgccttgttcattgctcagtgtgtagaacagattctggcacatagaaaatactcagtagatacctgttgattaaatgattgactagatcctacctcagaggaatacctttgaagatgtataaaatttctttgaaggctataaggtgccgaataaccttaggagggttcactgcttggccttagtagcgttcatgattttggattttgaattgtttctatgtaaccctgaaacactcagacttacttattgcattcagggtgtagttcatagcatcagcagttctgccaggtttgtaaggaacacacatctgttggagtgtgaaggccctggaggaagaaaggttgagacaggttgatgtgcttttttttgtctcttatggctctttctgagatgtgtagcatgataaccaggaacttttttttttttttttgagagacagggtcttgctcagacactcaggctggagtgcattggtgcttactataaccttgaactcctgggttcagggaatcctcctgcttcagcctcctaagtagctagtactaccggcatgtaccaccatgcctggctaattttaaaatttagagatagggtcttgctatattgcccaggctggactcaaactccttgcctcatgcaatcctccctccttggcctcccaaaagtgctgggtttacaggcatgagccaccatgtctggcctgataagtaggagcttttgaagtggtttcacactgattttgtagttttgaacttggatgcttctttttggtagttgatgcagtaactaatactggtgctgtctttcagaacagcttcatgtgaaaaaggcctgcttaagcctgtgtctttgggaagaacatctctgctgctgttacagcagatacagtaatagcaaagaaagtcttaaagatgatttagcccatggcaaggaaatatatgggactcttgtttgaatataaacactcacagaattccagtttcacttatttatgcacctttcaaagaaaggaagaagatactgtggtagagtacagtagtcctcccttatctgagtggcatatgttccaagacccctaatggatgcctgaaaccacagttatcaatagtaccaaaccctgcatatactgtgttttttcctatgcagtatatgcctatgatgaagtttaatttataaattaggcatagtaagagattaacaataataaccaataaaaaagaattataacaatatattgtaatgacagttacatgaatgtggttactgtacttactgtgggtaactggaattgtcaaagcaaaactacatttaagtgggtactcctgtagctgttggccctgccttgcctatctagcttaattttcctctgtttttcggttcacctgctgtggtccacttaccactttctttactctcctcactgtgccgccagcatactgtttcttaccttcttacatctgtctggtcttgctgacatggttttttttttttgtctgaaatgccctcctccactttcttgcatgatttttttttttttttttttttttttgagatggagtctcactctgtcgcccaggctggagtgtgcagtcacatgatcttggcctcactgcaacctctgcccactgggctcaagtgagtatcgtgcctcagcctcccgagtagctgggattacaggcacacaccaccacgccgggctaatttttgtacttttagtagagacggcgtctcaccatgttgcccagcctggtctcgaacccctgacctcaggtgatccactgcctcagcctcccaaactgctgggattacaggcgcctggccctcttgcatgtttttatttttgttttatacttgccactacactttagcttctgtgaaaacagggactgtgattgtcttgtgtactggtatttctccaccgtctgctgtggtgcctagaataaaataaatggtacccatcttttttgttttgttttgtttttggagatgagtctcactctgtccccaggctggagtgcagtggcgcggtctcgcctcagtgcaacctatgcctcccgggttcaagcgattctcctgcctcagcctcccaagtagctgggctgcaggtatgcgccaccacatctggctaatttttgtatttttagtacaaaatttaaaaatgatggcctcgatgtcgtgatctgccctcctcggcctcccaaagtgctgggattacaggtgtgagtcaccgtgcccggcccttttgtttttttgagatggagtttcactcttgtcatccaggctggagtgcagtggcatgatcttggctcacgaccacctccgcctcccgcattttcctgcctcggcctcccaagtagctatgataacaggcacacaccaccatgcctggctaattttttatttttagtagagacaggatttcaccatgttggtcaggctggtctcgaactcctgacctcaggtgatatgcctgcctcagccccacaaagtgctgggattacaggcgtgagacaccgtatctgccccggatagtactgatctttcaagatcttacataaagcttatctccaatgtgtgtagtcttttctgagcaactctgtgccatgctcagttacatcactccctacttagttataatagttctttttttctttttttgagacagagttttgctcttgttgcccaagctggagtgcaatggcgtgatctcggctcactgcaacctctgcctcctgggttcaagcgattctcctgcctcagcctcccaagtagctatgattataggcgcacaccaccactcctagctaatttttgtatttttagtagaggcagggtttcactatgttggccaggctggtcttgaactcctgacctcagttgatctgcccacctcggcctcccaaagtgctgggattacaggcatgagctaccatgcctggcctgtaacacttctttttttttttttttttgagatggagtcttgctctgtcgcccaggctggagtgcagtggcacaatctcggctcactgcaagctccgcctcctgggttcacgccattctcctgcctcagcttcctgagtagctgggactacaggcgcctgccaccacgcccggctaattttttgtatttttagtagagacagggtttcaccgtgttagccaggatggtctcgatctcctgatctcgtgatccgcctgcctcggcctcccaaagtgctgggattacaggcgtgagccacggcgcccggcctgtaacacttcttaatggtgtgacctcggtcatatcacttaacctcactgagcatagttttcctcattagtagagtaaggctggtaataagaaactcatgagggaagtagggtgggagagcatcatccaaaataatatacacggaagcactttatggggaggcaagagtgggaaaagaaaaaagcactttatgatcactggaatgctatgcaaatgggatgtgttaatgatgccagcttttgatttcttccttcttagaaggctgaatggttccttttgttcttaatagcaaattgtaaatgttgatagatcatgttgatttagatatttcatatgctgcttgtccttcaaatctagcccaaacctacatctaatcaagcctttagacctaacttcctgtttatagcaaatacggggatagaggaatgagttaatggcaccaaagggaaacaatcagacaaacctaggatgtggaacattctctaagacaactgacctagtctcttaaaaagtcagtataggccatttgcggtggctcacgcctgtaatcccagcactttgggaggccgaggcgtgcagatcacgagctcaggagttcgagaccagcctggccaacatagtgaaaccccgtctctactaaaaatacaaaaattagccaggtgtggtggcacgtgcctgtagtcctagctacttgggaggctgaggtgggagaattgcttaaatccaggaggcggaggttgcagtgagccaagagcatgccgtggcactccagcctgggtgacagagtgagattccatctaaaaaaaaaaaagtcagtataagggtgggcatggtggcacacacctgtaatcccagcacttgggcacttggggaaaactgccaagtcaggaggattgcttggacccagaaccttaaaaccaacccgggcaacatggtgagaacttgtctctannnnnnnnnnnnnnnnnnnnnnnnnnnnnnnnnnnnnnnnnnnnnnnnnnnnnnnnnnnnnnnnnnnnnnnnnnnnnnnnnnnnnnnnnnnnnnnnnnnnnnnnnnnnnnnnnnnnnnnnnnnnnnnnnnnnnnnnnnnnnnnnnnnnnnnnnnnnnnnnnnnnnnnnnnnnnnnnnnnnnnnnnnnnnnnnnnnnnnnnnnnnnnnnnnnnnnnnnnnnnnnnnnnnnnnnnnnnnnnnnnnnnnnnnnnnnnnnnnnnnnnnnnnnnnnnnnnnnnnnnnnnnnnnnnnnnnnnnnnnnnnnnnnnnnnnnnnnnnnnnnnnnnnnnnnnnnnnnnnnnnnnnnnnnnnnnnnnnnnnnnnnnnnntggtcgagtgagatcatctataaaaaaagtcagtataagggtgggcatggtggcacacacctgtaatcccagcacttgggcacttggggagacctgccaagtcaggaggattgatactttcccacagaggagagacccccccggccacaggctgagccctgtctcaataaaatctaaaaatttcccacatgtggtgggcgtggtggagtgccagctacttggcaggccaggcgggaggatgttttgagcccagcggcgagattgcactgagcggtaatcgtgccaatgcactctagcctgggtgagacagtgggaccctgtctccaaagaaaaggggatatcaagggaaaaaagggagagtggtgctgtttttggataggagactaaggagatatacagatcaaatgtactgcatgggttgggcacggtggctcacgcctgtaatttcagccctttgggaggctggggcaggaggatcacttgagcttgggaggtccaagctgcagttagctatgattgtaccactgcacaccagcctgggtgacagagtgagaccctgtctcaaaaacaaaacagaaaaacaaatgtactgcatgaatcccaattgtgtactggatcaaaaaatagttataaaatgcattgttgagacaggtggggaaatgtgagtagagtattgctaattttttttttttttttttttttttgagacagtctcactcttgtcgtccaggctggagtttagttagagtttctcttttattctttcaatttttctgtatgtttgaaaaaaatttgtaatacatttaaaaagtaccccaaaagcaaaactcattccaagtcttatgtactttaatgtcaactaatatttgctctttcccatccctagattcctttgtgctgcttgtctacattgtatgataaacatcacattaaatgcaatctctcccctcccaccccccccttttttttttgagataggatctcgcttgctgtgttgcccaggctgcagcgcagtggtgtgatcatggctcactgcagcctcaccctctgggctcaagtgatccctccccagagcctccgcttcccagtacccgggactataggcacgtgccaatacacccagctatttttttttcactctcgcccaggctggagtgcagtggcacgatctcatgtcactgcaacctccacctcccgggttcaagtgatcctcctgcctcagcctcctgagtagctgggactacaggcatgtgccatcgtgcccgggtaatttttgtatttttagtagagatggggtttcaccttgttggccaggctggtctggaactcttgacctcgtgatccgcccacctcagcctcccaaagtgctgggattgcaggtgtaagccaccatgcctggctatcgcccagctgtttttgtatttaattttagattcagggggtatatgtgcaggtttgagcatgatgctgaggttttggcttcttgcataagtactttattatattactatataatttttattcactaaatctactttatgaatcttttattaggaaacatactttttttgtgtacaatgtacaattgaatgtacagcattgctgattcgatatatcattattggtagatttgagaacaccaaaatacgtttaaacaaacaaactagcaaaaaaaaaccttttctgctggcttttcttttcttttttttttaagacaggttctcactctgttgcccaggctggtctcaaactctttggctcaagcgatccacctggctcaacctcccaaagtgctgggattacaggtgtaagccactgtgcccagacactttctctttttttcttaactccctctttttttcttaactccctctttggaactttttgctagcatttctctgtgtggatattccaccacatccccctgaagtatgagtcaagcagtggtgaatctttctgacacattgagaaagcaaatccagagaacacagagactaggaacaaaatgaggcaaacctgagaagaaagcttagggttccagctttgtttctattgttcacttccagaaactgccaattttgaaaaatcgtcctggtctcttgctgcaacttgattgtgtttttacttcatgtcctgtgcccttgttgctcagaatcccaagagagctgtttagaggctcagttacatgtttgctaagttttcgtcttctcctcccaagatgaatagtgttttgttttgaaatagcaggtgttttctgaatcccatgaagggccaaaagctaaaagtgctgatcctgactctgatttcgctgcgtaactcccaggggcatcctgctctgatgtcaggaagggagtcaggttaagaagaggttacctggaggttgaagagaaaatggacaaggtagaaagaccttgagcccctccctttgaatagttgcctgcttaaggacaatgctttaaaatttttgaatgtatgaataccttctaaagaaaaaacctatagacatcacattctccagtttaactttgtttattccattatatatgtttttggatagtcgagatcagttgattttttcctgatttttacacatggacataatcctcatccttgtcatttttattggctgaagagtagagtttgataggatctggctaagcaaatgacactttgttgattattaggtggcttccagattcttattatttaatgataggcttgtaaatgtttttgagtccatttattttgttttgcttttagatgaattcatctaccaaatcagaggcaatggaccatgctaccgctgttgttacatattaacagaatatgttccaaaaaaagattgaaccaatttacaatgtatatttcaactgtttcctcaagcctcagaacttttttttttcagtttagtggtttttgatagtttaataggcagtttaagggctcctttaaaggtcaacttgcttccctttaattgttgtatttttgaattgcatcaattcagtttaaactcatatttattgaatgcttactgaatgtaaatcactattctgggagctgcaggtaggtgactcaagatgagtaacattatctcagccttcaaggatcttaaaatctaatatgagagtgtagggggagattttaggagcacaagaaggaggaaacaatggctgcagagtaagaaaagtgccacagaaaagctacaaagcaagcactgttggagcttggcctgaggagggagtgtgcgcatccaggaggggagatgaagagagccttcatggaggagatgacagttgaactgggtcttgaaggatggctaggattccatgggaatgggggggcgtggcaggaagagagcacgggatgagcaacttcacacaagtgggaaagcctgggatgtgtagagaagccagcaagtagttgagtgtgacgggtgcgtcggttcgggtcgaaggaaatgaagctggagaggtaggctgaggtggttttgtggttccaggctgaacattttgaaaaatcacatgcaaatttttcttcctttctgatcattttaaagtatttctgagtagtttttatatgctttgtattttgaagttttataaatgatgtggttactacattgttccattgtgtgtaatgtattaagaaaaaatatttcatttttaaatattcaaaagcgtgttttttgactgggcattatgtatagcatacttttcattagcagtttaacatctgtcatctctccacaactagcaggaatatgtggcttcattttcttctaacctttttttcccccttttgtgattaactctttttcccatgtggaattaatatgcttggtatgaggtgtatgtctaagttaatttttctccacagtgaagtctagtatcttactggagtttactaaacatgatgcatttatccatctgttgtattttcaggtttaccttggtctttatgatatttttatctactaaaacttttaacccactcttacgtagttttgagagtcatatatattttttaatttggtggggttaaggaaaacttcagcaattttcgtggggtatctttccatttgttcatgtgttcctctttctcattttagggtattatagtttcttctcaataattctcttgcgtcctgagttaatatttcaaatacgtaacattttgatgctgttgttattgaatatttttaagtttgtattttccatctcgactatggtttgttttgtatgaactggttatatccagcagctttgttaaatccacttactctatctagtaacgttttttgattgaatatatatgcatttgtagatttactagtgtcatctgcaaaacaactttttcttttcaatgtgatagatattttatagctgtctcatcttgcgttgctctcagtagcagttcttgtgtctcagggaacactattaagtgtaacgaggtttctcaaggacctcctgggccagggacttttctgttctttccaaggagctgtgaaaaaaggaagcagctgcccagatttatagaagcagagcttattagggctggatgggacctaacaggttctctagacctgggccttcatttgagagatgaggaaaccagacctagagaggtgtgaatttgccagagttcacactgctgcagtggaaggaggtggttgagcttttactcttatttttttttatggtacatattacatacagtacatgttttcatttgggaaagttacttggtttgacagttttccaagtttacccaacattaaattttggtaactatgcaatatccttaaaaaaattattttcaagtaattatctgaagctctagaaaaggttacccctctatatcctcactctcctaggtggttgagggaaaagagaataaagaaaagttgtggggttggggctgggacagggaggaaagggtattttagtccttgatccttagtaggagggcctatttttaagcttcataatgtcagttttaaaagcagtggttttcaaaataaccgcagacgaaagtccccttgaaatggatgcctttctggaattgacctattttgagtttagctgttaccagaagggttcagaatctcgaatgctcttaaatgcatttacttttcagacaaagtggaaattgagtgcataatccacatgggttccagattcaggttaaatttagaaatttggggagttgtggagagaagacatgaaatgagtcaatcattgttgttttacaggtttgtctgaatccaggttaattatgtttccttctttattgaattataatttgtatatccaggttagttttacaaattagatcagaccctcagtccatttgagagtagactcagagtcagaattatttgccccctttgctgctttcataccaccctttagtaaacagtcctcaagaatgtccttatgtcggggagggcagacctcagaagttagcaagaattccaagctcactgtaaaccttttgtttaatggtttactcaaatccagatagaaattctaccaaaatgccagcctgtatttcagctcctctttcttggagtctttaggatggtgggaaaacaggcagaagtgagctgtttaacattccaataattattaataatagaaaatgtatcctgctaatcaggcactcatttgcatccactgataaaactaggtcattggagccaaggaaaggtaccgttcactaaaggaaagaccagtagatagtcaggcatggtggcgtgtgcctgtagtcccagccactcgggggctgaggcaggagaatcacttgaaccagggaggtggtggttgcagtgagcggagatcgcgccactgcactccagcctgggtaacagagtgagtgagactctgtctcagaaaaaaacaaaacaaaaaacagtggaatattgggctaagctcttaacacattatatttagagattgcaacacttcaatatttactggaatactccttctataaaacggtctcttttgccttgttttattttggtaactaagtgaatgctgggttagccataaaggtagcttgctgcatttctatttcttgtgttctaaatcactgaataatttttaaaaaaattagttctaaagcatttccaattaaaaaggaaggcttaacatttattaggggaagtcaaggggagaggtagtgaggaaagtaccagaaaccaccaacaggtgtttcggttacgttgaacaaagaatcagcttgatatgcaatccctgggaagagtttgtaaattcctgaaggagggtgagagctggaggggacacagtgagcggaaatggtgagcggaaatcagtggttcctgaggcacagaggacttggaggcttgccctcagctgaggacctcggaacaattcctgagcaagttgctttcttgatagacaaggatgcatctgtaggaccactgctgttaatctgtggggcaatgagaattgatcctactgcaagaaagagagtaggataagtcagaagacatggaacttgtatccctagaggacatcgcaactggaaaaatagctaccatttatgaaggcctacctggtctctttgcattcattatcttgaatttgcactaaaattctgcaagaaaggtcatagtagtctattttacaaataaggaaaattaagctcagggaagttatttcataaggttgcacaactagtaggtggtagagctaagtttagacccaggtctgtcctactctgataggcatgctttttccacacggccctctcaagactgtgtaaaatgccagagggctttctggagcttcacttcccaaaactgctaaatttaaattaattaaaattaaagttgaaaaatcagttcctaggttgcactgcccacatttcaagggctcagtggccatgtgtggctagtggctactatactggaccagcacggattagaatgctttcttcattgcagaaagttctattagtgctggtctagaggtcattcagttttgcccctttatttaattttttccccctttcattccacaaaggagaaaatgagggacaaagaaaggaagtaacgttcagcatcagacagctaattaatccagttttttggactggttgcctgttagattttcccatgccccacattcttcccttaaaaaaatgaacagaatggaaatgtgagaaatggagtgactctgctactctcccagctttgcctggcctttaaactagattctttctcccaaagaatcctgcattttaacaagttcaaagggcatgtccggattagtttccccaaaggaaatgaaatatatttgttggaaaggaattccattcttaatgtatgaaatagcacttggattccctctggttctttctctgacttcctaccaagcgctttgtaattgaacttgcagctgctaaccatttgtcttccaaaggacaccaacttcaaacagttcaaatgacagagggatgtatactttgaatgcaagcagctgcctgttatttgctattgattcaaatggcatttatgttagaggcaaatagatttagattatggccaaaattacaacaatagatttctaacttgtatgttaagagtaagatgtattaacagtcattgaactgatgtttagtgtttaactcatacataccaggcactgggttgcaagatgaactaaaaggacttttgctgaaatggaaaaaggtgtcgtattatggacaagttgaatgcattttaaattcctgtctgaattatattgctggtatttgccatccatgtaccttcctgttgagccttgaaattcagtaaaagcctcagtgtggatcatacttcatagctctgaagtaaagtgaggagtcatgtgcaaatgtccttttagtagatgctattaaaaggcatttaaattatacactccagtgtctaaatgacagtctgaagtgtatgtgtgtttggaggatgggcaagtgggagcaaaaggaggcattgtgctggggcgattgatatttttaggaagcctaaatgtaatgtttgatttcagtataactaacagactcatggtttagaaaagttgtctatcaaaaactgagaaattgaggttttggtttcttcttaaagaaatgttcaagtcatgtgcatgagtatgctcagagagattaaaaatggagagaaattggaatggtggcaaggtatccaggaaagtacctgtcttctctgagagtccaagggcaggagtagaaaggactttaaagatggtggcaacaggctgggtgtggtggctcacgcctgtaatcccagcactttgggaggctgaggcgggcggatcacctgagctccgcagtttgagaccagcctgaccaacatggagaaaccccatctctgctaaaaatacaaaaaattagccgggcgtggtggtgcatgcctgtaatcccagctacttgggaggctgaggcaggagaatcaattgcgccactgcagtccagcctgggcaacaagagtgaaactccatctcaaaacaaaacaaaacaaaaaaaagattgtggcaacagctggaaggggtccccaggagctctgacaccgggttttctaactgcccaacatcacggggttggggagcagaacatccagagggctccgtgtattgttttgtagtatagggtctaacttctagaaagttgggaataggcttctgagagttttggagtcaacaggcctgaatgcagaatgatcaaaagaagatggctattcctctcagagtggtgctggttttgggggccagcagtgcagtgaaaagcccaatttcccaatcctattttgaatatttctgccccgacaagcgtttcatttgactccagagactaaccactcttccagagggtctaaaagtcttcaggcttcagaatttttaggccatagtgctttggaataacagtcccttgtgtagaaaagtgtgagatctgagctttttttctggtcaacctgtgaagtcactgcatgaccaactctgtgcctcaggttttttctctgcaaagtgggagtgatggtaatggcttcctacctttcagggtttgtatatgagctgcacatagtttcatgggttactactcagcatgctttcaagcaagtagagattacattttattgttgaaaggaatcttggatgtgttctgttgtaatcttaccttgaatccagggctacaaagaagggttaaggctagatatggctcatgcctgtatttccagctacttagaaggctgaggtgggaggattacttgagcccagaaggttgaggctgcagcgagctgtggtagtgtcactacaccccagcctggccaacagagcaagactttgtctgttaaaaacaaaacaaaagaaaagaaaaaccaaagaaaggttaagagaagttggctatgtcacacagtatgttctatttggaattttgtgacttttgagtaacataacctaaagaccgtgtggcacagtggaaaggctttgtagccagcagactttgagtttgaattctgaccctgccttactatgtctgtggtcttgtgcaagtgcttttacatccttgcgtctgttcccacatctgtaaaatgggcataacaacatttatccaacagaaaggattcatagacactctgtgtgtaaactgctttttgtgattaacaagactaatgataacagccaagattagatccccagtgcaggttgccttactttctatcaggtgagaaggagagaaaattcttagttcccaaagaacttccagtgacggggctcttcagctgctctttatctaacagacttagaatagagacaacaccgggcatacttgcaattttttaggatgtgcaggaagcaaaagaattattttcagtgaaacaggagtctgcaaaaggtgccttaggaaacaactgccacacagtacatcccaatatagactcctcccagcttctctagggcagccatctgcctgacaggccccacccagataagcccagctttcttctcccaagagtttaaggaagatttcctgatgtatgtgtgcgtgtgtgtgggggtggtatggggttgtgttgggggggtcaagaggggtgttaatttgggatgagtagtcactggcttttggtggcataactggaaggtaacactccctgtggctgaatcctgatccctgtggggatcagcgcatggttcatccagacatcttcctcagtgggtcctggcctctgctcatactatgtcttctaccggggattcccttctccacctccaatatacgtatgttgaaatcttcatcttacgtcaaagctcaacttggaggtcatgtcttatgtaaatccatcacagacctctcctccaccccatccgggcagcggtcatctgctccaccctccggagcactctgtacatattccatcacacttcagttacttatgtaattgtctagtcagcagaagatactcctctccaaagggcaaggctttgctaacccctgtgaagcctggctttgagtttatgaggggtgattcttttcagtttataatttcttggctcaggagggtcacagtgttggtggcaaccgtagcatctgtcctgggaggctctgtatgctcttcattgttcatacatccatttatttcttcactcagccacatgaggcatgtgggatgtatgttatctctgcttgatacatgaggaaactgattctggttaaaggacttgtgcctgccatacaggcagctaagagtgcctatagtcctttgtattgccttttcagccaacagtcccatcccagcccaaaggaagaaacatttggggagcatatactggtgaggacatcttccctgttctgtggcattctcttagccttatgcctggcacagaggaaggctctgggaatgtttgggccggatggatctgggagcctcttttgcatgccaagctgcatacttatccctagcaaatgctggtctccttgatggatatgtgacatgggtggctgaatttacatggcacctggtggcttctcacactcctccgccacgcctctggggactaggataggacagatggccacagacaggattctcagctctgcaaatcacatttgggaaaaagttaagtttgtgcaataacacaattttggtaacatggtttcatgctgctggtaaattctataacactctctggataaatcacactgcagcagaactcacttgggaacagagtttaatttcactgtaggtggctgtgattcccacccaccagtcttcccacccccgctaatatatctaggctgataaggtgaatgctgtgctaagcaggctatttctgggcccaggatagaattacattatggtttttaaaaaatttttttctgtatatttttctattcacagaccctttgaaagaagaattacattatgttaatcatccatttccccatcagcacctttaattccttctccccagagtataaccacttgtccttaaaatgacagaggtggaaaagatcttgatagttcagcctcctgtatgtatatatgaagaggttgaggcccagagagactgggcagcctactcagttgtcagatggctggtgaagacctgcatccggatccgttgacttctctcctgtgcagggcccttgttttttgccctgccctactgcttaaccttgtcttctgtcttacaactaggggagagtctatggcatgttcagtttgaaatgaataaaagtgaatacttgttcattgttaaaggaccccaacacagaactaatttcctgttaacccttacattttctcttgacatatctttggtgaggaccattaaaggcttgacacatttctgtacagtgacatgcagtcctaggggttaactctgtgtgggtttgagcgataggatttaacttttaggaaaaaggggaaaaaagagagaaggttgataagtgtatttggagagagagaaaaaatagttaatttttctcttaacagttaatctgaaatgataacacagttgtgccttttggctctaaaatcactatatttttgatatataatccaaaggcaggtatctagactgctgaaggcttattaaaatgtaacaataggtccaagtctagaacttgaaaaaacttctcatttgtcaaagaagttccagtattctacattctcttgctaatgaatttggggagccttggaagctcagcaactgggatgccatcgacaggtttgcggtcctctctagtctggggtaggtcttaaggggaaacttttgggagggacacacatacagtccagtgaaactgtacatgaactactcaggagacagatcacttggcagggatgtggcaatctttgtacatatttgttctgctttactagctacattgtaagcttctgcagatgaagagttcagccttgatgtcccatctcccgcccaggcctgccatgtattagttgatcagtaaaagtggaatgaatgaaagccagtgttagtttacagagcttctgtgggacagaagctttgttcagttgagtttccatcaatatcaaatgcaatgttatgtgcgttgagtttcttgataactgttcttgaggtttctttttttttgttcctttttgactgattaagcaaggctggactggttggagaccccagatgggaccaagaaatgcgactcctgcctggattgttgtaggtagagtgcttaatatggggcctggcatgaaggaagttgggagtattatctggtcaactggagtttagttattaggttgtaaatgactatggtaagtacagatgtcatgaatatactagggtctcagggtctgaaagagttaaagctcctctcagaatagcccaggcagttcccaggaagtagcttcttaggcaggatgtggcaaaccagtgggtaaatgagagcccttctcctttggaagaaaaggaagtaggtggggagaagtgaagaggaagagcttggtagacaaatctttttatctgcttcttttttaagtgccagacagaccctgcagatttttgatccaaagtgaccaaagtcctaagaatgccaataatactggttttgctattgtcttttccctgcagctaataactactcaagtttaagatccactagagtgttgtttcaatagattttgttttctaattttgatcattggtgtattcttcagtgcgctttcaaggttcacagtgaatgtggtgtcatccaaaatcacattcttttctaaccaaggataagtcagaagaaaagatatatatatatatatatattagaaaagtgtctctttaatgtgtttacctatttatccattttaaaacacattcccacccattctctgtccaggtgctcataacagtcccttgtgatacaggacaagagtgtgcttccatttaaggcaggagagagatcttgcccatggttagatgaccagttaccagcagagttaatagagggctccagaccctctgacttcaagttcagggttgtttccacaattttggttctttttgttaagaatatagtttatacgttggagacaaattattgatggaggctgcaattttgcaaataaaaataaccctcaaaaatccagtaatgtatatgtgaaatgaaataggtgaactgaatttggtgagctttagtgtcgctgtaaaagcaactatcctttgtaaacttattgcatagctaataatgtaaatcagtgttgtgtttaggaatcagctccaggactatggtttgatatgtggaaacacctctgcgtttgctgtgggctggtagacagaatgggctggacttggctgtactgtgaaaggcttctttgagctggttctttgaccaggtaatgaaaacgttaagcatctaaaaacgaagtctttaggaggcttccaaggatctggaaagctgaactcagcaatttttagacttcagttttctggacaggacagctcttctagtcaaggaagccagtatctcctgcatttgtgtagctcttgactccatttctttgaaggtttcaaatgataatttttacacttacccagataatctaccctgcctgagcacataattggtaatttggcccaaaaactgcatacttagattgcatcctggtcacactgatatcttacatgcattttagatatttaaatattaaaacaaatattcttatggcaatttttgtttgttttgagatggggtcttgccgtattgcccaggctggagggcagtggctattcacaggtgcagtcgtagtgcactgcagcctgaaactcctggcttcaagccatccttacatctcagcctcctgagtagctgggactacaggtgcatgccactgtgcctggcccttgtggaaattttatttatttatttattttattattttattattattattattttttgacagagtctctctctgtcgccctggctggagtacagtggcgtgatctcggctcactgcaacctccacctcccaggttcaagcaattctcgtgcctcagcctctaaagtagctgggactacaggtgctcgccaccacgcccagctaatttttgtatttttagtagagacagggtttcaccatgttggccaggctggcctcgaactcctgacctcaggtgatccacctgcctcggcctcccaaagtgctgggattacaggcatgagccaccatgctcggccccttgtgtcaatttttagaagctaggttgtcaggctgctctttgctgaaccctaaatatcctgaagccttctgggctggtgtctaggaccatcttgatcctaagggaataagcttgactcttctcttcttggtgcttcagcactgcattttcctcagtgggattggaacaaacattaaagcaaaacaaaaagttgtaaatgagacttagggcaactaacctgctctagccagaatgaaaaatttgttgatgtttaaagttctctgacctccctgtgtctacctgttcataatactaaaacaaattatgaacttaagtaataagaaaaaagattatggcagatttcacacagctaaaataattacaagaattcagcaaccacaaaaatatttctcactgcaaattctcatccatttctgtattgtaggcattttttttttcttttggttttagtgtttattgtatacctcacactgggttagactcaagtttgggggatacttccagcttaattgagggtatgagcatgtaattgcaaggcattgtgacacatgctctaactctggtgtgtgatacagcacaggctatgggaactcaaagggtgagtgactaatgctgtcttgaggagtgaaggactgtatccccaaagcagagatctgggactgtcttggggtttttgggtcttctgttttgttcttatttttttcttcttctttttttttttttttttttcctgtaaccttatttatggtgaagggactttttttttttttttaattgtttacacttgcccttttgatatcctctgcattcgtggctcttatcatcatcttagacttgtgaacctgcctcaggtctctgttaggagtttctggcctatctggtcagccacatactgagtagctccacacgtagagcctgcaggttatctccaactcaccttttccaaaaaatagatttataatcctcttgtcgcctgtgatgacctctcatgctaactacccagagtcaggcagacctcataggttaaacgcacagtcctctgtaagactgcccttcataagactgttacaatctaaggggtttcctgaccacacacacttctgttgaactagctacaaattggggttttcactatcctctcaggttccatagtttgctagagcaattcacagaactcaggaatgcactgtacttctgattacaattttattatagcaaaaagggtacaaatcaggagcagccaaaagaagaggcatatagggtaaggcctgggagggtcccagatgtaaagcttctggtgtcttcacctcttggaatcagggcacagtcactctcctagtacattgaggtgtaacaatatgcacagagtattattaaccagggaagctcccctgagcttcagtgtccagagtttttactggggccccattacataggcatgattgattgaatcattggccatgtgattgaactcaatctctagcccttttactcactgcaggttaggctgtgttacatggctcagagccccaaccttgtaatcacatgattggtctttctggtatggccagcccccatcctgtgtcttttttttttttttttcttccccagtcatcttttatttggaggttaattcccattaggatatgaaaggattcagcgacgatcgagattgtgttccttatggaggggctcgggccaagaaggtcatggcggggagtgcagagcatgccctcttcttcagtggtacttgcatagccacttgtgcttgagctccttgtaggaaaggcagtagctgaagagcacgtagcctgccagcaccatggtaacccctgagatgctccccttcttcatgttgatgcactgcttgtagtaccagtaataacctcttcaaaatgctccggcagtgccactattgctgaagtcctgcatcaagctccagcttggcagctcccctagtttgacctccagaagtttcttgttcttcactggtatgactgatgccatcttggagtcctggtgtccactgtccctgtgtcatctttttaagcaaactgtgggcccacattgaatcaccttattggcgtaaactatcagggcccactgtgaataacaaagacactcctattacttgagaaattccaaagatttagaggttacctccagaaaccagggacaaaggccagccttttattcttttattctataataaagaataaaaactctttattatacaacatcctcctaacccccaaagctgtctagtcctcatctttgtgatgtggtaagtcagatccccctggatgcccagccagaaacctggcatcaccctcaactcctccctccctccccccatatccagatcatcgcccagtcttgccaactctgccttcagtttctgtcccagctctttattgcctggctactgtggtgttcaaactctcatcttgtcttgttttccttgttgccttcaagctgactttcctggcttggctctcccatttctaagttgccagactcttggttccaaaatataaaactgatcttgtcactttctttagaatttgctgttgcagaacaatgtgtgtattataattccattttcgttaaacaaaacatactatatatattcactggaaatgtatttcaaagaaatctagaagtgtatatattctacagtgttaacagtagttatctgagggaaggtggaacatagagttttactttagactatacatttctagactagttggattttttcatactgagcacacattagtttttttaggcctggtaatattacagaagtcaaattacagaagtcaccctagctccccactcgccttctaaacctaattctttagcatggtgtgctgtgcccttcatggtctagctcagtttacctgcagccccatctcatcactcacctggatgcatccactctcaggatattctcaggattaaacttggggattacgttttctgaccttcactttccctcccttatcttagatggaattagggagtttttctgtatgttcccatagctccccatgcctaccttgcttttagcattttgacctaccctaccctgtaggttgttgttatacttgttgtatagttgttgctgtacttcttagtatcctttcctatgtttgccttacattgtgatacacacccccccacaatcccccccaaacacacacacccacccacacacccacctttcagactgccttgtgaggacagggatcttgttgtcttcatagcctagcctctagtatacatagtgcttgtcatggagtagacgcttcatagtaaatctgcattgtattttcacagctgtaggcataaatggatgtaacccagagattcactcaagttacctatcccgtgcccttttctagattggagcactccccgaggtttagattctcatcgtcagttctgctgtgggactcacatttcccttcctatgttttttctctttttgctctgttcttgaactagcttggaatttggctccttttccttggtttccactaaacaacagtgagaacaaagtatacacaaagctatttgtgtgcacagcagattggacttggaaggtctggggtggggagggtatattatattacagcaatacaggtaacttaaaatctaatggtgttaggtgtctttggtcttaaatgacctttgctaccctgccatggtacctcctttccttctgctcttgctgctcttaacgagtccccaaacaagcttttctcattttattttgcaacgtaattcagctctccagctgcacctctacatgctgttcagggctgcttctgcccaccccaaggctgaggagcagtcccttctaaactatgggcaagctttctggttctctagtaggaccagatcccactgtgaacaggtattgttagcccaaagacttatttccccaccccacatcttttttcagaagacagaagcaagcactatcagttttggttttaattaagtttctttctgtgatattacttcttctaggtaggttttgactttactagaccgattgctgttaatttgatggtctaactagtagttttctacccctagtttaacatgttgaatgttgaccaggtgcagtgtctcacgcctgtaatccccgcagtttgggaggcttaggtgggtggatcacctgagccctagaagtttgagaccaatctgggcaacatggtgaaactctgtctctacagaaaattacaaaaattagccaggcatggaggcacgtgcctgtagtccagttacttgagaaactgaggtgggagggaggatcgcctgagcccaggagattgaggctgcagtgagccatggttgcaccactacaccccagtctgtgcaacaaaatgagaccctgtctcaaaaaaacaaaaaaccaatgcttaagtgagcacctgtattgacttccagtcctgatcctgaaatcaggattccctgaaggttgttggaaagtgatctgggggtagggttttttcccagaggtgatgcgtgctcagggatgagatttgctgaccctcctgtgtgtatttgggcagggagaagggtccagctgtagcaaacagctgttcttgtatataagggggaagcaagtctggagaattgacagtttctcctgtggactagaattggagacatattttgagtgctgtgtttcatctgactgtatcttcctgcccttgggtgtgcttctgggcactggctactgacctttttgccttggggactcgactgtacttatggttctgttaaagttggagggtgtccaggttcttggcatcttcaacagagaattggacaaaatgcacaaagcaaggaagggacgaagggatttattgaaaatgaaagtaccctccacaatgtgggagcggtcccaagcataggagctcaaaaggccccgttgcagagtttttgggaatttaaataccccctagaggattccatttgttattttgggtatgcgctatgtaaatggagaggttaaagtaaagttacaaagtcatttgcggcctatgacctatggagaggatatttcctgttatagctgaagagtgaattggccttatgttccctacctccagacccaattttcctgcctcagttctgagttatgaggtttaactgattgggtcacattggatcctgtaccttctccctcattgaagagcaaactgcattcctgattgatagaccagcacgggccattattatacagggattttctaaaaagctctttttctttttttaaatttatttaaactattttttcctcattatgactggaaggataaaagatatttttctatatcagcttctcaagaacagggaatgggtaatgtccagtacgtcatctttctaacgccatagccagcttgtcttttcagtaacagccagccccactgtttagtggtcaccaccagacccagggctccctttgtttttctgatgctgaccacatttttttttttttttttgagacggagtctcgctctgtcgcccaggctggagtgcagtggcgggatctcagctcactgcaagctccgcctcccgggttcgcgccattctcctgcctcagcctcccgagtagccgggactacaggcgcccgccaccacgcctggctaatttttttgtgtttttagtagagagagggtttcactgtgttaaccaggatggtctcgatctcctgaccttgtgatccgcccacctcagccactcaaagtgctgggattagaggtgtgagccactgtgcccggccttttttttttttttttttcctttttattttttttgagacagagtttcactttgttgcccnnnnnnnnnnnnnnnnnnnnnnnnnnnnnnnnnnnnnnnnnnnnnnnnnnnnnnnnnnnnnnnnnnnnnnnnnnnnnnnnnnnnnnnnnnnnnnnnnnnnnnnnnnnnnnnnnnnnnnnnnnnnnnnnnnnnnnnnnnnnnnnnnnnnnnnnnnnnnnnnnnnnnnnnnnnnnnnnnnnnnnnnnnnnnnnnnnnnnnnnnnnnnnnnnnnnnnnnnnnnnnnnnnnnnnnnnnnnnnnnnnnnnnnnnnnnnnnnnnnnnnnnnnnnnnnnnnnnnnnnnnnnnnnnnnnnnnnnnnnnnnnnnnnnnnnnnnnnnnnnnnnntttcccctctccctccaactccatcacctttccttttgtacttctacagaagcctgatcctttaaaaattatctggctgggcgcggtggctcacacctgtaattctagcactttgggaggccgaggcggatggatcatctgaggtcagggattcgagaccagcctggccaacatggcaaaaccccgtctctactaaaaatacaaaaattagtcgggcgtggtggtgcatgcctgtaatcccagctactggggaggctgaggaaggagaattgcttgaacctgggaggtggaggttgcagtgagctgagattgtgccactgcactccagcctgtgtgacgggagcgagactccatctcaaaaaaaaaaattttcatatgcggctaataagaaacacattttatatactggggcagaaggaaccataggctgtcacttgttttaagcaacaatatgacaccccctgtctgattcaggatgttattcaatatttgaggaaagtctttgtgagtgggtggtcctcatgactccagaggctcctctgtgtgtgtgtgtatgtgtgtgtttttcaacatgactgcagaaatatgttgtgggaaggtaattcatgtgatttcagaggactgtttgattctcagggggtgtttttgtttgtttgtttctttttaaaggataggaatatgtgattcttattctatctgggattctttttaatcaaacctgtttttatgacataaacaaaaaaatgtctgttggcttggaaactacctgatttacagtgaaattaaaaataaatgccttggccaggtgtggtggctcacacctgtagtcccagcactttgggaggtgaggtgggtggatcacctgaggtcaggagttcgagaccaccctggccaatatggtgaaatcctgtctctactaaaaatacaaaaattagctggtcatggtggtgggcacctgtagtcccagctactccggaggctgaggaatgagaatcacttgaacctgggaggcggaggttgtggtgagccgagatcacaccactgcacttcagcctgggtgacagagcaagactctgtcaaataaatgaatgaacgaatgaatgaatgaatgcctttcagccgtgcacagtggctcacacctgtaatcccagcactttgggaggccaaggtgggtggaccacttgagcccaggagtttgagaccagcctgggcaacatggcaaaacccagtctctacaaaaagtacaaaaattaaccaggcatggtggcccagctaccccaaacgctgaggtgggaggatcacctgagcctgggagatcaaggctgcaatgagctgtgactgcactgctgcactccagcctgggtgacagagtaacaccctgtctcaaaaataaaataaaataaatgtctttcaacctggggaagccgattgaaaaggtaaataaatttaccttatttatttttcaaaataaatttacctgtcctttcattttcttatttttttattttaagctttattcccctaatacttactcttggcatatatatatatatatatatatacacacacacacacacacacacacacatacatacatatatatacacacacatacatatatatacatacacatacatatatacatacatatatacacacacatacacacgcgcatacatacatacatatatacacgtgcatatatgtacttatataatttttatatgtacaattttatatatatgtacacacatacacatatatacacatacgcacacatatacacacacacacacacatatatatataaatttttttttctgaaacagggtctcactttatcacctagactggagtgcagtagtgtggtcttggctcactgcaaccttgacctcccgggttcaagcgatccttctgccttggccccccaagtagttgagactacaggtgcatgccactacacctggtgaatttttgtattttttgtagagatagggttttgccatgttgcccagggtggtcccaaactcctgagctcaagcgatccgctttggccttccaaagtgccaggattacaggtttgagccaccttgcctggcctggcttataatcttttttttttttccttaagtgctaactgcgagttaatggcttataatattcctaatcctaattctataccattgtcgctgggcgcagtggttcacgcctgtaatctcagcactttgggaggccgaggtgggcagatcacttgaggtcaggaattggggacgagcctagccaacatggtgaaaccctgtctctactaaaaaaatacaaaaattagcctggcatagtggggcctgtaatcccaggtacttgggaggctgaggtgggaggaacacttgaaccaggaggtggaggttgcagtgagctgagatcgtaccactgcacttcagcttgggtgacagagtgactccatctcaaaaaaaaaaaatgaacaaaaaacagcaacaaaccaattctataccattgttcacagattagcccctactagaatgccttctttctctcttttttttttttgctatctcattattttatatcattctagaccagtttgagcctcatatccccacaaaacttactctagcatatcctcaactacacagctgcctgtgttctaggccctttgtgagaattaggggaactgtggtacagtcattgccccagaatctcttttgaagttggtggtaaaaccataaaagcagtaaaggtaattaactacattgtgcattttccccagattatttattgcatgaacaacatgaaaacacggggattaaatcaccttctaccctgccacagcaactgatttcatttatctatgtttctttgcagtgcttgttcgtatacattcattttttcccccataggtaatacaatataattcatttgcacctgagagtgtttgattgtcaaaatttctgatacctataagtgtgtgtgactttggatgagtcacttctcctgagacccagtttctccgtctaaaccaggggtttagactacatgtcctgtaaggcaataatcatgaaaatatcttctgttgtggagtatttcacagttgcttgaacatttgtattgttattctttaccataactacatgggattgagtggaatatgatattccttttttacggattgggaaactgaaactgaggtagccaaagaaaacactcttaggtgaaaatgaattatattgtagtacctatgaggggaaaaaaatgaacgtatatgaacaagcactggaaggaaacatagataaatgactttaaggttgactttttatctctggtttttagcagtttgactatgatgtgtctaggtgtgggatttttctttttttaagtattgcttagggtgccctgtgttttttcaatctggatgtttgttgttttttgttaattttgggaaattcttggcctttatctcttcaagtatttcttctgtcctgttccctcttgttcttccaagaccccaactacatatatgttagacgattggatcttgtcctacaactcttggatgctctgttctgatttcttttattctttttttttgctttagtttggttaatttctttttttttgtttttttttttgtttttttgagacaagctggtcccaaagtctgggcctcaagtggtcaagctggtctcaaactctgggcctcaagtggtcctcctgccttggcctcccaaaatattggtattacaagcatgagccaccgtgcccagcctccatttaaaaatttctgttgacctatcttcagggtcactgattgttccctcagctccatgtaatcggctaatgagcctgttgacctctgatgccatgtttttaaaatttctagcattttaatttgattctatttttagttttcacctttgctgaaattcctcatttgttcatgcatgttgtcacctttaacatattaatcatagttattttaaggcctctgtctgatagttccaacatctgggtcgtctgagtctggttctgtttatagcttatctcttgataaggttgttcccccccatcccacctcccaccccttcttgatttttgtgtttttctttccttttttttttttttttttttttttttgaaacagagtctcactcttttcacccaggctagagtacagtggtgcaatcttggttcactgcaacctccctcccggtattaagcaattcttctgccttagcctcctgagtagctgggattacaggtgcctgccaccatgccaggctaatttttttttttttttttttttctttgagatggagtttcactcttgttgaccaggctggagtgcaatggcgcaatctcggctcaccgcaacctccgcctcccaggttcaagtgtttcttctgcctcagcctcccgagtagctgggattacaggcatgcaccaccacgcctggctaattttgtatttttagtagagatggggtttcaccatgttggtcaggctggtctcaaactcccaacctcaggtgatctgcccaccttgacctcccaaagtgctgggattacaggtgtgagccactgtgccccacccatgcctggctgattgttttatttttagcagagatggggtttcaccatgttagccaggctggtctggaactcctgacctcaggtgatccacctgccttggcctcccaaagtgctgagattatggatgtgagccaccgcacccagccatgtcttgtgcatttttttttttttgagatggagtttttcttttgttgcccaggctggagtgcagtggtactgtcttggctcactgcagcctctgcctcccaggttcaagtgactctcctgtctcagcctcctgagtagctgagattacaggcatatgccaccatgcccagctaatttttatattttcagtagaggtggggtttcgccatgttggccaggctgatgtcgaactcctgacctcaagtgatctgcctgcctcggcctctcaaagtgctgggattacaggcatgagccaccgtgtccagcccgtgtcttgtaatttttgattgaatgttggatattatgtggtagaacagagaattaggtaaattgtctttatcctcagaaatgggcatgcttttctgtcatgctgttagtttgtgttaggctgttagccagagttgagctgggtttgggctttctttttaatattaacttaaatgcatcacatgcttcaaatttctccagtaatgggtttttatcttgcacttagcggggagcctgagttgcatacgtttattttttttctcagtctttctactgcttcttcagctctgaactgtcccttaatcctttgccacaaagggactctttctctacactcttgcccctttcctaggggtaagctgcagttgctttttagtggttcttggcttgaagtagaggtagggaggttctcattgtcttgatccaatctcaatctttttttttttttttttttttttttgagatggaatttcgctcttgttgctgaggctggagtgcagtggtgcaatctcggctcactacaacctctgcctcctgggtttaagcgattctcccacctcagcctcccgagtagctgggattacaggatgtgccaccaagcccggctaattttgtatttttagtagagacagggtttctccatgttcgtcaggctgttctcaaactcccaagcttaggtgatctgcccacctcggcctcctaaagtgctgggattacaggcatgagccactgtgtccagcctcccgtctccatctttagcagaccctgtgagtatagaccttgggtttggggttttcccagcattctttcccttcctctctatggcagccagactttgccttgtatctgcggcaggtcttgggcaggagaaagttttgtatacctccttcagcagttagtagacttttgctttctgttggtgttgagcacagctttaggcttagattcttcatcaactaggagaagctgtgcttcaatacagttattcttttgcatagttcctaatgtgcttcactcaatttagcagaatttttttttttaacctcttccttgatgctagctgcttgtgcaaatcacatcttggccgcctactcttcttcacttgctgacagatgtgtaggtgagaaaagtctcatagtcattgttcctgaaagaagcttccagacccacttctagggccagtgacatatgcaggaaatcagctgcttctgggccaggacagagctggtcttttttttagtgggggatggcaggcggcggggcaggggacattcaaaatttattttccaacagacagatagcatcagcaggtacaactacaagggtatctacatagatcatacattcacaaggcattattagttcaacagtgagaaagccactcgtgggttttctgtagcaatatcccacttcacagtgtaaacaggtactattttgttcacttacaattctggaaggaaaggcacaccttgcaggggggaagaaaaggggaatcctaaagtaaggtgcaacaattaagagacaacactttggctaacaatcttggatccacatttcagtcagggccttccacatagaggggaaagacttttctctcagaagttagaatctttcttcctcctctcttgttaaaccgagagcagtgttttgtttgctcaatattacatgtacaaaaggagattagaaaaaaaatgcatcacaaaaccatcttgaacgttcagctcttcctgccaatacatcacaactcttaggttttagacggggcctgggaatgcttcagtgttttttctttttttttttttttaagtgaaagcaagtttattgcgaaagcaaagggatacaagaatggctgctccataggcagagagcagcccagtagtcttaaaataggaaaatagacactatggctacaaaaaataaaaaataaatgaggtagataaagctttcacacccaggacttgcctgttccaacttcatagccttcatgaaatattcatcaagaagacaaaaaaaaaacctttataattacttggcataagtcacaccaagaaaattcaacaaaaaaaattagcatgtatacctatgataggaaacacatccttccatgagtttcttctcaagaatgaaaacctagttcttcagtagagtaggcactggcaaactaagtcatctgagatttcctgctcaggtgccctcttcttctggggttcaggaagaggaaggcatctaagaagtgtgggaaaggacattggcactctcagggcagagctggtccttcacattgtggtgaaactactagaaagaagaaaaacatgcttgtggctactctgtgcctgtgaaataggtgtgaagcctttaggagtcagaagacctgggttcaactctaatagtcacttactccgtgaacttgtgcaagtcacttctctgtagtttttcttacagttaaaactttaaagttttgtccagtgctaaaattctctaatcctaacatatccttctgtagtgttacaaggatagaactctccaggtaaataccaaggctgtgcttttctgcaagcatagtggttagcttcccgtgttatatggtttgaagccctggttgttacttcttgcctgcatataaaccccattgacgatgatctcatcttgtttttcctttaagaataaattgattgttttgtcttcccaggtctttgagaatgcgtaagttccggcactagaaagtcctcagtaaagtaactaaaggagtatatacagctaagggcaatttaagtcaaaatgtgataataagtaaaaagtggttgtagaaattaaatgagagtgaaatatttttttaaaagttggaatcatctaaatgctaaatgcatatttaatattgttttgctattgtaatctaattagttaaaaagaataacatttgggctgggggtggtggctcatgcctgtaatcccagcactttaggaggccgaggcgggcagatcacaaggtcaggagatcgagaccatcctggccaacacagtgaaaccccgtctttactaaaaatacaaaaaattagccgggtgtggtggcgggcgcctgtagtcccagttgctcaggaggctgaggcaggagaattgcgtgaacccaggaggcggagcttgcagtgagccaagatgcaccactgcactccagcctgggtgacagagcaagactcccatctccaaaaaaaaataataataataataacatttgatagtatttattgaacacctactgtgagctagatgagtgtgggtgagctcctttagtctcctaacaaccccatgatgtgtttactactgttagccccattttactgatgaaaaacctgaagcttaaggcttttaagaaacctctctggccaggcatggtggctcacccctggaatcccagcactttgggatgctgagcctggcagatcccaaagtcaggagttagagaccagcctggccaacatggtgaaaccctgtctctactaaaaatacaaaaattagccgggcgtggtggcaggcacccataaacccagctacttggaaagctgaggcaggagaatcgtttgaacccgggaggtgaaggttgcagtaaaccgagattgcgccattgcattccagcctaggcgacagggcaagactctgtctccaaaaaaaagaaacctctccaacttgacgtggctgttcagtggccaaatagggcttcatacccagatagcctgactcccaggttcaggtcagggtacatttttatgtatcataaaagcatagttgatgaattctcagaaaccgaacacaccatataaccagccctcagatcgagaacagggcattactagcacccaggaattcccctccttccctatattagggttcaccagagaaacagaaccaacagcagttgtgcgtgtgtgtgtgtgtgtatgagagggttattgatgtttattttagggaattggctcatgtgattatggaggtctggtaagcctaaaatctgcagggataagccagcaagctgaagacccagggtagggttgcatgcggttcaagtccagaggcaggctaccagcagaattccttcttttgggcaggtcagtctttgttctcttaaggttttcaactgattggctgaggccaattcacattatggacagtaattcactttaatctaagtttaccaatttaaatgttaatctcatccaaaaaacccccacaaaaaccaaaaacattttcacagaaacaccatggcccagccaagttgacacgtaaaattaaccatcacacaccccctcttagttacttccccctgaagggtaatcactttcctaatttataattgcaaagattagtgttgcccttttttgaattttctttcctttttttttttttttttgagacagggtctcattgtcacccaggctagagtgcagtgacgcgatcttggcttactgcgacctccgcctcccaggctctggtaattctctcacctcggcctcctgagtagctgtgattacaagcacaagccaccacgcctggctaatttttctattttttgtagagatggggtttcactatgttggccaggctggtctcaaacaactgggcttaagtgatcctcccgcctcggcctcccagagtactaggattacaggtgtgagccagcatgcctggccttgaatttttgatagatggaatgacatagtgtattagtctgttttcacactggtttataaagaactgcccaagactgggtaatttataaagtaaagaggtttaattgaattacagttctttatggctggggaggcctcagtaaacatacactcacggcataaggcaaaggggaagcaaggaccttcttcacatggtggcaagagagagaagtgccagtaggggaaatgccagacacttataaaaccatcagctctcatgagaattcactcactgtcacaggaacaatgtggggaaaactgcccccatgactcaatcacctccctctctcaacacatggggattacaatttaagatgagatttgggtgagaacgcagagccaaaccatatcatatagtacatactcttttcgtgcctggcttctttcacagagcacatatacacattcctagaatttgatttcctataggtagttgaacagcctctcctagagtaacctgaaggattgaggtatgggaaggtatagaatgccttccccaagatgttgactggggctatcccttgccactgggtctgcactgccgctccctccccgccccccccaacacagatgggctagcctggggtggaatctggaagttggtaagctgtgcttttggcactctctgccttcctctttcaggtccattctcctttcctgtcttactactccttatacgcctaactctcaatcctcagccatccatgctttgactgttcagagacccatggtgccagttctttttgttctcatattgccccctgtccactgaagctcctcagcccctcaacttgaacacgcccccattcttattctgtacctcctcagattactgtcacattgacggacttgaacctcagagatagacaacttttcccttccctcctctcctccttcccatatacttttcttatggatatggaactgaggaccagaaaggaaggtaacttacccaagatctcatagatgggtaaataggggtagaaggtgtggatcaagggattgtatgcagcctttatctctaggtgctggtctctcttaccttgggtctgtctcttttgcctctcctttcctctttccctgctacttgacttgtttcctaccctagtagcattcctgcttgccagatgccacaggggaaggagaactttacaactccctgggctctatggtaagaacacccacctgcacggggacccttcctctccttcctacagtgattggttgtcatcctcttcccttcctgcagtgtaccttcctggcagaggcaaggctgccatcgaggctagagcaaggctcagattgggtggcatgcagttgtggcctatttctgtttggtgtgtggcagtttggagatcccatttctttatctggatatcacccccctacctcctcctgtcattccttaggccagcctctaaattcagtgaccatcagggttgaaaagggcagtgtggggccttgaaagaagctctctcctaggagttaggagacctgccagcagtgaactgtgtgaacttgtccctttggacctcagttttctcatctgtaaaatgaggattggataagttggtcttcaaggtccctccctgggatacattttatgctgctgcttggtttaaaccactgagccacaaatgaaaggttccagttgcgacagtgtaattaggcttagcagatgggtgagatgagaggaaggacatgttcttgcccataggattatcctttcccacccatttccttgcgccttactggtgttttcgaaaagcaaatgacaacccttgtttttctctgcattcccattcaaacctataatcttcttttatcttgatgaacttgtatttaccgttagacagccatgatgcagaattcacattacagtgtgtggttctaactctgccatggtgaatgtgatggaggttggagccgatcacagctggtccctggagagagggctgtgtgtgtcagatttattgtgctgcagctccagttttgttttggtttagtttttaaatccccagtgtcagttttgctgatttcagttaaaactaaagattgtgaagggagacagagacaggttcatgccctctgagttttagagattggtgatatagttgttgggtgagggccctctctcttatatcctttgcttaaaacatttcaccttggaaaggcagaaattagccttgttgaacttcaactccctctgcaagaggaagaaatactgaatactgtttcattattgatatctttttaatgagtactgaaagccactgcaggatctttgtttcaccttcagataaaatgtttcatctttcattctctgaaaaaaaaaaattgagtattttaagaataattaaaggaaaggcagtagtttctggatcctgctgttgctgccttggcctctcctcccttttctccacttccactcctctccctctatattagtgtagaaatgtgtcaaaaatttcttgcttcttccattagtttctattttgacccaccccagtgaatgaaataagcatagaattgttacttctattttacggaagagaaatccttatttttttgttgtttttatttttaagttcaggggcacatgtgcaggatgtgcagatttgttaacataggtagacctgtgccgtggtagttttctgcacagatcatcccatcacctaggttttaagcccagcatctattagctattcttcctgatgctctctctcctcccccactgacaggccccagtgtgtgttgttccctcccctgtgcccgtgtgttctcaccattcagttcccacttactagtgagaacatgcggtatttggttttgtatacctgcgttagtttgctgagaataatgacctccagctccacccatgttcccgcaaaggacatgatctcgttcctttttatgtctgcatagtattccatgatatatagaggagaaatctgaaatgtggcaaggttaagtgacttgtccatggtcacacagctggttgatgaacaatttgggataagaatccaggactcttgaatactagtgatttgtcaacacgattctatctccagtcctcatacatacacacctgccattaggaaaatctttgccaccccagcctatagtctttgtcatttctctcactggccaacttctgaaagtacaggtcagaagccagttcattagctgatagggtgggtggttaaatggcaaggcataggaggtagaggagggagaaaggtagcacaaagctcagacttagtttttcctccagaaggtgtaagaattacttatttcaaagagtcagaaaagtgaacagagtcagcattcccttttcctttgcaaattgattgaatttctatggcgagtattagctgcgaggcagtgttaatctgctccagcagatccgtcatcagattgatgtgccggggagacaggattgtctctggtgcaaaggcctctttgtgtagggcacaccatctttatgtatgattgaggcctggtgtgttaaatgcctcacactgggatcttgcccatgtttgtcagttgcctcccttgaaagtattgagctttttgaagataatatagcatcatggttaaggtaagacattcgttctctctgcctgaatttgaaacgtggctgtgccacttaacagctctttgacctttgacatcttagttcacctgtctgtgcttgagtttgctcatctgttctaattaggggttgtggattaaatgacttaataaatgtaaagcactgaggagagttacacagtgttgtgaggaaagcagtttttcttccatgcagccctccttccattcccccatcatgcacagtgtgtgtgtgtgtgtgtgtgtgtgtgtgttgacagcttttggaatctgcatttctagctggcctgctgagcctgtcaggcagctgtaacctcattcaggttttagctgtggggtccatctacatttgacatgtgtttctaaatgtggtcctcagtaagctcctttgtggggagaccttggagaaaggaaaccagagagtgtgcactgtgcacccccagccacacatgttctgggttcccacaccctagggactggggacactgcaagacatagccaaaccttggatgaaaatattgagtagctgtctcagtttgcttggactgctatgataacatatcatagactaagtagcttagacaacaatagtttattttcccactgttctggaggctgaaagtctaagagcagggtgccagcatggttgggttctggcaagagccctcttcctggcttgcagacagctgccttcctactgtgtgcttgcatggcctttctttgatgtgtgcagcaggtggggtgggggggaaatcagtgagaaaaatcagtaacctcggccttgcatcttctttggtcccatgcgtgatgttatttgtaaggcagtgtcagatctcctcatacatggagaggcattaagtcttcattttcctgtcttctagaggtttgggatagagggtgtgaaggaagagcagattatgcttactctatcttttaagctcagaactggggtgtgtgtgttggcaggaacaccaacatgatgatgtataacgaaggcctatcttgtcacctgtgtcactccagccacccccccacacaattgtcactgacatgcttcacctcccgggacttcaatttgaaacccaatgaaatccagtgaaacacagtggaaactctcttaccaccttcctgttaaccaactcacaggagtgatgaacacttttcagttccctggatgaaacactcttgagcaatgcccacagcatgctgaatgcactgcaggcaggctgctctctgccatacccactcgcttcagcacccactggctgaattatgtgcttaccaagagccagcttgttcccaaacccatttgttcagctttagctggtattgtagttaagtaatgtatttaggtatcggataaactgatgaaatgtaactgcaaatgaagtgattttttccccctatgaacactagttaaaagctgtggaaagactcataagtccaagtcactaaaacacattactgtcaaactagatgaacattaagattgggggaaatcataaaactctaaaattttatatgtgattactctgcaagtaatcacaatataactttaaccagctttaacaaatcagaataggaaattgtcgacaatgtattatgttctggtccatgtgggaaggatgatgtggacctcttaaccagtgggtcctctttggacccttattcaaagagtcttgccctatgttaaagaatgggcgaatgaatgcagatttatatacattatgtaaaaataagaattttagatatgtaattttaatgattttttgctgtgacttttttgattaacctggttcctggacctgattacattgaaaatgaggatttctactgttgtgattcagtttaaagttggtttgatttcattttagtgaatttagggaattttattttgcgtatggtaaaaacaataaaaccaacagtagtggggctttttaaactggggttttaaagcaaattaaggtggctcattctggattttagtaggttcttttgttcctctcattgacttgcagcatactgagtgagaaagacctaattttttcactttataaatgaggaaattgaagccctgagaggtaaagcatgttggtgatagtcatcccgggtggctggagtgaagcgggcagagccacagtgggagggggcctcctctctagcctcccactttgattctctgtctggccccagacctggagctttctttccatgataggagtacttctttgggttgacttctctggtgacagtattgacttgtgctccccactttggaacaggaccaacttggaggccttgcagaagaagctggaggagctagagcttgatgagcagcagcgaaagcgccttgaggcctttcttacccagaagcagaaggtgggagaactgaaggatgacgactttgagaagatcagtgagctgggggctggcaatggcggtgtggtgttcaaggtctcccacaagccttctggcctggtcatggccagaaaggtgagtttgccttgattaacaggtaattggattatttctcagggtacttagaagcctggggaccagggtagaaggaagagtgattttactcagtacctttttgtgctgtttgaattttttgtttgtttgttttttttaagacggagtttcattcttgttgcccaggctggtgtgcaacctccatctcctgggttcaaatgattctcctgcctcagcctcctgagtagctgggattacaggcatgcgccaccatgcatggctaatttttttgtatttttagtagagacagggtttctccatgttggtcaagctgatctcgaactcctgacctcaggtgatacgcccgcctcagccccacaaagtgctgggattacaggtgtgagccaccgtgcccagccgtgctgtttgaattttgaatgcttgttatctattagattatggataaacacactaatgactgtgttagtgtattaatccccatcccatctggaaaataataagtgactcttttttagccttctgtgtgctgtggaaggaatgccagggtacctgtttattacttatcaagtgctggagaagctgctttcattcacccagccccagcgatgcacaaaacaaggatttcaagttgtttcccacttgtgctccagccctgccagtgaatcccctttatcttcctgcattatagcatctgaactcctatcatagcatgtacttgtagagctggacttccctttcctatctacccttggtcctcttttggaatatagccccttgctccagagaggttgggctcttcaatgtttttttgcacgtggtgttcactcctgtgcccataatttttttgtgtgctgttccttctgtcttttcaaacagtgcccattttctaggtccacctcttgtctagcttttaccaggtgccccagcccacactggtaaccagtgcatccatgttctctgacactcgctgtctgtgggatttttttagaagttcaaccttactacgtaactatttaatgtgactgtcacttgtctccccagctggaacaagggaaaatgttagggtgacataaggtagcaccttagactttggcttagtctcaaccacatcaggctcctgagctcaaggaagaatcttctgggcagcctaggttagcatacctgagttcctcatacccttctactttcacaactcttgagtgtgaaccaagtcctcaaggttaatttctcttcatatctgagctccaaagcctctcttggagtaagccctcccttaactttgttcctgtctaggctcccaggagccaaggcacagctggaatagcctccagtgccaatgcctgccttagtacaatgacactcatttcttggttgagcagaaacttgtttgtaacaacttaacctgtttctcctccctctaccttaaagagcttaaacatttaacaagactacatctttcatcccttcctccctctttctttcataaaacctctctttcttccacctttctccagctaattcatctggagatcaaacccgcaatccggaaccagatcataagggagctgcaggttctgcatgagtgcaactctccgtacatcgtgggcttctatggtgcattctacagcgatggcgagatcagtatctgcatggagcacatggtatgtgacaccctctcagcctctggagcaatggccttaagagttaggtggctctggcctaatctttggtctgggaggtgaccagctacctccctgctgctcctgggctccacatcactatctagggcatctgggaagtctaactgtagagcttgggatattcacaagatggcaggcctcctttctaggtccttgcctctcttgaaggaagtgggcagtattcctggtgggtgtacctagagcacctctcatagtttttttgattctgattaccctaagatgtgatgtaagtaaaatctggtaaatacagtttaaatccatttcttgtgtacaatgctgtatgctaggtgcaaggctctggggttataaagatgacataatctactgtaagggcagcctgaagggtttctctgggtttctgtatgatgcacgttagtggaaggagagggcaatggagagagagggcattcatgggctaattaatcatatgcatgttaactgccagtcattttaccactatgttcttggagtccctccttttcttcagatataagtcttccaacacactgtgcaacttagggaattctgcaagtattagtctttgctttattctccctgggctgatggcttagagatgagggctgacgtgagtctgcacacttggtggctgttgtgctttcagtccagtattgtgtctctcagctcctaccccattttattcctgatacttgagacctgccctgacctctagaatagggatcctggtgcgcagccttaatgaactttagaagaaccctcctgggaggattctctacttgtgcctccattattttgaacctctcttcattgtaatgatcacgaagtgctgcatccactgttataggcatctgctgacatttgtgggtgccatatggaacctaaatcctaaaaacgtcttctgcacatctaaaggttagagaaagtgcttgttccttctttcctcaatgagagcagagcattctctgtgggaagcatatgaacatttctggcttggtcctagtgcttggcctggggtgccgattattttctgcttgggtcttggcttcccctcagggagctgtttcttatcccttgggtctcttgtgttcattttttttttttaattttatttatttttattttttagggtgatgaagggttttttcccctttctttttttttcttttctttttcttttctttttttttttttttagacagagtctcgccctgtcacccaggctggagtgcagtggtgcgatgttggctcactgcaacctccacctcccaggttcaagcgattcccctgcctcagcttccagagtagctgggattacaggtgcgcaccaccacgccccgctaatttttttctatcattagtagagatggggtttcaccgtgttggccaggctggtctcgaactcctgacctcatgatctgcccgcctcggcctcccaaagtgctgggattacaggcatgagccaccgtgcccaaccaatctttttatttttcttacgttgacctcttttgagatactaggaggcttcttcatttacattgaccttttttgagatgctaggtggcatccttattctggaattctttattcactttgaacttatagatgttgatcacatctcttgtgcccttgctatgtcctccccttccttcaaaccttcctcctccttcaggagaaaatgacactggaaatgactggagttggtttcccattctcttagcccatttccagtgactgcaggtcagtttttccccccatggatttggctctctggaaatagtgagatgttcctgcacaagtctctggagttatcgcggagagcatgagactgggaggggaaaatgtttcaagggccaagcacagtgtctggcacctgttaggtggtatgtgttgagtgactgaatgagagtggccaggatggggaagacctggtcaggcttgggactcaatgggggagggttaggccttggagcctgccataggaccttttggccctgggtgtacatagacccagagggcagctagaatagtcagtcagtggtagtgaagaggctcaggtgctgctggagcgtctagatgggaccatgtaggaagcagctgtggcttgaagaccaggcagccatgagagccagagtggctttctgcttcagctctgggcactctcagcccttccttgttcctgagcaggtcctgttgcaggaaaggccctgccctggcttcctctggatggaaaattctgactgtgggctgctgcttcccttggaccttctgctttgccttagcttcagtatttcaaaggtgttgtcaggtagagagacctctgttcgatagccacatcccagcttctgaaggtctttcgtcctctctctgtcacagtctttgcatgagttttgtgtcatcatgaatattattttcccaacactttattatgaaaattttcacaggctgggcatggtggcttaacgcctgtaattccagcactttgggaggctgaagtgaacaaatcacctgagttcaggagttcaagaccagcctggccaacatggtgaaaactcatctctattaaaaattacaaaaatggccagacacggtagctcacgcctgtgatcccagcactttgggaggctgaggcgggcagatgacctgaggtcaggagttcgagaccagcttgaccagcatggagaaacaccgtctctactaaaaatgcaaaattagccaggcgtggtggcacatgcctgtaatcccagctacttgggaggctgaggcaggagaatcacttcaacccggaaggtggaggttgtggtgagctgagattgtgtcattgcactccagcctggacaacaaaggcaaaactcagtctcaaaaaaaaacattacaaaaattagctggcgtggaggcaggtgcctataatcccagctactcaggaagctgaggcaggagaatcacttgaaaccaggaggcagaggttgcagtgagctgagaccaccccattgcactcctgcctgggtgacaagagcaaaactccatctcaaaaaaaaaaaaaaaaaaaaattcaagcatgcaggannnnnnnnnnnnnnnnnnnnnnnnnnnnnnnnnnnnnnnnnnnnnnnnnnnnnnnnnnnnnnnnnnnnnnnnnnnnnnnnnnnnnnnnnnnnnnnnnnnnnnnnnnnnnnnnnnnnnnnnnnnnnnnnnnnnnnnnnnnnnnnnnnnnnnnnnnnnnnnnnnnnnnnnnnnnnnnnnnnnnnnnnnnnnnnnnnnnnnnnnnnnnnnnnnnnnnnnnaaaaaaaaaaaattcaagcatgcaggaaaacctgaaggaagtgtacacgtacacccaccacctagattctacaacttatgttttgagatatttggtttaccacatgtccattgctccgatcaatttggggggcacgtggggtcgtttttgtttgtttgtttttgagacagggtcttccactgttgcccatgctggagtacagtggtgcaatctcagctcactgcaacctctgcctcctgggcccaagcgatcttcccacctcagcctcctgagtagctgggactacaggcacatgccactatgcctggctcatttttatatttttagaagaaatggggcttcactatgttgcctgtgctggtcttgaactcttgggctcaagcaatccgcctgtctcagcctctcaaagtgctgggattagaggtgtgagccaccacgcctggccctgggaatgtgttttaaagtaaatttgtgtcatcagcattggttgagccctatcttctaaagcactcagccaggggctgatctttcctagaaataagctctgtgtgcactgcccagtctgaattttgagacccaaggagggaaattaatgctctctgatcagaacaggaatgcttttgtctttggggaagtagattcctgctcaggtggtagctgagcaaccggagaactagggacccagagttaatggttcttgtgcaggaataaaagcttttgaactgttattttcataaagcatttgtctcttccatagaaaaccttcacaaaagcaccattgacttagttaataattggcttctaaaaataagcacaatttcagcagcttaaggcaaggacttggcaacagtgaattagaattagagagttgtatggttagttgcaggcaaccctggggaatcctgactggcgtatgccccttacactttgtaactccatcgttcacactatactctgcttgtagctctgtggaggttaaagggaagagagccaatgtttcctttttgttttaaaattaactgattaattttacagatacggtcttgctctgttgcccaggctggagtgtggtggcatgatcataggtcactataactttgagcttctgggctcaagcagtcctcccgccttagcctcccaagtagcaggaggacaacagatgtgcatcaccatgcccagctaatttttattttttgtagagatggagtctcactactctgtggcccaggctggtcttgaactcctggcctcaagcagtcctcctgccttggcctctcaaagatttgggattacaggcatgagccactgtacctggtttgttttttcctttttaatagagatatttctcttaccaacccccaggggaagtgtaaaccaagacagttatctgggctgccccctgtcctaggctgcatttagggtcagttgagaggtagtgctgtctgggcgcagtgactcacacttgtaatcccagcactttgggaggctgaggcaggagaattgcttgagcccatgagttcgagaccagcctgggcaacaaagtgagactccccatctactaaaaaaatcaaaaatagctgggtggggtggcacgtacctgtggtcccaactacacggaaggctgaggcaggaggatcacttcctcctctgagcatcagtagcattgtctgttctcttcattcaactgtttgttccctgccttgtttcagaggaggatttaaaatgccttacctcttatgaatatattctgtctccctaaggagagagtgtgttctatctttatcttacaggtttaaaaaaaagacaaaaaaaaaaaaaacaaaaacctagttcttacatatacagaggcatttgataaatgatagaagatgatgataactgctcaatatagacaggatactttagaaaatttgttttgagttttcaggaattaggtctacatctgagagtaattttaagttgcaagtggtcactggctacacctgaagccataggggaaattaacctatttctgccttgatacatcaggatccccttagcgaggcatttcttcaagatcgcaggttaaaatgtagaaccccttaatgggagcccctggtatgtgagccctgcagagcctggcttcacaccatacttgcatcctctcttgtgctctctttccactgcctctgtccggcaccccattcatgtcatctcatctccttaccagtctctctgcctccagagtcttggttgtctccctcagctgctgtgattctcatctttaaacactcaggttggattcttttacttctgactccataaagtcaagtcccggttccttggtggggttctggtcacagccggccatttctagcttgatctgtcactgcatctcttcatgcaccaacagtgaaatgaccacatcatcccaggagtactcagcaacgtgatgcatccctgctttgatcttattgcagtgctctgttcttctctcccttttctcctccccttttccaggtatagaaatcatgttcatcctttgagtaatattcagctcaaatgccatcttttaagtgaagtcagaattacttctcccttcttctgcatgtctgtatcactttcttaggcagttatggtttcattgtaatgttgggaaaaactcccagaccgtgtttttcctttactgtcacaccacagcaatcaacacagaggacttatgtgaccaaaagtgtggagggattttctctacactctaagcagtggacaccagctgggtgtcctcctgtttaattctgacactaccagatgatcatgtcagatcccgtgggttcagggctcagtccccaagactgcaccaccggttgccagtctgggcctccaaaacgtctgactgactggctttaagttgggactcccatgatcctatctttgagttcgattaatttgctggattggcacacagaactcagggaaacacttaattttactggtttattataaaggacattgcaaaggatacagatgaagagacacataggacaaggtatgggagtggggtacgaagcttccatgccttccctgggcgcaccaccctccaggaacctccatgtgttcagctgtcctgaagttctctgatcagacccagccttctggggtttttttgtgtgtgtattttttttttttttttttgagacagagtctcgctgtgtcgcccaagctgagtgcagtggtgcgatctcggctcactgcaagctctgcctcccaggttcatgccattctcctgcctcagcctcagccgaaagttatcacttgaaagaatagttagaacattgtcactaactggtctggtattctcgttcttaggatggaggttctctggatcaagtcctgaagaaagctggaagaattcctgaacaaattttaggaaaagttagcattgctgtgagtatgttatgaagtttttcttctaagttcctcattgataagttaatgagtcagtaagaaatggacaagaggaagatgggaagtcaatgaggggaaagtttataagaaaagtggtattttctcactagactcttccctgtctggagtctatatacactattctctctcgcattagaatgagaaaagtgactttctttatattaaaatctgtatgtcttgaaaaacaggggccaggcacagtggctcgcacctgtaatcccagcactttgcgaggccaaggcgggaggactgcttgagcccaggagttcagctccagcctaggcaacatgatgagaccttgcttctacaaaaaaataaaaataaatagctgggcgtggtggtgcacacgtgtagtcccagctacttgggaagctgaggtgggaagatcacttgagaggctgcagtaagccataatccatgattgtgccattgcactttagtctgggcgacagagtgagaccctgtctcaaaacaaaacaactctttataccatgtaaaaagatggttgcttgataaggcaggttaagaaaatgaaacaaaagagtaaaaaataaggggccgggcacggtggctcatgcttgtcatcccagcactttgggaggcggaggcgggcagatcacctgaggtcgggagttcgagaccagcctgacaaacatggagaaacccccatctctattaaaaatacaaaattaggcgggggtgttggtgcatgcctgtaatcccagctactcgggaggctgaggcaagagaatcgcttgaacccgggagggggtggttgtggtgagctgagatcacgccactgcactccagcctggacaacaagagcaaaactctgtctcaaaaaaaaaaaaaaaagcccaggcacggtggctcacacctgtaatcccagcactttgggaggccaaggcgggtggatcacctgaggttgggagttcgagactagcccgacaaacatggagaaaccccgtctctactaaaaatacaaaattagctgggggtggtagcgcatgcccgtaatcccagctactcagggggctgaggcaggagaatcacttgaactcgggaggtggaggttatggtgagccgagatcgcgccattgcattccagcctgggcaacaagagtgaaactccgtctcaaaggaggaaggcaaatttgtgatgatgataaatgaagtattttcctagagtattttaaaatagattgagtatttttctaatcaccagtattttctcttcttttacattccctttcctctaggtaataaaaggcctgacatatctgagggagaagcacaagatcatgcacagaggtaagaagttatttgctagttattttgctttgaattttagatataatccaaaggtggttgcttcctcttttttgtatgttttgttttcgtgtaaaagccttttaataacatgttaaatcttttattaaaagtctttgtttagtttggtggctgaggcagcaactcctaccctctttttggtcttgctacacttattgcctatagctgtgatggacaatagtcatagtcaccctggaagcccagctaagagcctcaaccagcacttagttacccagtctccagtgtcactattcactggaacagtgaacaatgcatatgtgtatgcctaaagccaggactggccagctgcatatgagttttactataaaagaaactgatttattgctgggtgcagtggctcatgcctgtaatcccagcactttgggaggccgatgggggtggatcatgaggtcaggagttcgaaaccagcctgacccaacatggtgaaacccccctctactaaaaatacaaaaattagccgccagccgtggtggtgagcacctgtaatcccagctacttgggaggctgaggcaggagaattgcttgaacctgggaggcggaggctgtggtgagccgagattgcactgttgcactccagcctgggcggcagagcgagacgcaatctcaaaacaacaccaagaagaagaacaaaacacattaaaaaaagaaagaaactgatttattttaataaaggtacacatacacttaaccatgtgaccataccatcttaggcatttgtccaagataaaatataacatgcatccacacaaatgtttaaagaagctgtatttcttgtagaaacaactgaaatgtccttcaacaggcaaagagagaaacaaattgtagtatatctatacaacagaatactcttcaacaataaaaatgaacagactactgataacacctaactttgaatttcaggaacatttatgctgagtgaaagaaggcagacacaaaacagcccaagctatttccatttatgtgaaattacagagagaataacaacaaatccatagtggcagaaagtagatcagtggttgccttgaggggtctagggagagattaaaggagcatgaaggaactttttggggtgacacaaatgttacatctttttttttttttaagagcacacatccacttctatttattgacttctcattagtttaaatccttgaagggggctgggcgtggtggctcatacctgtaatcccagcattttgggaggtcgaggcgggcagatcacctgaggtcaggagtttgagaccaccctggccaacatggcgaaacctcgtctctgctaaaagtacagaaaattagcctggcgtggtggcgggtgcttgtaatcccagctaatcaggaagctgagggagaagcttgaacctgggaggcagaggttgcagtgagccaagattgcgccactgtactccagcctgggtgacaagagcaagactccgtctcaaaacaaacgaacaaacaaaaaacattttggctaacacgatgaaaccctatttctactaaaaatataaaaaatagccgggcgtggtggtgagtgcctgtagtcccagctactcgggaggctgaggcaggagaatggtgtcaatccagaaggttggagcttgcagccagcagagactgcgcaccactgcactccagcctgagcgacagagcgagactccgtctcaaaaaaaaaaatccttgaggggtacagcatcacttggattctgtttccaatagccatagtaggaagagtgcttcagaatttggcacaaactatgcccctggttctgtgggcccgagttacctttctccagattactccggtgttgtttggtttgccaccaggagtcactgtgttgttctttgctttgtatacataagcacatctcttgcccaaatagaattctgtttcatctcgggcataaacactttcaattttaggaaggaactgcctgctcccattggttctggataccctgcttatagccagcaaaaatggccttgcaccacagccttccacatatttccttttagaagtcctgttcccagcaggcctccatggcatccaagatggcgggaagtgcaaatgttatatcttgacaatggtgatgtatacatggctatatacattcgttgaaagtcaactgtccgctaatgtgactgcattttatagtatgtaaattatacctcagtatagttcctttttaagaagatgaagccagaggacaggaaattggtaaacatagtgctgtcggccatgtcccttcagccacagcactgccaacactgactggtgttgagaggagagctgaagagatgagtggactagggtgggctgttggaactgactggatagcttacaagccccgtagattaggtgatacatcactggtgagcaagctgagcactgagtggagccacctttgacatggctgactcctggatgcatctttttttttttgacgtcccccttctctcccctagtgttccttttgttagtctaacttcttccagatactgatctttcaggtcttcagttagaggtcacttaattatgacagtgtttgcaagtgttggagggtggttctgattcagtaggtctggggtagggcacagggacctgaaaatttagaaataggcaattagctgggcgtagtggctcacgcatagtaatcccagcactttgggaggccgaggcgggcggatcacttgaggtcaggagtttgaaaccagactggccaacatggtgaaaccccgtctccactaaaaacacaaaaattagctgcgtgtggtggcgtgtgcctgtaatcctggctactcaggaggcttaggcaagagaattgtttgaacctggggggcggaggttgcagtaagctgagatcatgccattgcactctggcctgggcgacagagactctgtctcaaaaaaaaaaaaaaaaaagtttaattgtaaaaaatatatacataaaatttaccattttctcaagttttcagtgtatagttcagaggcattaagtacattcacattcttgtgcagccatcaccaccatccatctccagaacttttttcatcttacagacctcaagctgtgtccatgtaacaactctcactgggcgtggtggctcacacctataatcccagcactttgggaggatgaggtgggcagatcacctgaggtcaggagttcgagaccagactggccaacatggcgaaaccccccatctctactaaaaatacaaaaattagccgggtgtggtggcacacgcctgtaatcccaggtacttgggaggccgaggcatgagaatcacttgaacctgggagacagaggttgcagtgagctgagattgtgccactgcactccagcctgggcagcagagcaagactccatctcaaaaaaaaaaaaaaaaaaaaaccccactatttctccctttccccatccattggaaaccatcaatctaccttctgtctctatgagtttgactgctctaggtacctcatatgagtggaattatacagtatttgtcctttagggactggcttgttttagttagaataatgtcttcaaggttcatccatgttgtatgatgtgctagacactggttcttaagtaagtgctggttctaatgctgtggtccatagccgcattttgggaaacactgcattgggggtagagtgagtagctaggtgggctgtctagaaagaggagtaatggcagcttgtcctagtgggatttgtggggagaaaagaaatagaaaatgaagcacaaagaagaatgttgtgcaagtgttccctctcattccagggaaaatttctcaaaatattgaaagatttctgtccatggcagacttgtagttggaatttgcatgaccagcttatagcttgtacatatggttcagttttgtgcatctattaatttcaacctgggccaccaaactgcattgttaagaactagagactattggctgggcgcagtggctcacgcctgtaatcccaacacttggggaggccgaggtgggtgaatcacaaggtcaggagttcaagaccagcctggccaacatggtgaaacccccgtctctactaaaaatacaaaaaattagctgggcgtggtggcggatgcctataatcccagctactagggaggctgaggcaagagaattgcttgaacctgggaggcagaggttgcagtgagctgagattgcgtcactgcactccagcccaggcaacagtgcgagactctgtctcaaaacaaaacaaaacaaaacaaaacaaaacaaaaaaaaaaaacaaccaaaagcattcagagagaggacaaccattttggaaaacaggtattaaaatttcttgttaaattataccaccatgaactgcactccttggcatttacctaagataaatgaaaacatttgctcatgcaaggacttgctacacaaatattcatagcagctttatttataattgcccaaaattagaagcaacaaaaatattattatcagatgagtgggtacattttggtgtattcaaacagtggagtacaactcaggaataaaactattgatacatataacttcgatgaatctcaaaaacatgctaagtgcaagaagccctgtacaaaagagtacatactgtgagagcctgctaatacgaaattttagaacagacaatccacagtaacatatagcagatcagtggctgcctgagggtttagaggtagggatagtttaacatcaaagtgcataagggaacttttttggagtaatagaaacactaaatcttgtttgtggtaataggttcacaggtgtgaacatttttgaaaatgcatgaaagtatacacttaaaatgctaactgtaggctgggtgcggtggctcacgcctgtaatcccagcactttaggaggccgaggtgggtggatcacctgaggtcctgagtttgagaccagcttggccaacgtggtgaaacccttgtctactaaaaatacaaaaattaagccgggcgtggtggtgggcgcctataatcccagctacttgggaggctgaggcaggagaatggcttgaacctgggaggcagaggttgcagtgagccaagatcgtgccattgcactccagcctggacaacaagagcaaaactctgtcttcaaaaaaaaaaaaaaaaaaatatgttaaatatagaaagccacctgctttctaattgtactggctgccatcttgtcttctttctactgacaagaaagtatcaataagaggtagtgattggtttgagggggaaacagtttttctagcagtttagtccttaatctgtggcttcttaagacctctgagttccatgttagaatattttaatgtattagtttctaggaaataggagtagctgaaaggagaggaggagtgaacattcttaagcatggagttatgttctaggctgcgattgacatatgcagtctaccactatgcaaggacgagtgaggtcagtgttgtaggaacatctggtggattaaaggcatcccatcatctgtgaagtggagtccgcctgcctactcagaggttgctgtgaggattaagaaattacatatggaaagcaactggcaaagtgttttgcgtatagaaagctctaacatgctaattgccttccccgtttctttatataatttataaggaaactaaaaaccagagattaaaacctgagctttggtttctatatgtgtaaaatatagttcttatgtttgtctctcattaacctgtaagtttcttcaaatctgggaacatgtctaattgctgtgtatatatcttcagtcctgaagatgatagtagaaaacagttcttctttgaaggtttgttacatggatggatgtatgattaacttgtgccagaacacacaggagtcaacagtgaaactgggccaaggacccatgtctcttactcttaacacagtgtttctttctagtcctgtgtttttctgtactatgtacctactatggatcatgccctgtgtttttcaatgaagacctctaactttatttccattccaaggagagggaggtttcagcacactcctggaacaaccagctttcttttcccttccgcctagtgctgcccccacctgcttagggctttcttttttggcttcaccaattgttgctctttggcatgaagagctgctttgtgagccagatgggtctctgaacagatgtctttgatggagagtttaccacttgcacagcgaagaaagggaagtcactagaaggacttctgtgtgggctggcctggctgctcagcatttcagactcctgttgtttacaagtcttctccagaaaccctggaagaattaactgtaaggcctggactatggaatggtacctgtgcaccagcaattcctgagcaagcagcacagtgagtagatgattcctggaaacctgagttcaggtgaaaaagagagagagcagtctccttgtccctgcctgtgggcttccttatggccagttctacctctgttctaaatatattcttcactgatgaaatttcaacttcatttattcttctgtccttgaggaaaaatggggaagagtaaagaggtcttttctctgcctcaaatttttatttgttcttatttgtttatacttatttgctggagatagcttagtggtttttttctttttctttttgagacagggtcttgctctggtgcccaggcttggagtacagtggtgcagtcatggctcactatagccttggcctcctaggctaaagcgattctcctgcctcagcctcctgaagtgctgagactacgggcatgagctgctaggcttgggttgattatttcaattaccatttgctatgtaacgaggctccaaaacgtagtagtttaaaataataatttattaccttacacagtttattactttttctgtgggttggcaggtcctctttccccatcctctgtgaggctaaagccctggtttcttccagtagcaagagggggtaaaccctactactcaagtaccctttaagcctctgcttatgtcaagtttgttcatgtcctgttggctaaagcagatcatgtgtttcaagccaagatttaaaaagtagagtgaagtctccatctcttgttgggaggagctatgaaatatggtggcccgtttttttccactgtatcacagtgataaagttgaaggttcaaatcgtgactgtgctacttgttgtgtaaccttggatgagtcgtttaacttctccaaacctcaggaaaatggagaaaacagaacctacctaaagggttgtatgcagattaattaatacatacaaagcacttagaatagtacttgacacgtagtaggcacttaatacattttacctgttgcttagataaattggtagaggtttttatgattaccagcaacagaaaccagcctgacttggtttaagcttctaaaaatttattcattagaaggatctggctgggagcggtgactcatacctgtaatcccagcactttgggaggctgaggtgggcagatcacaaggtcagcagttttgagaccaggctggccaacatggtgaaaccccatctctactaaaaatacaaaattagctcggcgtggtgccgtgcgcttgtaatcccagctgctcgggaggctgaggtgaaagaatcgcttgaacccaggaggcagaggttgcaatgagctgagatcgtgccactgcactccagcctaggtgacagagtgagactctgtctcgaaaaaaaaaaaaaacagaaaaaaagaaggatccaagggaagttcagagagtcctttgacaagctgatcctacaaaccacggtagggtaggaacccgggctactctggttgggaggttggctcagtcaggcagaaaaatagctccctggcgcacaactctaacagtgctattgctgctggaccaactgtcctctcctagccttatttagggggtaggcatgggctcagtgatctcccagaggggtccagagtcagtgcctctgaagaatccactctcaccacagtcatgcagatatcaaggggacagcatcctctcctgctcagtgatgggggctagttggtagtccattgcctagtccaggttgaaagtgatttctgagtgtgccctgctctaataaaaagtaacgtacaaaaatagtttataacacaaggtgctctgggggcaatgttttgctctttcaaagcattcactctaggtaggattcttcaaatataagttttcatagaatcttgaaaaaggcaagcaaattacatcaatttgattcatacatttcttcttaggaatatgtcagtgatttaaaggtaggtattcctgcacttacgaatttttaaatgagaagaagtgcctcgtggtattttgaggaagattagctgttttcaggtaccatttagttactgtttttccacctaggtggtagcctcttgaacatttttcggttatctttcttcaactgggtgagtatgtcctggtcctagtttggtacattgccttggttgtacacatggtagctttcctacatttctaatgtgtctgcaccaggtgggaacccaaaggcaagcatgttctcaccctcattcctgaagtgatttgtctctgccataatggagcaggacttcttgggcagaataagttcaactgacattcccagtgccgaagctctggctagctcaactggtccactgtgatttgttctgttattatacagaacattgtattctatttcccctgggtgttcaaagggagaaacaatctgtgtggtttagcctgatgtatgtgatttgtgagctgttgatcagggggtgggtatagagctgtcacccctttggggagtgttaagtttctccaaaatctctgggtgacattctgacagtcatgggtggtacaggtatatgctcctccgtgtctattcgcctacctcctcagtcttttcccccatcaaagagaagtaattcattttgtaaaatatttatagaatacctgccaagtacaaggtattaggtgaattactcgttaggcataaaattggctcataaatgaattgtgtcctccaggagcttagagtctaacgggaaagggacatatctgtaaatgactcttgtatattgtggaacatagccaatatcattgtttagtgcgtgaatcactaccctgccaactttcagatagaatccgatgtgacatagtgacatagattattagtcagaattctttggtgtggcagaaacccaactcaagattacttaatcagaaaagagaatgtatggtttgggtcaccaggaggtcggaaggcagggatgaatatgaggttgaaacgatggcctcaggtcacctctcagctttgctcattcttgtgtgggcttccttatcagtcagattctcttcactggaggcaggatggacctcactagccccagacacatctagtccttactgctccctatcccagagaaagtactccacccactctccccagcatccagatcagtgtttgaaccactgattggcaaattgcctctgcttggagtgcttgcccatggctggaccattcactgtgtccaggggactagtgttgcctggtgggccaccctgggttatacactcacccctgtggtacaacagatggcgcctcttgatgaacaccctagcagaaacacttgatgctggggaggagtgtatcccaaatgaaaaggaggggctttgttaccaggagatggggagaacgaatgggtgctgaaagcaagcaaatttttaaaaagttttccgcttacaaattctgttaagcattgggtcagaaagacaaaacactaacataggatgaaaacaacaagcagttaacacaggtgtgagcaaactggtccatgggctaaatttggcctgctgcctgtttttgtatggcctgcaagctaagaatagttttcaaaattttgtgacatgtaacaattatacaaaattcaatttattattatttttattttttgagaccgagtctcgctctgtcacccaggctggagtgcagtggcgtaatctcggctcactgcaacctctgcctctcaggttcaagagattctcgtgcctcagcctcacaagtagcggggatcacaggcatgtgccaccacgcctgctaatttttttgtatttctnnnnnnnnnnnnnnnnnnnnnnnnnnnnnnnnnnnnnnnnnnnnnnnnnnnnnnnnnnnnnnnnnnnnnnnnnnnnnnnnnnnnnnnnnnnnnnnnnnnnnnnnnnnnnnnnnnnnnnnnnnnnnnnnnnnnnnnnnnnnnnnnnnnnnnnnnnnnnnnnnnnnnnnnnnnnnnnnnnnnnnnnnnnnnnnnnnnnnnnnnnnnnnnnnnnnnnnnnnnnnnnnnnnnnnnnnnnnnnnnnnnnnnnnnnnnnnnnnnnnnnnnnnnnnnnnnnnnnnnnnnnnnnnnnnnnnnnnnnnnnnnnnnnnnnnnnnnnnnnnnnnnnnnnnnnnnnnnnnnnnnnnnnnnnnnnnnnnnnnnnnnnnnnnnnnnnnnnnnnnnnnnnnnnnnnnnnnnnnnnnnnnnnnnnnnnnnnnnnnnnnnnnnnnnnnnnnnnnnnnnnnnnnnnnnnnnnnnnnnnnnnnnnnnnnnnnnnnnnnnnnnnnnnnnnnnnnnnnnnnnnnnnnnnnnnnnnnnnnnnnnnnnnnnnnnnnnnnnnnnnnnnnnnnnnnnnnnnnnnnnnnnnnnnnnnnnnnnnnnnnnnnnnnnnnnnnnnnnnnnnnnnnnnnnnnnnnnnnnnnnnnnnnnnnnnnnnnnnnnnnnnnnnnnnnnnnnnnnnnnnnnnnnnnnnnnnnnnnnnnnnnnnnnnnnnnnnnnnnnnnnnnnnnnnnnnnnnnnnnnnnnnnntccagcctgggtaacaagagcaagactgttcagaaaaaaaaaaaaaaaaagaatttaaacacaaaactaaacttttaaatgcgtcagctttaagttctcaaggaaaacatgataagtgacatgggtaggagacaggattatttttcctgatcctggagctctgaaaagaattagctgccaaaatttatgtcgagtcttttcatccgaaggtgaaccaagtaggtagttgtgctgtgagttaaaaagggttggaggtgcagagggcgctaggatactgctctctttcattctatttaaagcaataatttgcattgccaccctgccgttcttaacctgctctaattatcaaggccttattttgactaagaccctgaaaaagcgttgcatgatttagatcaatacggagttcatccaacttagccgtaaattatttctgccttggagtcgttagctgataaagatcaataaatgttaagaacagttttaaattataactcaacttgtttttcttgtccttctatctaatgaaaccatgtgtaacctagatttttaaattttacttatttatgtatgacatgtatgtgtgtatgtataaatgaacgaatgacaggtctcgctcactctgttgcccaggctggaatgtggtggtgcgatcatggctcactgcatcctcaacctccccagctcaagcaatcctctcacctcagccttctgagtagctaggactacaaatatgtgctatcatgcctgactaatttaaaaatttttcttttctagagatgcggtctctctctgttgcccagattggtcttgaactcctggactcaagtaatccacttgtctgggtctccctaagtgtgggactacaggtgtgatccactgtgtttagctgccagcttagatttttgaggggtacatagcccactgtaattggatacctctcttcagagccatagtagcttattataccttggggccatcctgcttggagtgtgcctcaaaagtgttcctttattccctaggttagagagttatgtaaaaacggggctctcaggccagaatgagatttaaggcttctgcagagcctatatgaaagtgtttttgggccgggcacagtggctcatgcatgtaagcccagcactttgggaggttgaggagggcggatcatgaggtcaggagatcaagaccatgctggccaacacggtgaaaccccgtctctactaaaaatacaaaaattagctgggtgtggtggcacacgcctgtaatcccagctactcgggaggctgaggcaggagaatcgcttgaacccgggagtctgaggttgcagtgagccaaaatcaccactgcactccagcttggcaacagagcgagactcggtctcaaaaaaaaaaaaaaaaaaaaagtttttgggctgggcacggtggctcatgcctataatcccagcagtttgggaggccaagatgggtggatcacttgtggtcaggagttcgaaaacagcttgaccaacatggtgaaaccccatctctactaaaatacaaaaaaattagctgggcatggtggcgggtacctgtaatcccagttacttgggaggctgaggcaggagaaccacttgaacctgggaggtgggggttgcagtgagccaagatcacaccactgcactccagtctggatgacagagcaagataccatctcaaaaaaaaaaaaaattttttttttgtatccttttcctggggagagctgggagtctccaaagtatctcacggtgtcccagtgacagcctccagcaaatggggtcttcagcaatggtcaggattacaacctctaaattcttcctctccattcagacttgttggcactgatagcaagatctgaagtggcttgtttggttttgttttgttgttttataagctgtttgtagcagactcacacgtaatgatttgagtggtttcttctgcaatttttgcaaggaactatgctgcctctgccaggcatcggtgagcagaagtcagagtggcccctgcctccaccagcctgaggctacacacaggattctgttctgagcacggttcctatctgtgtgtgaccaacgactgttgtctgatccttgaaacatagaaggttgcccatggtattcacaaggtgctcctggctacatctctctcccatcacagccatcccatagctgtgtggcttacacaggaagggattccttttgactgtgtcagactgccctgccttaaagatggagggagacagagtggctcattagtagtggaaaattcagtatgctggtctcttggttagaaatgtgagtctcgttttatctagaattatttcatctgctagattcacagtgacggattatagctccaggtgagtttgtctcttagctccttaagagaggcttagatctctttagggaagcatggaggaggtggtatttgaactgagctttgaagcataggtagaagttatgtatgtggcagggtcagggaaaggaattccaggtagagggaagcatgaatcatggcatagaggcaggaaaacacagacatgtttttacaggaaatagcaagtggttcaagttgtctacaacaaagggttcctgatggcaaggggtgagaattaaagtaagaaatagttgaagcagtgaggagggtcttcactgccatgttcaggaagtggattttatcatgggcaacaggaagcagtggaatgatcctgcacagagaagtgagatgcgctgtgctttaaggaagaggactctactgttacggctaaggtgagctggagaggggagaggtcaattaggaggccgttgctatgggccagtgagagataagagggggtctgagttaggatagtggcagagtgaagggacaggatggggacagatgggagagagatggtgcaaagggcagggactggtgtgggaagatgggtaggggagtagcagggagacttggccttggcccttcctggggtggttgtggtgggaaggagcctgaggcccatggccgtgctccagggctgtacgtggagagctgtgttctcctcctcctcagatcacaaagcctcatttctaatggaaacctgaggctggggctgccctttcctaagttacagattatttcctgaggaggatcccagccccaagagagctggtttgatttgaaaatctggacacataggaatgaaactcagagtgaattttattaaccactacccaaagcaagatggaacttagctcatgatgcccaataccatagaggaacaagagtaggctgggcgcagtggctcacgtctgtaatcccagcactttgcgaggctgaggcaggtggatcatgggagggcaggagtttgaaaccatcctggccaacatggcgaaaccccaactgaaaatacaaaaattagccgggtgtggtggtgggcacctgtaattccagcaggcttaggcacgagacttgtttgaacctgggagatggaggttgcagtgagtcaagattgcgccactgcactccagcctgagtgacagagtgagactctgtctctaaataaataaataataaaataataatagagtctagtgatatagctcagcttgaggatgggaaccagcataaggcttgataagaccaaactaattagaaacaaacacgatggaattttcttttttcatttgaaaaaacatttcaaagtttattgttggaggtaagtgcttaccaccctgtgaagtgcgtgcagggctgtcattaggtggtggtaacaggcaccaaatccccaagaagctgctacccaccaagtgacctccgagccactgtgtcctctccctttacctttctggctgtgcatagaaccttatggaagtttccttctagcctggctgttggcttcctgggtgatcctggcagagttgtttattatttctgaatctcaccttcttttagaggtaatctcaattccttttccatctcctggaactgtcctcaggatcagatgaaactgaccaagtgttgtgtaatagcattaaagttatggcatttaaaagcacattgcgtatacaatgctgggctccaaagaggcagaagagatagttcctatcctcttagacctgtgagtcctagttggaaaagcaagactgtactttacaagtcagatgaaaggtttatgggtgaattaacacatgaggtctgggatttgccttaagacattccactccctcccaccctgcaaagaaaaagctgggggttataatgaaataagattggggcggggcacagtgactcacacctgtaatcccagcacttgaggagctgaggtgggtggatcacctgaggtcaggagttgagagtagcctggccaacatggtgaaaccccatctctactaaaaatacaaaaattagctgggcatggtggcacatgcctgtagtcctagctactcgggaggctgagacagaattgcttgaacccgggaggcggaggttgcagtgagccgagatcgcaccagtgcactccatcctgggtgacagagcaggactctgtctcaaaaaaaaaaaaaaaaaaataagattggtaaaaaaatggattattgttgaagctgggtgatgggtacatggttactgtctctacttttgtgaatatttagatttttctgaaaaaaaattggctaaaagaaagtagcatatgtactgacataacaagtgacatacatgataaaaaacctcaagggttccaaggagagggactcttgtgggtggacagctgtcaggggaggcttcacagaggagctgggagctgggctttgtttcagtgaggattcttggttacacataacagaaaccaatttgagccagtgtaaacacaacagggaacttccttatagggatccagggggcccttagggaacgtgagggccagatgtagtcagtgctcgggaagggatgggacaagacagggaccagaaagccactggaattctaggcggccttcctgcttattctgcgtgctttgcacttgtttctttgcttctctgtccagagggcaggaggaagacaccacccctcagcaaccagtgtgtatcaagtccatcccagacacagcccagattcaacctgaccctcttagcacaattcccaagtctctgagtaatccaccaacacttatattatgtacattgtgggtggggctccttcgggtgagtgaagggaggtaattagggggatacatctgaattaggcagccctcctttctcccttcgtctgaatcagactggaaggacagtaggattatacgtgaagagagaagatatctcgattgaacagtaagtgcttcagagtcaaacacgaagggaacatttatggaacagtatagatcctcctggcactgagggggtgtgaaccccaaatatctgagactgctctcagttaatttagaaagtttattttgcctaggttgaggatgcatgcccatgacacagcctcaggaggtcctgacaacatgtgcccacggtggtcagggcaggggttttttaattaattttttaaacggagtctcactcttgttgcccaagctggagtgcaatggtgcgatctcggctcacttcaacctccacctcctgggttcaagcgattctcctgcgtcagcctcccgagtagccgggattacaggcgcctgccactacgcccggctaattttttgtatttttagtagaaatggggtttcaccatgttagccaggctggcctcaaactcctgacctctggtgatccacctgccttggcctcccaaagtgctgggattacaggcgtgagccaccacgcctggccagaggttggttttatacattttagggagtcgtgagacatcaattaatatacgtaagatgtacactggttctgtctggaaaggcagcccagctcaaagcagggaggaggctttcaggtcacaggtaggtgagagacaaatggttgttttcttttgagtttctgattagcctctccagaggaggcaatcggatatgcatttatctcagtgaatttgaatagaatgagaggcaggtttgccctaaacagttctcagcttgacttttccctttagcttagtgatttttgggggccccaagatttattttctttcacatttccccccttttctttttaaaatttttttagaaagcattttagaacaaaatgaatctttcctctcatgtttcattggatctctcacggctaggacagtttattcctagaccggtaggtaggtcccaagttactaagaaagcccatttttagcaagttgtggtctcatgtccccatgagagaaaatagggggagaaagggacaaaaaccaacaatcaccaaaaaaataatcnnnnnnnnnnnnnnnnnnnnnnnnnnnnnnnnnnnnnnnnnnnnnnnnnnnnnnnnnnnnnnnnnnnnnnnnnnnnnnnnnnnnnnnnnnnnnnnnnnnnnnnnnnnnnnnnnnnnnnnnnnnnnnnnnnnnnnnnnnnnnnnnnnnnnnnnnnnnnnnnnnnnnnnnnnnnnnnnnnnnnnnnnnnnnnnnnnnnnnnnnnnnnnnnnnnnnnnnnnnnnnnnnnnnnnnnnnnnnnnnnnnnnnnnnnnnnnnnnnnnnnnnnnnnnnnnnnnnnnnnnnnnnnnnnnnnnnnnnnnnnnnnnnnnnnnnnnnnnnnnnnnnnnnnnnnnnnnnnnnnnnnnnnnnnnnnnnnnnnnnnnnnnnnnnnnnnnnnnnnnnnnnnnnnnnnnnnnnnnnnnnnnnnnnnnnnnnnnnnnnnnnnnnnnnnnnnnnnnnnnnnnnnnnnnnnnnnnnnnnnnnnnnnnnnnnnnnnnnnnnnnnnnnnnnnnnnnnnnnnnnnnnnnnnnnnnnnnnnnnnnnnnnnnnnnnnnnnnnnnnnnnnnnnnnnnnnnnnnnnnnnnnnnnnnnnnnnnnnnnnnnnnnnnnnnnnnnnnnnnnnnnnnnnnnnnnnnnnnnnnnnnnnnnnnnnnnnnnnnnnnnnnnnnnnnnnnnnnnnnnnnnnnnnnnnnnnnnnnnnnnnnnnnnnnnnnnnnnnnnnnnnnnnnnnnnnnnnnnnnnnnnnnnnnnnnnnnnnnnnnnnnnnnnnnnnnnnnnnnnnnnnnnnnnnnnnnnnnnnnnnnnnnnnnnnnnnnnnnnnnnnnnnnnnnnnnnagccaggtgcggcggctcacacctgtaatcccagcactttgggaggtagaggcgggtggattacctgaggtcaggagttcgagaccagcctggccaacatggtgaaaccccatctctaccaaaaatacaaaaaaattagccgggcatggtggtgcatgcctgtaatcccagctacttgggaggctggggcaggagaatccttgaaactgggaggcggaggttgcagtgaactgagattgtgccactgtagcaggacaagtcacagacaaaacccctcagacaccgagttaaagaaggaatggctttattcggctgggagcttcagcaagactcacatctccaacaaccaagctccccaagtgagcaattcctgtcccttttaagggctcacaactctaagggggtccacgtgagagggttgtgatcgattgagcaagtggggtacatgactgggggctgcatgcactggtaatcagatcagaacaggacagggattttcacattgcttttttatacaatgtctgtaatctatagataacataaccgattaggtcaggggtcgatctttaactaccaggcccagggtgtggcaccaggctgtctgcttgtggatttcatttccgccttttagtttttacttcttctttctttggaggcagaaattgggcataagacaatataaggtggtctcttccctcaccaccacactccagcctgggcaacaagagcgaaactccatctcaaaaacaacagcaacaaaaaaacgggtgtactatagtttttgaaacatattttttctctctccactttcctgtttttactaaagacaaatcatggtaggaccaatttgctttattatacttgggcagattatttctataaagtacagtaagaataattatttttcacataggcttttaaaattggccttgatggaactttgctctgtagaaggaatctcagataagacttttttaaagctgagcccagccatggatttgtaccatcaaatacatacgagttgggtgaattcctctcctcttgatgtcccaagataacttggggctcctgggcctatcagaaagtgacattctttacttaccacaggccaagatccctgtacagggactgtgtagacaaggtatgaggccagttttcccaaggggcttttattggctctataaatcaagttggattccttaaaggggaaagcacaccattctagtcaaagccttggtaaaacaaccagtttctccaattgtgtcctgttacaaatgaaaacagatttttattgcacatatgcagataactatattgccgtaagttaagaatactcccacatagtttccaaattctggagtaatcaggtagagtgaaacaaatatgcttcaatttttttcataggcgtatgtatactttattgttaaaacctggctgggtgtggtggctcacgcctgtaatcacagcactttcggaggctgaggcgggtggatcgcttgaggtcaggagttcaagaccagcttggccaacatggtgaaaccccatctctactaaaaatacaaaaaattagctgggcatggtgctgtgtgcctgtagtcccagctactcaggagtctgagacccaagaatcacttgaaccctggaggtggaggttgcaatgagctgagatcatgccactgcactccagcctgggcaacagagcgagactgcatctcaaaaaaacaaacaaattgttaaaacctttcaatagctcaaaagaaaagtttccttgactctaaaaaacaacacaaagaatcagcagcatttaagcaaaaaaaaaaaaaaaaagattacttcagtctcctgtaagttcagttcatgcagttaattcctgttctgcttgatattcatgaacatttcagctctgcatgagtcatgaaagtttttcctctgttttgatgtcacagtctttaaagttatcagaagcctgtattcaagagcacctgttaagagttttatagttgattataaaaccaccttttaaagagaaactgcagggctgggcatggcggatcacctgaggtcaggagtttgagaccagcctggccaacgttgtgaaagcctgtctctacaaaaatacaagaaattagtctgggtggtgatgagcacctgtaatcccagttactcgggaggctgaggtaggagaatcacttgaacccaggaggcggaggctgcagtgagccaagattgtgtcattgcattccagcctggtcaacaagagcgaaactccgtctcaaaaagaaaaaaaagagaaaccatcattgcaaaattataactaagacagtgaaaaagatctgaccgaactgactccatgttgcttctaatctccaagctgtccttgttcattcctgggcatagacagaactaactttgggaggaacttagtttatagttgagctttgaaacaaagacgataacagccttttccccaaacccccttcctgcctggggactaggctgcctaaagccacatgattagaagttatggttattttactaaataattcaagacttagctattttcactaaaccaatgtcagtctcttattcatcaatatttacagaagcaaagatttttttttttttttttaaacaaagtctggctctgtcacccaggctagagtgcagtgacatgatctcagctcactgcaacctgtgcctcctaggttccagtaattctcctgcctcagctttctcagtaactgggattacaggtgcctgccaccacgcccaactaatttttgtatttttagtagagatggggttttaccatgttggtcaggctggtcttgaacttctgacctcaagtgatctgcctgccttggcctcccaaagtgctgggattacaggcatgcgccaccgcgcccggtggctcacaagcaaagatcatcctgttttgggctgggtttatagttttgtaatccctatgccaaattttgacaccttataatatttggcagggatacatatgaaatttcttgatcaaaaaatgcaaacaaaaatgtaccctggctattcttaaggcatttctaatagtactttaccaacaattttaaaggtagcttatctatcaaagattttacttaagcaacgtaaatttgagaaaacatttgactagtctttcattttctgataaagtatttgatttgtgcttttatttttccttaagccaattaattagagctgttttatattttttagtagtaaatcattgtgtacacaacacataaatacatggacatattagacatactgatagaagtacatcttaaaggtaagacagatctttttttttcccccttctgtctaagacttgcaaactcttgataacttgtttcattatgcttggcagttgtcagctaaatagctcctaaatctgcatattgaaggacacaactctttggtgaaaaatcagaaagcaaaatttacatcataaagtacagagaggaaaagtctggtggtgctagaggaagattaaaggtggatgccaaatcaaacatacaattatagaaatctatcataggattgtataaggagaccaatttatttagataggtactgcctatcttaactggatctctgagctctgagtagagcccacactgaatcctgggtctccaaaaaggaggctagaccacatgatgctttaaaaaaaaatttttttttggccgggcgcggtggctcacgcctgtaatcccaacactttgggaggccgaggtgggcggatcacgaggtcaggagttcaagaccagcctggccaacatggtgaaaccccatctctactaaaaatacaaaaattagctgggcgtggtggtgcgtgcctgtaatcccaactacttgggaggcttaggcaggagaatcgcttgaacccaggaggcggaggttgcagtgagctgagtctgtgccactgcactccagcctggcaacagagcaagactccgtctcaaaaaaaaaaatttttttttggccaggcacagtggctcatgcctgtaatctcagcactttgggaggccgaggcgggtggatcatgaggtcagcagttccagaccagcctggccaacatggtgaaaccccgtctctactaaaaatacagaaattagcaaggcatggtggcaggcgcctgtaaccccagctactccggaggctgaggcaggagaatcgcttgaacccaggaggcggaggttgcagtgagccgagaccgtgccattgcactccagcctgggcgacagagcaagactccgtctcaaaataaaagttttttaaacaaagacaattctaagtgtctaaactacactcttcattaaaaacccaagagtagcctctgttgcaataactattttagtcagaaaatcaggtaacacaatacaaaagcagtttaatagctgagaggaacttgtttatactcttggggagacccatgaggaaaaacaggtttctcccccaaagggagtctggtgcctccttttttttgttttgtttttttttgaggaactccaggctattataaactattttaggtttctcatgcagcagagggtgcaagagaaaggagagagagcagaagtaaatgaagaaaacagaattctgtcaactgagaagaagaaaaatttgtctcaaaaaaagacagggtcctagacagagaaaaaacaaacccaaaacataaaatccttttaaagacagacagacacacacacacacacacacacacacacacacacacacacacacacacacacacatatcttggatgttagcttttaattaagctgacttttaaccattgagctcctttaaaaaaatctgtttaaatctcattgccatatttctgcttggacaaattgctgctgtttcagaagtaccaaatatcaaacctttcagaaagggcttgatttaggaaccaaacctaggctgtcatgaaaaaaagaaggcagaaccttatgtatggaactgcagcctgaggtgatagctattgctccttcagtttggcctggctagcaaaaacgtggcattgttttgtgaataaagccccttaagcagtcaaataaaaaatctttcctttttttctttttttttcttttgctggccgtttttctccctccaccatgccactttttttttcttgtttttttttttttgtgtgtgtgtgtgtgaatttagccacttcagaggcctcgttccccataatttggaactttccttcaaatttgatcaagttgcatagagttggtcaaacccaaggggaaaaagaccgaaacaacaacaaaaagaaacagtaaagcaaaacaaatgatcacacaacctatacaagtactgagagctctaatggtaaggagaaattaagaccagctggttgttaatcataactgtagctaagacaaaccctaattcagttacttagggatgggtttcatgctgaagactgccctctaccatcctagaagcaggaaaagactcaaacctgtcctccctgttggaagcaagctcaaaactccgtaaaggagttacttgccttccattgtcacagaagcaggaaaacttgccttccttgtgtcggaagcaagtaaaactcagaaacaaaaaaggagttgtacagcaaaataaactttagatcacctccaaattttgggagatcggggattctctggaggaggtgcttccaggcgtccgcaaattgtctgattggtttgaggcacaaagatagctcaagctggtaccagccaccaataggagatttgtcaaaggtcaggggcacctccactcagaatcccttggtggttaccaaaatgtgaaccctgaataactgagacaggtctcagttaatttagaaggtttattttgccaaggttgaggaccctgtgacacagcctcaggaggtcctgatgacatgtgcccaaggtggtccaagcacaggttggttttatacattttagggggacaggagacatcagtatatgtaagatgttccttggttctgttggacagaaccaagaacggcaggacaacttgaagcagggagggggcttcgaggtcccaggtaggtgagagacaaacagttgtattcttttgagtttctgattagcctttccaaaggaggcagtcagatacgcatttatctcagtgagcggagggatggctttgaacagaatgagaggcaggtttgccctaagcagttcccagcttgatttttccctttagcttagtgatttctggggccccaagatttattttcctttcacaggggccatgttaggtagaagccaggctgagaaggaatctgattccttatattggttatatttttttctgaaataaatgttagcttttattttccctccaagctgcaagagccattgaactctaacttctgtgcttctcacatttaaagcctcctgatttgagtacttagtacctgccagacattagcaggtaggagttactattcccacctgacagtcaaggaaaggctcagagaggttctgtaactgggctggggccacagagctagtaggtgatagagctaggattcaaacccagatctgcctaacttcagatcaaagttagtggtgctgtttccacaccacactaaatggcctacttaacaatgaaatttatgatgccagctgatgataagaatcactgggtgttaagattcttggttgctaatgaacttgaattagctcaaacaataaagatgatttttttttgtatcagctaaccaaaccccaggaaggatagaaatacagctggcctgatgtataattgtatccagggactcaaatgccattagctcttatactttgattaaaatatactttaaaaagatgctgttagtggccgggcatggtggctcaccctataatcccagcactttgggaggccaaggcgggcagttcgtgaggtcaagagattgagaccagcctggccaacatggtgaaaccccatctctactaaaaatacaaaaattagctaggcgtggtggcaggtgcctgtagtcccagccactcaggaggctgaggcaggagaatcggttgaaccggggaggcggaggttgcagtgagctgagattgcgccattgcactccagcctggcaacagagcaagactctatctcaaaaaaaaaaaaaaaagatgctgtcagctagcctggccaacatggcgaaaccccatctctactaaaaaatacaaaaattacctggatgtggtggtgggtgcctgtagtcccagctatttgggaagctgaggcagggagaattgcttgaatctgggaggcagagttgtagtgagctgagatcgtgctactgcactccagcctgggcgacagtgtgagacttcgtctcaaaagaaaaaaaaaaaatgctgttagatctctccctctcacttgtttccctttcgatgttggctttcttctctcgggccagctgtctaccagatggaaccatggtttcctgttttacagttttgttatcagaagagtttttctcacttcaattagaaagttctgagcgaggactcctgattggactgttaggggtcgtgtgcccagacctatgagatcaccgtggccaggtgatagggagctgtaagtggcccagcctgggtcagggggctgccctgtagccagggacaaggttctcattgtgtcagtctccaccttaagctgcatttgccccaaagaagtatgtgtgatgaggagacaaggaatgcctgacatctgtctttaaattgtcaaacacattcttctaagtctttccattacgggttatcccaagctaggaataactggtgagtagtttcttgaccttttttccagaccttttttggcgaattatgttaagctgtgacccaggcacaaatggggaggccatactttggtggagcctgggtcacataaatatggtgaccttactagaaattctttcctacttactcattgtttaataatgaacagaactctggcctatcttcttttgtcactgtttaacacccacctcactacctcccacctctcctgctaaacaaaattagccttcagcaggtcaaaacagatttttagctaacttccgtttcttgaatagcatatgatgagaactcaagttagccaggtttgttctcctgcctgtaggtggttgattgggtttgtgatactgtgatacattgcatatctgctcctctgaggtagcccaaataatctggtgggggaaatacgctgttttaatgttattttgtgacctttggcaagagattttatcctccagcctcaacttccatatctgtaaactaggactattctgccaaatattacgaagggtcatgaaaaatgagagatcaggctgggcgtagtggctcacgattgtaatcccagcactttgggaggctgaggcagtaggcttgcttgagcccaggggtttgagaccagcctgggcaaagcagggagaccctgtctaccaaaaaaagaaaaagttacttgggcatggtggcgtgtgctgaagtgggaggatcgcttgagcctaggaggtcgaggctgcagtgagccatgatcatattactgcactccagccaaaaaaaagagtgctgtcagggaatctgggattcataagcatttcccttgactgctcttctttcctttattttattatacctctcttctctctgtatcccctataccttttgctctggcttttgttacatcctgtattaaaattttagataatttactttatgttattttacttttttgagacaaagtctcgctctgtcacccaggctggagtgcagtggtgcaatctcagctcactgcaacctctgcttcccgggttcaatgagttctcatgcctcagcctcctgagtagctgggactaccggtgcacaccaccatgcctggataattttttttggtatttttagtagagacagagttttgccacattgcccaggctgatcttgaactcctggcctctagcaattcacccgccctagcctcctgatgtgctgggattacaggcctgagccaccatgcccggtctaaaaatttagataatttattggaatgttgtgtgccaatgaaaagcaaatcctaagctcctgcaacatcatttcatgtttgattgtcagggtttgtgggccctctgggtcaggggatgagcagtgaattggcagagaggggtgtagggagggtagagaaggagagcatttcaaaacgaatgaggcttggaagggaaggaagaaaagaaacttaaaatgcagtttctgggcttggttgtaaaaatcttgaaagtgagggagataaaaatagttgcttgttaggacctggcaggcatgctctggaggctccctgtttgaattcagttgctaatcaggaggtgggaaacaacctctggttcctgctgttagcacgtttcttgcagttggccttgtcaagaaggataatggactggagctgagaaagaagcatcatgctcactcgctaaactggagtggagaactattctctccttactgaatttcagggatttcagcctgccccaagtcaaatccttgttcccagaaataaagctcgttacatctgtaatgtgaatgattccttccccggccacagctcaataagggctcttgtgaaactttggagtacaacttattatgggttgcctttagtcctgttgtctgggccctgattttttagatcctggagagaacactccctcaggggtcagagttctaacccttagccctatcgttaactccctgtgtcaccctaacaggtgacgccttcctattctaggcctcagtgtttctcatctgtgtgcaatggtttataatgcttacctcacagtgttactgtaaggattaaagaagatagtatatttgaactggggaggcggaggttgcagtgagctgagatcatgccactgcacgctagcctgggtgacagagtaagacttgtctcaaaaaaaaaaaaaaaagatagtatatttaaaaggcctgacatagcaggtgttccataaatcagagctgttgtaggatcttcttaggtctgctaggctcgcctgcacctctcattctcccacctagtctctcagctgcatcctggctttttttttccaatgctcttggggaaggaaatttgggtgggggaaaagagcttacaggtaatggctaattgaagagttggggattttctcagaattttaattatctctgctacttaattagctcctgaggccatggatggctggaggtggctctgtagagggtgcgatttgactcatccaggtcagctccctttctctctgtttcttcgtcttgagtggggagagttattaaggctttgccaaggatactaagaagaggttgtttgaagcctaaagtcgccattttaaaaaatcttcatttgcctttttttaaaatcctttaactgttgcttatctacttttggattcagcctttgtcacagatgagcaagaatccagcttccctgtgtcactctgcttgtttctcagcagcccctcgctccttccttccacctcttctctttcttttgggctccccacttccacccctccactgcctttctcttcccccaagccccaccgtcttccatcttgccttagggaattcagctgcttttaatattagcctaaaccaaacaaaatgaaggtattaggatatagtggaaacacatagaaggccgagattcaccttggttcatctgcctgccagggccttgtcagctactcaggctatcatctgatgggtggcacccatcccacctggttggaagaatttagaacgagtccacggggccttgaccacatcttcatctttgcccttacacgtgcacatgttcttgtcatttgttggattctgtctcccctgatggtgacaatccctgtgtcctttttactcttagctcagtgcagatactctgtgtttctagaataaataaatgactccctaaattgttttatccaaacaccttattttagaggggtagaaaatacttaatagttaaacttcaaaatgtgtgctcttgagggaaaaatcaggaggctttgaatagtgttatttctgggacagaaaatatcggagaagaacatactttctgagtttttcataaaacctccttgttcatttttgaggaaggaggggttacccatactcattgtcacagaagctgagcagaattggggttattagatctcagcctcctgtgggattcctagggaagcttatgagcctgggagcctactgggtggttgatgcttcctccagaatgcagcctggccagccagctgctggggaccctctcagcatcacctttcagttatcaaaggatcagaaagagaacgcaaggcccagaggtggcctcaggaagtagagaaggactgggcctgtgatttgaatgtttgagggctctgctaggagaatgtgagaggaagcccagttaatcctcccaggactccaggagcagggcattatcccaagttgggaaggggattcagaagaactaggcatctaggagtagaggtgacagggtgatttgaaaggaagactttttagatgcaaggaccagcacaagagaaggcgagactcttacacaggggcagttagagaggcaggccagccccaaccaggaagaagtggatgtggagacgtgttgtggtgtgaagttggagaggaaaggaagaaacagtggagggcatggaaaggcgggcagaggggcttgggactgtgctctgaggcagaggggagccatggcaggctctgtgcaggggctgtcccgctggaggagtgctggtttctgtgtaggcggggggagggagaagatgctggagaccggaacagtgtgtgaagggcctggctattgtgggaagcaagtgtggggtgctgagggagatcaagaaatgaactctctctcgacttgtctgccatcgtgtacctcttttctgtcccgagagaagagctagacttgggtgtggcaggagcaggggcaagagggatgtcctagcgtggcggctccagcagcatgctctggggttcagtgatctcatgtgcccaggtttccaggtggcttcttgtgaggccctccgggatctggctcccaggaccaatgtggtctagcagtgaaaagcccctcagaatttcccttctcctcctctccaaccccttccatctctgctgcctcctaggcagtgtttttccctggagcgggtgggagaagctggagctgacagccagggatggtggcaagctgtgttatgtaagtttgaaaaaaggaggcttgcttgccatgtgaatagagatcagatacaaggacagctagaggcagcacagccatgcctgagcagcagctgtagtctgaagagaggtgtctgagccagcagaggaagaagctgctggactgggtggaggagactgtgttcttgtggggaaggagaggtgtctggttctgtgaactgccgatcttggagggcagcctgtgaagcaatcattgtctattcctataacatggtgtgctgcttatatgccatgccttattacatcaatcctggtctgtaacttgtgatggtatgagagccgccattgtgactgtttcaatcatggcaaaccatggcccagaaaagtcaagtgacttgctcagggctgcatgtagagtaagtggcagggtcaggatttgacacagggcttctgtctcactagccagtgctgctcttttactctaaaacaggcttaacagatcatgcctaaacagcccatggggagagtgtgggccgggtgagggagcctggtgccgtgtggcctggcatggatgagaggcaatggcactgggtgggaggagtggaagagggcttgtgttggagccccttggtgtgccgccccagcaggcactgtcacaccccttacccttctcagtctcgttccattttcagcatcattttccaaatcctgagcacctgacctccaggggccaggtacccaacaccggtcctctgaggggccatgggcatggtgggatgaggaggtacacctccaacaagcaactgctggactcatgcctcggccgaagtgtttgtgggccctgtcctaacactaggcccagggaaagaacagagctcgcccctctcctcccgaagttcagaatctccccgtggttctctgagaggctgcatggctcgctccctctctctgttcacatcgttgctcaaatgtcctctcctcacagggccgttccttgccaccctgtcacaacagtacccccctactctctctgtcctcacagggttttattatatatatatataaaaatctgtgtatatatacttaacatatacaggtatatatatatagtgtatatatatatgttaaatatatatacacacatatatgttaaatatatatacacagatatgtgtgtgtgtgtatatatatatacctgtatatatatatacacacacaggtatatatatataccggtatatatacaggtatatataccggtatatatatatatatatatatacaggtgtatatatacaggtatatatatatatttttttttttgagacagagtgtcactctttgcccaggctggagtgcagtggcacgatctcggctcattgcaacttctacctcccgggttcaagcaattctcctgcctcagcctccctagtagctgggattacaggtgatgtgctaccatgcccagccaatttttgtatttttagtaaagacagggtttcaccatgctgacctcaaatgatccgcctacctcagcctcccaaagtgctggggttacagatgtgagccactgcgcctggctgggttttctatttttctttgtgccatttaagaccacctgatgttacacatttgttcattgatttgtctgtctcctcacaataaaatttaagcttcatgacagtgggggacttggtcagtttcttgactgcccacacagagcccacaggtaaggtagcaggtgttcagtggacagtaggtgatgaccgttagagcatggcagcagggtgggtagaagaggacaggtgtaagtgtcagagggcctgggatctgctttcagctttacccagtttttgctgtgtgactttgaacaagttgctggatctcttgggccttagccttcttttttttttttttggagacagaggagtctcactctgtcacccaggctggggtgcagtggtgtgatcttggctcactgcaacctctgcttcccaggttcaaatgattctcctgcctcagccttctgagtagctggggattacaggcgtgtgccaccacacctggctaatttttgtatcttcactacagacaaggtttcaccatgttggccaggctggtcttgaactcctgacctctggtgatctgcccacctaggcctcccaaagtgctgggattacaggcgtgagccaccatatcctgctgggccttagactttttgttttcatcatgaaggggaggaactaggtgccctctaaggctgcttctggcacctctcttctgaaagtctatgtgtaggagacgagggtcgcagaggggtttgcaaagatttgtatcctgtgttcctttactgaagagcctgacttgggtctgcacactgtggggtaggggagtgacatgatgagggctgggtcttaggaggactacaccagtgatgcagtgtgtgcatgcatgtatccatggtgcatttagaaccattcattcaacaagggcttttggagcacctgccctctgtcacatacagtttgggctcagggcttagagtggtgaggcagacagccaacgtcctgccctcctgcagctgattggggcagagagaggctagagctggcctggaatggtgattacccccaggctgaagatgaagaggggccaagtggagttggggcactgggatattagagggtcatgattttttttttattatttttatttttatttatttttttgaggcagagtttcactcttgttgcccagactggagtgcaatggcgtggtctcagctcactgcaacctctgcctcccaggttcaagtgattctcttgcctcagcctcctgagtagctgggattacaagcatgcgccaccacgctaattttttatttttatttatttatttaataaatgtattttttgagatggagtctggctctgtcacccaggctggagtgcaatggcatgatgtcggctcaccacaacctcctcctcccaggttcaagtgattcccctgcctcagcctcccaagtagatgggattacaggcgcccgccaccactcctggctaatttttgtatttttagtagagatgggagtttcaccatgttggtcaggctggtctcaaactcctgacctcaggtgatcttcctgccttggcctcccaaagtgctgggattataggtgtgaggcaccgcccggcttttgtttttcaatttgtccttggaaagatacttaaatagacctgtttgaatctgtttaagaataaatagccagccatggtgattcacgcctatagtcccagctacttgggaggctgaagcaggtgtattgcttgagcccaggagttcaagctcagcctgggcaatgtagtgagactctgtgtctaaaaaaaaaaaataataaatgcattcatatgacagtatcgaagagaaaaataatgaaatgttattagtggttctgctgggttgtattataggaggtttgggttttttctgtgattttctagatgtcctatatggtgtctatattatgactattaatatagacaccatataggtttaggatgtcatggtttaggatgtttcctagatatggtctgccctcaaagtgagtgtcattgtttgctgatgtctgctccacaaagccctgctccaggggccttcaccaagtcccagccttggttttctcacctataaatgaggataattgaccctggtctatgcactttacaggacagttgtatgaatcagaggatacagcggaagaaaaaatgtttggaaatttaggtctctgcaaactaagggccaatatactggtatttgtgacagtgaccggatgggtgggatggggtgataataagagtgcaaggaagggggatgggggcatcgttttgactctgaggagcagctttaaggcctctcacgttccagctccaggtagcaaggggttccccttgactggcagggtagatgtacctgtgtaggctgttaggtgagtgactccagtggaatggaatggaatcatgactcagctcccacccctgccacacatatttgtaagaaaaagacccacatgctccatgcctggtgcagaagtctagaatgggaattcctgccaaaccctgtccccttctagcctgtgtagcctcagcaagcagataggtcttattacttgtttttttctgcctccttcatgatccagccatagatactatatcttaccagtaggggtggttgaagcaacagactttgaaatcctgactgttcatgataacggactccttcctgtggatcatctggccaagtctgcattcttagagagtggaaatcgactgtctttctgttctacttctacagcagctgctcatttcatctcctgacagttgcttcttgaactcagaacaaagggccttggtgtacagtgtttgcaagccaagggctgcctctgatggcggacgggggtgtggtcctgggactcgtggtcagggctggtctgtgtggaatgctgatccttctcttccccaatctacctgtgtcagttccctccttttctattttctcttccctgcagatgtcaagccctccaacatcctagtcaactcccgtggggagatcaagctctgtgactttggggtcagcgggcagctcatcgactccatggccaactccttcgtgggcacaaggtcctacatgtcggtatgaacagaagtttccattgcttgagcttcttgtacgttcagggagaggagcccagtgggtgcctttcctgtggagccagagtcttgtgctgggtaggggacaagaagtgagggaggaggcacagtgctctgccctgaggagatgaagttgaatgggaagatggtcttggtctttcttaggccttggagcataactgggatattggggccttgactcactgaaaggactgtccagctccagagtgtggctttctttctgaaggactgtgagctccagctcccctctgggcatctctacatgatagtcttcagatccacaaacccaggatgctcagatatgatccaccccaaactacctcaccttctccttttctcttagcagtaaatagacagcatcatctccctggtttcccaaggtagaaacctgagcattggcttttaacctgccttctcagcagcccgtcctttcagtatcttgtagctcccaactcctgagagtctgttcagaattgtccagcctcttttctccctcttcactatgtctgtcagacatgtacccctccttctaactgcagcatacctggacccctcgccagagtctctgctccacttcagccaacaccctgtgttgagggtattccctcctgctcctggctctgctggctcacactgtcaccagagcgttgtgtggggccatcctcacactatggcagcaccagcatgttttcttccctcctccataccaccggttccttggggacagggacaaggtgtctctcttgtccttagtgcctggcatggggcctggcatgtggtaggtgttcagggaatgcttggcaagtgggtagatgtttagttggctgagtgggagggtacatggataaaacatttctgagaatgatttggaaaggtggaaacgtgagtctgggccagtgctgaagtgcggcagagtggaggagcgttggagtgagtaggcagtctttacagaagtggcggggagtgcaggcccgcatggaggcggggacaggcgcagaggctcagatcttaacttgtacaaagcattttatgtgttctctgtcaaagcacatgtcatgtccctggaaggtctcatttgatccatgtggttgtcccaggaaataaagattattgttcccattttagaggtgaggaagtctagattcagggaggttaagcaacctgcctacttaaccttgctgagccaggattgaaagctagctgcccccttgccaggcagacgccctttgcacagcacaccctcatttgcctcttggggaggatttggcacctgtgcccagatcccagtgtgaacacatcctcattccttcttgctggcacctaccccccactgagactccagccactgtcaacatcactcacctggcactgacccacatccccacccctcccctccagtgacccacagtggaactctctttctctgtcatctcctcattgcttcttccctaaatgtctaataactgagcagctggcatcctgggccatttgactgccaactctcaagttcaaaatccattaacaggccctgggagttactaatcaagggtttaatggttggggtttttttggttatatggtcagttacgaaatagtccagtgttggagttagtgaaaaatgctactggagaagttaatgtctacgtgaatatactatggccagaataaagattttttcggtagggttcttgaaatacatgtgctatttcaaataatgctcattaaaaataatgcttttgtatagcactgtatactttttttctctttggcttttcccaccaatatcaaccaatatttgtattgcattttacaacatttgacatacgttttctttttttcttttttttttttttttgagatggagtctcactgtgtcacccaggctggattgcagtggtgcaatctcggcttactgcaagccctgcctcccaggttcactccattctcctgcctcagcctcccgagtagctggaactacaggcgtgtgccaccacgcccggctaatttttttgtatttttagtagagacggggtttcaccgtgttagccaggatggtctcgatctcctgaccttgtgatccacccacctcggcctcccaaagtgctggggttacaggcgtgagccaccgcgcctggctgtacattttcatttgatttgatcttcttagtaatcctaagtagagttttcttatgtcattgttactgtcattttcatcatcatcagccaccgcccccccccccccccacctttttttctttcgacatagagttttcgctcttcttgcccaggctggagtgcagtggtgcgatcttggctcactgcaacctctgcctcccgggttcaagtgattctcctgcctcagcctcccaagtagctgggattacaggcatgcaccaccatgtccagctaatttttgtatttttagaaaagatggggtttcacgatgttggccaggctggnnnnnnnnnnnnnnnnnnnnnnnnnnnnnnnnnnnnnnnnnnnnnnnnnnnnnnnnnnnnnnnnnnnnnnnnnnnnnnnnnnnnnnnnnnnnnnnnnnnnnnnnnnnnnnnnnnnnnnnnnnnnnnnnnnnnnnnnnnnnnnnnnnnnnnnnnnnnnnnnnnnnnnnnnnnnnnnnnnnnnnnnnnnnnnnnnnnnnnnnnnnnnnnnnnnnnnnnnnnnnnnnnnnnnnnnnnnnnnnnnnnnnnnnnnnnnnnnnnnnnnnnnnnnnnnnnnnnnnnnnnnnnnnnnnnnnnnnnnnnnnnnnnnnnnnnnnnnnnnnnnnnnnnnnnnnnnnnnnnnnnnnnnnnnnnnnnnnnnnnnnnnnnnnnnnnnnnnnnnnnnnnnnnnnnnnnnnnnnnnnnnnnnnnnnnnnnnnnnnnnnnnnnnnnnnnnnnnnnnnnnnnnnnnnnnnnnnnnnnnnnnnnnnnnnnnnnnnnnnnnnnnnnnnnnnnnnnnnnnnnnnnnnnnnnnnnnnnnnnnnnnnnnnnnnnnnnnnnnnnnnnnnnnnnnnnnnnnnnnnnnnnnnnnnnnnnnnnnnnnnnnnnnnnnnnnnnnnnnnnnnnnnnnnnnnnnnncatattcctagtagagttttcttatgtcattgttactgtcattttcatcatcatcagccaccgctttcccccccccacctttttttcttccgacatggagttttccctcttcttgcccaggctggagtgcagtggtgcgatcttggctcactgcaacctctgcctcccgggttcaagtgattctcctgcctcagcctcccaagtagctgggattacaggcatgcaccaccatgtccagctaatttttgtatttttagtagagatggggtttcacgatgttggccaggctggtctcgaactcctgatctcatgtgatccgcctgcctcagcctcccaaagtgctgggattacaggtgtgagccactgcgtcccggcccagcagcagccccattttatagatgaggctgatattcaggatcctttagcttgaagtcccggaattgggatttaagtctcaggcccactgaccccagatcttttgttctatgtatccacggcaccacctcactcccaacccgcattccacaagcttcatgtttcagattcagtgacaagatgagcctctcatgctgggcttcggacaggctgccctgcgcgtgcaagactgtggccaagctgggtaaagctggaaccacaggctgtagtggcagccagggcacagccgattacatgtggtctgtcaatttaggccagattataggagaaatagagcagggatgaggggttaaagccacagaagccagctaggatttggtaaacacagtgttgggggtaggcaggaggccaaattcaagaggttagtggagctcttgaaacaggatatgaactattgagaagggacagaagagaaaatgcattagcagacccaggggtccaagttaggttaggtgattatcactgtctgtctctcctgcagccagaaagactccaggggactcattactctgtgcagtcagacatctggagcatgggactgtctctggtagagatggcggttgggaggtatcccatccctcctccagatgccaaggagctggagctgatgtttgggtgccaggtggaaggagatgcggctgagaccccacccaggccaaggacccccgggaggccccttagctgtgagtagcctggtgtgtccccatcttggactgttggaggggagggtcccttactttcaggggtttctggagggctgattctctgtacattctgccaagactgattctctgtccctggatgccaggctagggccaggggaagcagcaagggtctccaggtgggtgttgttactaccaacaacttcctaccatttgttgagtacgtactatgttctaggtactgcacttaggactttgtatacattatctaaccttttgtatttatttatttttattattaagggtcttgctatgttgcccagtgcagtggctagtcacagtcttcaactcctgggctcaagcagtcttcctccctcagcctccagagtagctgggactacaggttataatttatttgtgggggttgggagggaaggggctcactctgtcacccaggctggagtgcaatggcatgatcacagctcactgcagcctcaaacctcccaggcccaagtgatcttcctacctcagcctcctgagtagctgggaccacagtcacatgccaccatgctcagctaggtggttttttattttgtagagatatagtctccttatgttgctcaggttagtcttgaacttttgggctcaagcaatcctcccgcctcagcctcccaaaatgctgagattacaggcatgatccaccatgactggcttctaatttgtggggtttttttgttttgttttgtttttgatactgggtcttgctctgtcacccagggtggagtacagtggtgccatcatggcttactgcagccttgacctcttgggctcaagtgatcctcctgcctcagcctcctgagtagctgagaccacaggcatgcgccatcatgcctgactaattttttaaatttttttgtatagatgaggtctcgctatgttgactaggctggtctggaactcctgggctcaagtgatcctcctgccttggcctcccaaagtggtgggattataggcatgagccactgcattctaattttttaatcatgacttttggtagatttattttttattgagatatagaattcacataagacaaaattcacattttaaagtatgtagttcagtggtttttagtgtattgttccatgttgtgcagccatcaccactgtcttattctggaacattttcattaccccagcaagaaaccccatcccccactccccctgcctgatccactgacaaccactaatctactttctgtgtccacggatttgcctagcattatataattttaatagcatttcatttgtgatcacgactataatctgaattttaaagatgaggaaactgaggcacagtgcacttgttaaggccacataggcttgcaagtggccaagtctgactcccaagatgataaacactgtgcagtaccacctgcctctctgaatgtgaatactgggaagtaaacctggtactcagggaatagcctgacctagccaactgttttttatgtagctcctgtctggccagggatacctgccctgtacctccatgaggtccacatgagagagagcttgtataaaggggaaagcagagggggctagaggtagctgatggcaggtcattggaggggctggtggctgtggcctctgaggctcgccggtgactctaggagacaaaaggaagaaacgcaacttcatggagaattaaaactaagtcctttagttatttagttgctatctcatttgtgcctctctcaatagaaggaagggggaaaggacagacataattattatgtctctgctttacaaaactcagaactttgtttggctcagcagtgaactgatttgccaaaggttacgaacttaagatgtggcagagcccagacttgtaccctggcctttgctggtcccctctgtgttcaagccttatctgtggctgtttaatgtttattgtccatgaccctgttctggtcccagggatccatgcccaaccctttgcctcatattaacaagtaatctgtttctgagaagtattttttctttttataaaatttgtagcatacggaatggacagccgacctcccatggcaatttttgagttgttggattacatagtcaacgaggtaagtactgcctggtttccttcaccttggaatttacttgctcatcttaagaaaacacccaggtggccgggtgcagtggttcacgcctgtaatcccagcagtttgggaggctgaggcgggtggatcacacgaggtgaggagttcgagaccagcctggccaacaaggcaaaaccccatctctactaaaaatacaaaaattagctgggcatggtggtgcacgtctgtagtcccagctactcgggaggctgaggcatgagaattgcttgaacctgggaggcggaggttgactctgggaaaaacaaaacaaaacaaaaaaacacatcgctgtcacaggttcagtctactagggagtttaatttaacctctctttactgtatgcacagctttatactaagcaccatgggctgtagaaaagcagtttcaggattagttcgtcactgcctaaggatttgagggaaggcagaggatgttgcatttgtaggagtcagaaaaaaagccatccatcctctactgctggggacctaggctaggtggttctgggtggtagtcacattaagggaagggatatctgaggttagatgcgccattgcgtctcctagtgtgcactgctttcttccaaaatttcacattaatttcccatgcaattctcccaagcattgctgaggtaggccaaattggttcctcttcaaacaggtgaggaaattgagcctccgagatgaaaagtagcccaggtccttcccacccagtgctctttcttccttgccacctcccacctcccattcttacctcctaggaggcttggctgcatggcagttgttctactgcagcctctgttggcacacagcccctctgctgcctagctctttcctgttcagaaggaatggatgctgcctctggaggccaagctgctggtctcctctctcccttgaatggtcccttgattccctcagcagtggggacagtctgcagaatggggcttgctctgggtcactgttctaagagctgagttctagtcctcacctaagatcagactgacatggccctcaaaggaagagcactaggttgggctttgtgttggggatcagtgtctcatttttaatctcaaattaaaaacgagattttgggctgtacatcagagaagtgacatcatggacattatgtctgtgggtcagcatgggtacacacagctcccagcccaggtacataagtgggcccacatttcctggactgcatggaacgccatgagcccagtgctccagagccttgtactgtatagtgctgcatgatcaccatgggaaaatctgaaaacagcctcatttctggaatgtacaggtaacattcttcgagatccagccctctgtcagttaacgttttattaacttttcactgcctctctagggctcagaaaagggatttttaaaaaccagtttgcttctgcaggtgctgtcagacctgggctatgcctggtggtttgcacgtgcccctagctgttgctgccagtaaattgctggttacgttcccatgccgcactccaagatttaccattgtagagtgtcagagcttgaaagggtccctgagatcattaggcccaacctcttcatgtcatagaagagtaaactgaggttcatagaggaatagtgattagttcaaaatcacccgacaagtgagtggacttgacttggtcccaattctaaatgtgctatttgagatcagtggttccaacatggttacccaacaggcagcactggccttctacctgtgcctttccttgactgaatgagagtagtactgcctttggactgcagagaagactttaaaaaaaagtagcactggctggtggtaggggtgggatggggagaggagatggctggagcaaggagccaggcatttttcttatctcaacatgtgtttgcagcctcctccaaaactgcccagtggagtgttcagtctggaatttcaagattttgtgaataaatggtaagttggctccttgttctctggaagcgtatactctggatttgtcaggctccccaccccatttctggaagcaccggcattgcttctgcaggcagagttttgccctttaccctcccgtctgatgattcttggctgctgccataagcccttttttagagtgccaagacttatgtggcatgtctaactacatcatggatgtagtagctgctccttttggtacttgctctccagggattggcacgttgctttttgaccttagtttaactcagcaagaatgtattaacttactgtgggcatgatactgtgcttagaacaggaggatgaatcaagcccaggcaatcctcagcctctagtgtgcagagaagacaggcatgcaaacatgttatttgagctagaaccagtgccaggcaatagctcttaccttgtctttcttcctttaagcttaataaaaaaccccgcagagagagcagatttgaagcaactcatggtgagtctatttattccggattcttacagtacctgtttattcatttgttcttcttctctgtcagtcatctgtgcagtacttccagagcccattcattccctgcccactgtggtccagctgagcctggggctgcagaataccaaacaccagtctcctttgctctcccatcagtttaagggaaagctggggtgacccccacagcctgagtaagcatatgccagaggaaaggcctgagggggccacgggaaagaaaaggccagcccacccccttcatggggatgccgcctttccctaatactgactgcctcaccttacattcagcctccttccagagtcactctccgcctgctgtctcgtttggtggcagtggaaatagctaagtaatactgtaaatatctggacagccatagacggtgtatatagtataatatgcactaagtccatcattttctttgtcccttctaacaagcctgtgaggcatttaaggcagagttactgtctccatactgcaagagtaggctccaagaggtgacttgcccaaggcctcacagctgctgtgactggtggagcaggtctttgggcctgcagctggccccactgttgctcaggggcaggtgccaggtgctctttccaagtgcagcacaagctctagacctgaaactcttggattttccttcctggtgggttttgttttgttttttgtttctttttaacaccacgttctctcgtttccttacatgcaggttcatgcttttatcaagagatctgatgctgaggaagtggattttgcaggttggctctgctccaccatcggccttaaccagcccagcacaccaacccatgctgctggcgtctaagtgtttgggaagcagcaaagagcgagtcccctgcccggtggtttgccatgtcgcttttgggcctccttcccatgcctgtctctgttcagatgtgcatttcacctgtgacaaaggatgaagaacacagcatgtgc

SEQ ID NO: 55 - DNA, 67836 bp, Mus musculus
agtccctcactgggacgtctgtgcgcggcgtctcggagcgccggagcagcggtggccgcactttctccaagctggggctgtagctgagctgtgggtagtgcgcagggagccgtccgagcccgaggaaccggtgtgctgaggcgagagttcccggccggcgagcgcgcgcagctggttctccgcgtgggttgggcggagggtcccaggagcgcggcgttgatcgagccgccccgactctgggcagagccgagggaggaagcgagaagcggccgcgcgctccctgctgagttgcaggctctttcccggctgcaagatgcccaagaagaagccgacgcccatccagctgaacccggcccccgatggctcggcggttaacgggaccagctcggccgagtgagtaccgggagtggccgggaggccgccaccgccaggcgaggcttcgtcacgtacggcccggctggcggggggcgaggaactccggccgccgggctatcagtgactaagcactgattgggtgcctgactcacatcgaccgtgcaccctacaagtcccgatccccctctttcccaacagtgtctgtcgtccctggccaccgacatcaatcttcgcccaagaaaacgaaacctaatgcgtccccccctagctattgcctaaagggcatactctgggattctggcctgtaacaagacgcagagcaaattcaggtcgcttctcattaacctttgagacctcctcggggtctgagtgtggacttgggatgggtgagccccatttacttttggtgcctgacacctgtggggccttgtggccggttgatcgcctggccagcgggggcgtgtgttcacagatttccccatggcttttccctggttcactttggggactccctcatccgtggcctttttcttgagaagtaccttgctcgagggaggagtctctcttcatctgtccgttcatgcaacagttcatcccctcaccggttattctcccagctttgcttagttgaccgggagccggaaattgacttgaggcataagaacgatgaccagggaaacaaagccaaaggttgctcggtatctgcaggggccagtgttgcttacagacagataagagtttatttcataaggtgggtttctgagcccacctgttgggtttcttcttcatctttccctgaggtcaggagacttgagaggtatctgataaaatgaaagtagcttcaggcattctgtcctttggagattattgtaacccccctccctcctttccctagattttaataactcaggacctgttggtatggttactgtcattgatacctgcagtagtatcaatggcagggctggtagtggtggatttgtgtgagcatagccagattattaagacttgcttcaaacacatcttttctttaggtccttgacattgcccttgacgttggatttgtaacatatgtctttgagcagcataattagcatttgttcagtgtgtatgtacagcagtttaccccctgtaaaacagactgcaagtccccctcccctctttcaaggtaaggtattcttcagcaactcttttcaggacaaatatttttgtgagacaatggagtgggatgggtagggtctatatgtgtaacccagactggcatagaattagcacaagctttttttttttttttaatcatattatttttaaatttttttattattttatttatttacattccagttgttgcccccttcagtctcccctcccacagttcctcatcacattcctcctcctcgcctctgagagtgcccccccttccctggaaccttaagtctctttccaggattaagctcattctctcctcctgagaccagaccaggcagttctctgttatatatgtgccagggacctcggaccagccggtgtatgctcctggttggtggctcggtgttcgggtgctccctggggtctgggttagttgagactgcaggtcttcctatggggttgctctccccttcagcttctttaattttttgcctaattcaaccataagggttcccgacttcagtccaatggttgggtgtaaattatattatttttaatgatacatgtgtatgtttgtctgcatgggtatgtgcacatgagtgaggtgcccttggaggccagagctatcaagattccctggattcgttggagctagttgtgagccatgagtgctggaaactgaactgtagtcccctgtcacctgcagaaacagtaagggctcttaagttttcaaactgctgggccatctttccaacccttaggataagttttgttcactctagattcttgtcaaaggttagggccctatctaccttcagatctttgattttgcaagtggagatagatacctgttgtcatgctcttgttctttttgacgttgtaactgtactcctttaaaggaaaggtagctttcatgtaaagaactgactagggtgccagaggaatagctctgtaaaagcgcttgctgtgcaaacctgattatctttcagtccccaaatcctgcattggatgtagagaatcaactcctgaaagttatcctttgacctccacacaaatgttgtggaatctgcatgcccacactcacacatacaaagacagtaaatttttaaaatttttgtttgtttgtttgaggtaggggctcactaagtagccatggttgtcctgggactcactttatagaccaggctaacctctaacttgcctctgcctcccaagtgctgggattaaaggcaaatactgccactgttttagttttttgtttttgttttgtttttttttaaagaaacagaatcaggaatataagaggaaactacctctgagttgatggcagaaaattttggatgggattgtgaggttcttaacagtggtttgcttcagagattatgtgctggatcactctggatttgaagcctggctctgttacttgtagttttgtgagcctggacaagtctctgggcattggcttatttgtttatttttaacagaacaaatagtcctaataatagaactaacttacagtagttgtgattaaatgaaccttccagaacagtccacctctggtgtttgggttggatgttgagaggctggtagaccttgacaggtcatgtcctttgatggtggatgggtgtgttaagatgcctctggacaaacaaccctttagcttagttttctgtgcaatctgcatctacctccatgactcattgctgggtgacaataggagacatttctgtgtaggctgctggagacaaacagggactgttcccccttgtttcctagcactaattggggagagtggggacagtgctgtactcctcttcacagcttaccctggggcatgtttctcaagcaaagcctctcctatcttgggctgtcaacagaaagaaccctgtgcttctgatctttgtgcatacaccatggctgattcaaacatgagaaaatgtgaggtaaggaagaggaagaagaaaatacccagcaataagtgaggaattcttggtgtcaaactgtcaaggttgcttttcccctgatactttgagtgcttgctgttaacatagcacttactcattcaaggaagaagctagtaatatgggccctgcagtttatgtaagttttaggggtcctggaggaaaaatggagaagtatctttcttacttaaaacatggagtatattgccagactcctaagtattataatgaaataaattagaaataagattgcatcatcgtttgttgttttttgtttttcctggttccattgcagttataataaagtcccacctcatcatgctggggtggggaactctgagtaagctgcctgcctgtgcccctatccctgcctgtgcccctatccctgcctgtgcccctatccctgcctgtgcccctatccctgcctgtgtccccatccctgcctgtgcccccatccctgcctgtgccccattcctgcctgtgcccccatccctgcctgtgcccccatccctgcctgtgcccctatccctgcctgtgccccattcctgcctgtgccccatccctgcctgtgcccccacccctcccttctctaaccacacttcctgcagcttctttctcctgccctctttcacttcctccagagatgggcagcacgcctccttgccctttgcacatgctgtttcctttggagttattctctctcctttttcttttcctcaatagggaagatgtagttatcacctttgttcccacagaggaccagaagtatgtcccttcctcatgtctcctcatattttaaggagatgtacttaccattgtgatttttgtttttgttttgttttgttttagaactgggattgaactaagggccctgcatatacatttagatccagttccagtcttttttttttttttttttttggttttttcgagatagggtttttctgtgtatccctggctgtcctggaactcaactttgtagaccaggctggcctcgaactcagaaatccacctgcctctgcttcccgagtgctggggttaaaggcgtgcgccaccatgcccagcttataatttttttttttaaagatttatttattggttatatgtaagtacactgtagctgtcttcagacactccagaagagggagtcagatctcgttacggatggttgtgagccaccatgtggttgctgggatttgaactccggaccttcggaagagcagtcaggtgctcttacccactgagccatcttaccagccctaattttttaaacctaagaattgaaaagtcctttacacttgtcttagttagggattccattgcttgaagagacaccatgaccaaggcaactcttataaaggcaaacatttaattggggctggcttacaattttagaggtttagttcattatcatcatagcacaggaaacatggcatcctgcaggcagacatggtgctggagaaggacctgtgagtttgcatcttgattagaaggcaaccaggagagactggcattctcaggcagctaggaggaagctctcttctgcagtgggtagagcctgagcataggagacctccaaagcccagtcccacagtgacacacttcctccaacaaggtcacacctcctaacagtaccactccctatgggccgagcatattcaaaccaccacaacgccataacattaagcattgggcttcttttcttgactgaacactctgtaagcagaaactagaatagtacctgcagcatcctaggtacacagttgttgagagaaccagaatcaataagacttccttttttgttgttgttttttttttttttttgagacagggtttctctgtatagccctggctgtcctggaactcactctatagaccaggctggcctcaaactcagaaatctgcctgcctctgcctcccaagtgctgggataaaaggcttgtgccaccactggcaataagatttctaatgtaagtaggtgtgcttgagtctttaatcacagcagtggagaggcataggcaggtggatttctgtgattagaggccagcctagtctacagaatgagttctaggacagctagggccgttacacagagtaaccctacctcaaaagtccaaaataaaataaaacaaaaagcaaaacaaaatatttctaatatatttatataatgtgtttaataaatgtaataaaccttttttagacaaggactcaatgtgtagttttggctgttatggaattaacaatatagatcagctagccctaaactcaaagagatctgcctgcttttctctcttcggtgttggcattaaaagttcatgccaccatatccaacctttatttttttatatatattttctattacattttaatttatttattactgttttacatttaaaatgggaatttgaagaaaaataagaagtgcaggaatacttcatagaccactttacatgatcaaataagcaattaataccatatccttttacaaatattaactagctctagaaataagttctatgataaggcagttatgagtagacaaactattcataaaaacaaaaacaaaacggcacaatacaagtatccatgtccccatggttggtaattgcacccagctttacaactgcaggtatcagaagtactgtgatgagcagtctcagactggaggcaaccattccaaatgtgccaggtcacaatatttcatgcagttactgaaggggctgagattctgagaaacctgtgtttccacaaggcagctgtggatgttgaatgtggaagagtcagctttttagaagtatagaaaaccaatgagaactatttaagtgtttacaaaatgtggacatctattgtaaaaaaggtaaggatgtttattacagcaggtttttagagaaaaatcattgctggtgttttaaaatagtgaaaaaacaaaacttagaaaacaaatttgaaagaagattacccttaagacatttaaaatgggctcacgaatagccacacagatgtggctcatgactcaggcttctgatctctgtaggtttaaagtcagtgcttctgttcttgtagggaatggctttccttaacagtagtcacctttatttctgcatcaggctacgctctgaaatttgtctgtgattgtatatacatttttatatctaacgtgtgtgtgtgtgtgtgtgtgtgtgtgtatgcatgccacaacacaaagttgggggtcaagggacagtttttgtgagtctcctcttctaccctgtgggctccagggtataacctcaggttgctgtgcttggtgctaagtacccttacctgataatccatttttctggctctctgtattttctttttagagatttatcttgttttatttgagtacacaccagacacactagaagaggacatcggatcccattacagatggttgtgagccatgtgagccaccatgtggttgctgggaattgaactcaggacctctggaagagcagtctatgctcttagccactgagccatctctccagccctttctgtattttctttaaacaatacttttaatctttttgagaagccttgaggagaaaccttgtgttctgagtagaaattgaagcgctaaaggtcagttatctcccaggacttaactttttatttgatgacaggcaagtcccttgtattttcactttagtttccttatctgtaaagtgggatgttaatggtttaccctgaccaacctggcctgatctggtcagatctttagttttttttttccaatgtctccctcactctgggcttcagagtcctctgtgctataggttaggcacatcttcatcttagagtgactgctacttgaactttcccctccattctctaaccctttattttgcctttttgtttgtttgtttgcatggctggccactaatattgtatagcacatgtctgtctgtcctctgccctcactaaagtccagactttatcatggttgggcctttgctttgtccttacatagcttgtagaacagcatctggcacatagtaggtacctgctgttaggtacttggtggttggacagttttaatcttaattattaagctatggtggcacatgcttttaatcccagtgctatggaggcagagacgggcagatagatgacaatgaatttgaggccagcttggtcttaatagcaagctctaggcctgcttgggatgtatagtgagaccctgcctcaaaaataaggggctaaagagatagttcaataattgagagcatatgactgcctttacagaggacccacatggtggctcacagctgtctataacttcagtcccaagagatccaacatcttctggcctccatgagtactgcatgtatttgatgcacagacttacattcaggcaaaataccatacacatacacatacacatacaaataacaaataaaatgttcaaaaatattaaaaacaaagcaacaacagaaagaacttaataactgccttaggactgtattctatggtcttggcagtcctagaagatttgtaaggagcatacttacatctgttagcgtgaaggcccttcaagaaggggatatggaatagaaagacaggctatgtgcttattttgctagaaattgaatccagggccttgaccatactaagcaagagctttaccactgagctgtattctcagcctttgaggaaaattcttgctgtgtaggctggtctggaaccctcctgtctgtttcctgagtcttgctatagataggttgctaccttgtttactttatatgcttgtaccatgactacttggaggttttgagtgggttttgcattgaattttgaacttggatgcttcccttgattcattaaagcaataactaatacggttgctgtcctttagaacagctcaggagaaaagtaaggtcttctgaggtgtgtgtccttgaggagaacgtctctgctgttgtagcagacacagaagtggtaaagagactcttaagttacagcttgggatgggaatgtggttcacttggtagagagcttgcccaacattcaggattccttgggcaaacccaagcactgaatagactgggcagagtacttgaaagtaagagagttaggagctacaggtcatctgcagctgtgcagtttgaggtcagcctgggctacatgagaccctgtctgtgtagggacacaacattttactctcatgtattgatgcacctttaaaagaaagtgagagaatactaacatagagtagctgatatagcccttgcttactatataatgttctgtcagagtttcctgtttcccaagtttacctatctgtgctatactgaagttgtacctttactgccctaagtttgttctttttttttttttttttttttttttaaagatttatttatttattatatgtaagtacattgtagctgtcttcagacactccagaagagggagccagatcttgttagggatggttgtgagccaccatgtggttgctgggagttgaactctggaccttcggaagagcagtcgggtgctcttacccactgagccatctcaccagccccctaagtttgttcttaatctgtctggttgggctcatatgccctttaacatcctccttcacttttctgcaaggttttctgcaaggtagtcttttcttagtttgtggtgctgaggttcaaacctagggtcttactcagttccacttctaagctgtaccccccagctcaatgacacacaaatgcacacttatttttttttccccagttctagagatcaagtccagagccttacacatgctacatatttgctgtaccatcaacctatatctctgtctacctgcatgatttgattttgttttaaaattgctatcatatttacctgctgtaagggccaggtcagactcttgtattgatgtttccctagcatcttgttcaggacctgtgctaaataaatgaatgctacccatttttaaggttcatctgtggctgtagtctctctctctctctctctctctctctctctctctctctctctctctaccaagttttgctgtcctctaactttggtgctcacttgccttaacctcccaagggatgcaagggacgcatccaagttcacagttgtgctctgtaatgtccgcctcgattcctctcccactttgtcttgtttgcaaaaattcccaataagattacgatacccagagaacaaaatttattctgagccatccattgggtctggggtccataactgcattttgattggttctgggtttctgtaatgttctttgttagaaagagaggcttccttgatgaggatggagtgctacacttttctgtggttataaagacaagtgtttagattgtggttagggattatgctaatttagtaaagagattgtgggttctttaagattcataacttcactaggtagtttgctagatttttaataccaggttaagctgtatgtatgtgtgtgtatgtatatattttgatcttttgttctatcccctggttttgttgtcccagatctcaggagagctgtgtgctgagttcattcatgcctggatgaatggagttctgttttaaaagagcaggtgttctgagatctggtaaagggccaaatgggaaaatgctgatcctgcctcagatttctccctgtctttgtcaggggcatcctgctttgatgtcagagaggagtcagattaagtaggggatggggagctgaatgaagagtggacaagagttgtgaccccctcttcactctgagtagttgacttttcaggataatcttgatttataaacactttaaagaacctgcactcattaaattctccacttgtacataatatatgcactttagtttaataatttatttcttgcgtgtgtgtgtgtgtgtgtgtgtgtgtgtgtgagagagagagagagagagagagagagagagagagagatggggggaggggagacggagacggagaggggacgacttggcagagtgggttctctctttctaccaggtgggtgggtcctggtgatttgaattcaggtcgtcaggtttgtcatcaagtgcctttacctgctgtgccatcttgctggtccaagccagcattttttagatctttgctttgagacagggttgaaccatgtaagtaaggctgacctcaaacttgggatcctttgtttctgactcccagtagctgggattataggtgtgcacccgtgcctgctttagctagctgagattagttggtgattgctcccacttttacacatggacacactcattacacttgccacttcagttggctgaaagctgaaaagtagatgtgataaagtttggctttctatgcaaatgtgacttccttgttcatttaggtgatttccaggttgttttttttttttttttttttttttttttgtggtggttttttgagaaagggccacagtctgtagacccgagtggcctggactcattctgaagactgggctgatctctcctcacagaggttcacctacctctgcctccctcgtgctgggagtaaagatgtatgccattgcctcagtcagggtttctattgctgtgatgaaacagcatgaccaaaagcaacttggaggggaaacggtttatttaacttccacttccttactccaatcacttaaggaagtcaggactggaactcaaacagcgcgggaacctagaggtggaagctgatgcagaggccgtggaggagtgctgcttactggttgctctccatggcttgttcagcctgctttcttatagcacccaagactcccggcccaaggatggtcccatctgcaatgggttgggtcctccctcattaattaagaaaatgccacctgccaggttcatggctttaatcccaacactctggaggcagaggcagggagagggagagagagagaggagggagggagaagcagacaggcaggcaggcaggcaggcaggcaggcagacagagagaggcagaggctggtggatttctgagttcttggatctctgatttcgaggccagactaatctacaaagtgagtttcaggtcagaaaaacccagtctcaaaaaaaacaaaaacaaaaaaaaaacaaaacaaaacaaaacaaaaaaaaaaacaaagtgagaggggggaggaaggagaagaaaggcagacaaacacatgcactcaaaagaagttgacctatggagccatttcttaaggttctgctctctcagatgacttgaatttgtgtcaagtgacataaaactatgtatgcagcatagccatgatttccagagttttactatttaatgacacttcgtaaatgtttccttccttccttcctttctttttttgtttttttgttttttttgagacagggtttctctgtgtatccttgctgtcctggaacttactctgtagaccaggctggcctcgaacttagaaatccgcctgcctctgcctcccaagtgctgggattacaggtgtgcaccaccagtatattttatttttttctttttataaatttgccaaatcacaggcaataaaccctgctataaaaataggttgaacggccgggtgtggtggcacacttgggaagcagaagcaggtggatttctgagttcgaggccagcctggtctacagactgagttccaggacagccagggctacacagagaaaccctgtctcgaaaaaccaaaaaaaaaaaaaaaaaaaggttgaacgaacttataatataatatatatttcaactgtttccttgaagcttgggcaatttttttaggtaggtttttttatttgttttagttttagttttaaaatagtttcttagttgttcagaggcagtataaggactcctttaaatagccagttgctttcctttagttattcaccatactcttgaagtggaattatttactgcttttcatgttagttttgcctgcatgttctgcgctgggagctgtttgtaggttactcagatgggtgagagtttctgcctctaaggtcttcagatatgatgtggaaagagaggaggtgattgcagtagaggaaaatggctgcagagtaagagaaatatccccaaagaagaggtacaaagaaagtcctgtagcattcctcccgggaagggagactgaacctccatccgggcaatgagctgctgtcccagaggtgatgacatctgaactgggtcttgaaggatagctagtatttccatgggaatgggggaggggcgtgacaggaagctctggacgagcagttcacaccagagggaagcttgagatgtatctggaggggagaggcgatcagctctgaaaccgtcatcccagcaggtcacaggagatgaagctggagaggtaggtttgggttgtgctgttctctggctaaacagttgtgacaggtcacatgtgaaagccccctccccccaatattttttctaaaatgcgcttgattcttcgtgtgtgtgtgtgtgtgtgtgtgtgtgtgtgtgcttttaagagagagagagagagagagagagagagatatcttgccttgcagcctagacgggccaccaagggtagatcaccgtacctagccgttggagtgcttggatgccagacatgtgccacacaatgcctggcttgccctttgattttaaagtgttacaaatgatgtgattatttcactgtctccagtgtgtttattgttgtattaagaaataataattttaatttttaaccttcacaagtatgccttgagtacaggatagccactcttcattaacattagagatttgctgcctctccaaaccagctggactatgtggcttcctttttgttctccctttggcccacgtgggattaattagtttactggagagaggtatcagctgaagttaatttttctccaccactcgttctagtattttactagagcttacttattaaatattatttattcatctgtttattttcaggcttacttttacttggttttggtggcattttgatttatttcttatttctttctaaagaaatacaactcaagtaatttagatagtcttttttttttttgtcatttgtttaaattgataggttaaagaaaacttgacatttcgcagggtatcttaacaggtgcttttgtgttctggctttctctttctaatctgattaattttcttttaggtaatattcttgtgtcctgagctactatttgatgctattataattgagcactttaaaaattgtgtgtatgtttttttttaagtcagtcatgttttgagttgaatgaagtgttcatagtctatgctttgttaagtttattagctttgattgtctgtgtatgcatttctggatttattggtggtgtctgcaagatgcaactttcccttcagtagtcttggttgctctcaagggcggttcttgtgtctcaggaacacttgagtatcatgaaagaggcctccagaagatctcctgaagagaccctcgttcttttagctctccagctttgtaggagagactattagaagtagatggggccttgcggctcctcagattttagcctggtgctttcaccaaagattgaaggaacttgtacattcctactagtggaacaggagatagttggacttttatcttaccttgtggatgtattgcatgatttcagacgtacttaatggcttgaaaagttgccaagttgcccccatgttgatatttggtaactttaatattcttttaaaagtgttttaaagtctgaatcttaaaaaaaaaaagtgcctcttctatattctattcttttaggtggctgaaggaatataaaaataagaaaatgagagtgccagccctggtagtgtatgtctttaatctctgtattcagttctttctgagttcaaagccagccttgtctccctaacaagttccagaccagccagagcctggaattgtgggaccctgtctttaaagaaggaggaggaagaggaggaggaagaggaagaaggaaaggaaaaaaatgggacgggggattaagtccatccatagtgaaagagcctgagatatcagttgaggagtggagctgtggtccccttgacgtggacaccgttctggaactgacctatcagtaccttaagttactcttaaatgcattcctttttcagaaagagtgtaacaatgtgtgtaattggcctgggctccagactcaggggagttgaagggaggagcctgactaactagccttcatctggtgtcctcatcctcttgtgtaggtccagggtgagtgcattttctttttactgagttggtatagccatgttcatttaaaaattagatcatatgagatatactaggtttgattccaggaccacaaaagtaagaaacaaaataaatgaaagaccttaactgcagtgagtccagagtttaaattatttgtcatctttgcctttgtacttccctctggtaaacagtccctcaagaatgcccttgtcagatgagacttcagagagttaacaggaatgccaagctaactgaatgttcacacagaagtcctaccatagtgccaatctacctttcatccctgctttccttttgggcttatggtgttaggtagggagacaggaagagaagagctacctaacatcccagtaattactagtgtactggctagttttgtgtcaacttgacacagctggagttatcacagagaaaggagcttcagttgaggaaatgcctccatgagatccaactgtaaggcattttctcaattagtgatcaagggggaaaggccccttgtgggtgggaccatctcagggctggtagtcttggttctataagaaagcaggctgagcaagccaggtgaggcaagccagtaaagaacatccctccatggcctctgcatcagctcctgcttcctgacctgcttgagttccagtcctggcttccttggtgatgaacagcagtatggaagtgtaagccgaataaaccctttcctccccaacttgtttcttggtcatgatgtttgtgcaggaatagaaaccccgactaagacaaattggtaccagtggagtggggtattcctgtgacaacctgaccatgttttggggaggactgtggaaggactttggaactttgggcttgaagatccatccattgttaagacctctgtcggatgttgtgtaggagcttggaagataatgttgagaacactgcagaagttggagctctggtgtgtgaaatttcagagggaaaattaaagactcttttcagggccattcctgttttgattgtgaagattctgtagttctggttagctggggctgaagaatcagctgtgattaacaagataccagaactactaaagcaaaaactttgcattactgggactattgatgctggttagctggagctaagaaattagcggtgattaagaagagaccagcatcattgaggtgacatcttctgggaagtattttctgaaagcacagtggctgtgttccagatatagccaaagttgtaccttgtgctgtggctggacttggtaatgtgtaagggtcacccaggtggtactggttttgaaggcatgaaggagttgagcagagcagctgaggcttggcacagtgagaggccatggaaggccattggtgaaagtgcagcctcagttgcaattgatggcccaggactgaaggggtcatgcagtgttttggagatgccagtaccatgagatgaccaccaagagcagcagcagcagtggagtacaggcatctggagcctagaggatgactcgtgtgctacaaagggcctggctggagaagtgacccaagcccttggaggagcccagaagatcgtgagttggatcccagacattggacagttggagattgacttttgcttttgattgtgactgtgccctgatattttccctcttgaagaaagaaactgttttagtggagcccacagttaagagacttttaattgtaaaaagactttggattttaaaagagatggatattttaaagagattgaaattttaagcatatgtaaagactgtgggacttttaaagttatttagaatggggatgaataagattgtaagggttgaggcttactagtgatgtttttgtgtgtcaagttgacaaggggtcaattgtactggctagttttgtgtcaacttgacacagctggagttatcacagagaaaggagcttcagttgaggaaatgcctccatgagatccaactgtaaggcattttctcaattagtgatcaagggggaaaggccccttgtgggtgggaccatctcagggctggtagtcttggttctataagaaagcaggctgagcaagccaggtgaggcaagccagtaaagaacatccctccatggcctctgcatcagctcctgcttcctgacctgcttgagttccagtcctggcttccttggtgatgaacagcagtatggaagtgtaagccgaataaaccctttcctcaccaacttgtttcttggtcatgatgtttgtgcaggaatagaaaccccgactaagacaactaggattgcaaaaatgtgctgtatatcactcatttgtgtctactgataaaccatggtcactgagggctgccaagatgccttagcaattcaagccacctgcctgctgatgcccctgggagccacatggtggaaggtgagacctgactcttgctcagtggcacatgtgtacccacagacacataaatgtaacaaaagtaaaactaaaaaatgtagtcattgaaggcaaggaaagctgctttccccaaggacggcgaggcctacgtttcaggaaagaccgggcttcgtatcatagtatattaacatagagactttggcagattattattcttttttgtttgtttgttgttgttgtttattttttgtttttcgagataggatttctctatgcagcgctggctgtcctggaacttgctttgtagaccaggctagtctagaacttggagagccacctgcctctgtctcctgagtactgggattaaaggtatacaccaccactgctgggctattcttgtactagaacattccttctacaacagtttcttttgccttgtttgtttgtttgtttgtttccacataaagtttaattagtcaagttaatgaaaatattaaaaattttgagttagttatggcatcagaaatttaacttttgttgcaaataatacagtatttggtgtttctgtcaagatgctatgctgccgagagagcaattgcattaaatcttaactcatcagggtcacgttccatgaacttcttgcaaacttttatgacatcctctaacaacgtctcatcgctagttttcccatggttaattggaaatggtttccatccatctaattcatagagatgcccatctacatgtactaacgcaataaaatgaagatctactttttcatctatacttggtgcctcagtctgaccttcatgtgcactggtttcatgagtaactcgaatagcgtcatagttctccaggtatttggctctctcttcagggctcattgatacagactcctccaggaactttttcaatgttgaccctgattcaaagtgcaccttgtctttgttgtttgcaatggcatggattagtccaatcgttccaatcgttccacaggcattgctgatggtttgtttcataaaatatactgatgatgtcacatcttgtccttgagattttatcttttcttcctcttctgttctgaagacttcatacttttctgtgatagggaagaggagtaacactgcgcacactggtcttggtatgatgctaagaagttcagactccatcccgtacacatcaacaaactgccagttaggatgcaggcctaattgcttgagaaactggttggtgacctcagggttggcctccagtggcagccagcgttgaccctccatgactgctccgtcggcctctctccagctctgaccttgccttgtttaatattggtaactaaataactcctgggttaaccataaatggaatttgttgcatccctatttctgagtgtggtaattaaaaaaaaaaatctaagccattttcatattaaaaagccttaccatctttagcagggaaagataaggggaaagagttggaaaagtaccagaaacaagtgacaggtgttttggtgagttatgtttcagcttgctctccagtcacaggaggagtgtaaattgctggtgatcatgtgaggcagaggggatggagggtgagcggaaatcagtggttccggaggcaccgacccttccatcaccagaggcttgcccactgctggggacctgagacaactcctgggcaagttgctttcctgatagacagggctgcccatggggactaaggcttgctttagtcttcaaggtaataaaaatggatgtgtgcaagaagactagtaggatggagtccaaagactaaagaggaactggagaaacagctggcattcactgagggctttctggtctctgtagtcacggatattctacaagaacggttaccagagtccattgtaccagttggcgatgtgaagctcagggaagcttagtagtttcatagggttgtataactggtaagctgtggatctaggttagagcctaggtcaggcctcggctaacatcattccccaccccactgtgtaaaatgcaggaggattttgtagtgttgtacttttctaaactagacattacccacatatagctatttatatctaaattaactaaaattcagtacagtttaaataccagtttctcagccatactagttacctttaaaagccttattggccactgtggcaactgttttgggcagcatacatgtagactatttctgtcattgtataatgtctgtgagtactggtctagaagtcaaccatcttgtcctttagttaattcttgcccttttgctttgcaaaggacaaaatgaaggatgagaaaagaggcaactcattcaaccaaagaacacagttgatccaggctcttagcctggctgcacagtggagtctcccgtgccctctgtctttccttaaaacacaaaccgtagaatttagaagtagtgatttttttttttctgtgcctccagcttcactccgtctctctgttgctagattctttcttctgaagcttttctctcaagttcaaagggtatatccgagttggcttcccccaaggaaataaaagatgtttgttggaaaggaattccacgcttaatatatgaagcggcccttggatccctttgcttccttctttgccttccttccaggcactttgtaattgaacttgcagctgctaaccatctgtcttccaaacagttcagatgacagaggtttgtgtgcctcaaatgctcgcagctgcctgttatttgctgtccacatacatggcatttgtgtaggccagatagaattagattatgaccaaaatgacagtggatcccagcatagtgctgggattgattataggcatgtatcatcacacctcgccccagattacagtgtggttctaattcgtttgttaaagattaagatacttaatgttcattgaactgatattagatatgtatcttgtataccaggtactggtttgcaagatagactttctctctctctctctctctctctctctctctccctcccttcctccctccctccctctctcccttccttcctttttaaagatttatttatttattatacataagtacactgtagctgtcttcagactctccagaagagggcatcagatcttgttacagatggttgtgagccaccatgtggttgctgggaattgaactcaggacttcagaagagcagttggtactcttaaccactgagccatctctccagcctaagactttctttctttattgaggcagaatttactatgaagctttgattggcttgtctctttctcctaagtgttgggactcatagcatgtctcaacatgtctgatcctaaatggaatttaggtgaaaactgaaaaatggggctagatgtagtggtgcatgcttttaagttcagcccttgggaagcagaggcaggttggtctctgtaatttcaaggccagactgatctaagtatcatactataggctagtgaaggttacatagtgagacgctgtctgacttaccaaaaaaaaaaaaagaaatctgaaaattgcatttaaatcttatctgaattatgttactagtatttgctatctatgcatctgcctatttagtctttgaattcagtaaaggcttcttttagatcttagctctgaagtaaattgaagaatcatgtataaatgtcccttgagtcaagctattaaagacatttaaattatactctccagtgtctaaatggcagtctgaagtgtatgtgtgtgcctgtgggggatgggcatgtgggagtagaaaggaggcattgtactgagataatatttttaggacgccagtgtaattagcagacttggggtttagaaaattgccctttagaagctgagaaattaaagttttgggtttcttcttaaataaatgttaaagctccatgcctgaatatgttcggagcgattaaagtggagacactggaataatggaaagtatccagaaaagtctcctcccggagtacaaagacaggaagagaaaggactttagtgatgatgggaacagccggccgggatctcttggagctttgacagctgatgatgtgggtaggagcagagtatccagaggagcactgttctgggtctggtctgtctaatttctagaaagttgagatgggctgagaatttttgttagcgggcccagctccatagctacaggatggcctcaggagagagccgtgctctcctcggtggtgcccctgtgggtgcaggctgttcagtgcaaagtccagcatcctaaaggagtaggaatgaattgtctcttctgtggcccatctgaattcagaggggtctaaaagtctttagcttaagccttaatgctttggaatggaggtgctatgtgtgaagcgtgtgctttgagctccttccctggtatagctgttagctcgacatttgaccatcttttgcccaggctgcttctctgtggcgtggtggtgatggtaatcgctctgtctcttagggtgtagatcagatgaggtaccattcagcatactttccagttctaagtaggtagatttaattttattcttggaaggaaccctggagatgtccttttgtggtcctgtcgtttggcagagaaagaatctgggtctagaaagaagggttagaagaagttggcatgcacacagcagttctgttttgaatcttgtgttctgagtggcacagcctctgctggtgctgcacaacagaaaggtttggctccagccaacttaaatctgaattgtgattctgcttcttacttaccatgtggccttatgtgtatgctcttacatccttgagtctgtttccacatctgtaagatgagcgtgaaaacatttttccagcaaaaaggatttctagactgtggtgtaaacagtgttctgtgattaacaggactgatggtaatgggcagggctcgaccccaggccagggacttcactctctctctcaggtgagctgagacaacgttcttagtttcctgagagcctccgatgctggaactcttcagctgctctttagccacacagactcaggatagagacaacaccggacatacttggaattttttgtgatgtgcaggaagcaaaagaattattttcagtgaaacaggagtctgcaaaaggcgcctaggaaacaactgcctagtgcatcctaatatagactcctctcggccttgttagctggccatctgcctgtccaacaccaccaggaagctcagcttttttctccacagtgtaaggaggatttcctgggctttgcatgcatgtgtgccctagtggagagtcccagtgaggaaggacagtctctggcatttgtgacagaagacagatgttggggatcatctaaacatctttccctggccccttactcatactgtcttactggggagtctctttgacatcctcagtaagtatagaaacccacatgtatgtcataataaactataagccatctcttggctaaatccatcacagacctttcctgcactcctgtctaggcagtggtcacctactctgtgcatactcatcacagttcagaccacactgttgcctctgacatggggaagtctgggctggatgattctttttttttttttttttttttttaaaattgtgtgtatgatatgtgtgaatgtgggcttccatatcacagtctgtgttggaggtcggaggacagtttttgggagtctattctgtataccagcaggctagctgaccagtgaatttctgggattttttttttttttttttgtctctgcctccgatctcatagtaggagtgctgagattacagatacaaactattgtgtacacctttttgtgggttctgaggcctgaactcaggttattaacttgcacgataagtgcttttacccactgagccatctcactggctctagatcatcagcttaaaaacaaaaacaaattatatttatttgtgcatgtgtatgtacatgtatgtgcatatgtacagttgcatgttacccacagtgtgtatataggtcagaggacagttctttccctccaccatctagattccaaggatggaactcagatggatagacttcgcagcaagcacctttacctgctgagctagggcaggcctgtcttctttgcccccagtgcataacacatttcctattgtttgtgtccgtttccttcactgtaacaattctgaggaaatcagctcatagagaaaaaaggagagcgggtcttcaggagtcagaagagctgagagattgaggtcagcctgggctgacccctcctcctacaacaggagaaaagagggaaaaggaagcagggagaggagagaggagagaaggatggagagaggcttacgtgttgaggttccagtccattgattgctgctgttattttgggccttggggagacagtacatggagatggtggcacatgacagagtaaaattgttctcttcgttaccaaaaatacaaaagagaaaaggtgacatgggtttgtacctagctgtccaccccaccccactcccatctcctgccagtagtatcacagggtgaggctacacctttcacacttgggcctttgggactgacgtccctgggatctgatttggaagttgtgctgatgtaggagcagctctgttagcttctgtggtgtttaactttgactttagcacttggttattttggcttatatagcatttgtgctgttaggctcagtgtgcttgctcttgttgtcatatttgtttattcccttgtggaatcctatggcgtgctggtgctgtttctacttgatggacaggaaagcaggtttgtttttttgtttttaattgaattatttatttacttatttaatgtgtgtgagtacactgtagctatcttcagacacaccagaaaggggcattgttccccattacagatggttgtgagacaccatgtggttgctgggaattgaactcaggacctctagaagagcagttcagtattcttaatcactgagccatctctccagcccggggaagcagtttttgttacaggacttatgcatgtcatacaggccactgaaagggcctgcagttctctttgctgctctacagcagacagctccttcccagcccagagggggaaacatttaacaagcatgtactggtatggacatctacactattttatgctgtgtcctcagccctgtgcctggcatggagggaggctcagggaaagcctggaaggcttggatggattggctagcctttttataattccatgctttctgcttatccctagcaacctgtaaatgctgggttcatgatggatatgtgacattggtggctgaatttacacagcacctggtggcttttcacactccccctcatgcctctctggagactagaatgggacagatggccacagacaaagtattctcagctctgcaccctctcttcaaatcacagctgagggaaagttaagtttttgcaacaacacagttttggtaatgtgatttcaggctgctagtaagttgcttaactctctggatagatcacacctcagcaacattcatttagtaccagcttgatttcatttaggtggctgtagttctacccaccaagcctcctaccccttaataaactgagactgataaggttaactctctgagccaggcagattctgggtccagaattcaatgaatcatctttttctcattaacacctttaatttcttctccactgagtatagatgtctgctttaaaatgttaggggtggaaacactcatgctggtttagcttccttcctgtgtatggacttgaagagactgaggccagagagactgagcagcttacctgggagtgggatttagtgaaaatctcaaagagacccagggctcctggtttctctgagagcagggctcctgatttcttttggggcccactgcctgcccttcacttctgtcttaagaaagagaaagttctatgatctatttaattaagaaatgaataaaggtagatttttgttcatactagaggccccagcctagatttagatctagagttcttgatttaaaaaactttcttttaaaccaggtgatggtggctcttaagcctttaatcccagcacacaggaagcagagggaggcgaatctctctgagttggaggccagcctggtctacagagccagttctaggacagtcagggctacacagagaaaccctgtctcgaaaacaaaaaaaaatgaacaagacccccccccccacttccctctcccccccaaaaaaaaaaccaaaacaacaataacaaatcaaactttctttaccagacttggtggggcacactcttattatctcagcagtcaggaagttgaggcagacaggttgagagttgtaggctagcctggtctacatagcaagccctgtctcagaaacaaaataacactaccctaaataattgtgttgcttgggctggttttctttcctagtcatcatttttctcttgcggcagttcaaaatttataaggcctgaaagagttaatactcctctcagaatagccaggcgtgcgtctcccaggaagtagcagagaggcaggatgtggcaaaccagtgggtgaatgagagccctgctccttggaagaaaaggaagtgggagcggcgagaggcgagacacaggaagattgcagaggacaggtctttcttttcacctctgcgctagatgtggttctcctgaagctaagcagacccacaatagccacggcccgagaatgcaagtcgtgctgaatttggagttgcccattcttcgcacaactactatctcaagtttaacgtgtggtggactgtccctgttccgtcttttgctttgtaacttcagtcactggtgcattctcatctccctattgctcttttttgtttgttcctttgcttgctttttgtttttctttttttttaaaaaaatatttagttagttagtttatgtatgtgagtacactgtagctgtacagatggttctgagccttcatgtggttgttggaaattgaattttaggacctctgttcgctccagcccaaagatttattattatacataaggacactgtaactgtcttctgacacacaagaagagggcgtcagatctcattacaggtggtaattacagctaccatgtggttgctgggatttgaagtcaggatcttcagaagagcagtcactgagccatctcactagcctgctttttgtttttcgagagaaggtttctctgtgtagccttagctgtcctggaatgaagtctgtagatcaggctggccttgaactcacgtagatccacctgcctctgactcctgaatgctgggactataaggcctgtgctaccatgctgagctaggtctgtcttttaattacctctgagaatctacactggttgtaatttggaatctaagaagttagacatgccgggcggtggtggcgcacgcctttaatcccagcacttgggaggcagaggcaggcagatttctgagttcgaggccagcctggtctacagagtgagttctagacaagtgtacagcttctggaaagtcacctctccaatgcatttacctttattaattcagaacacattcctacccattctctgtaaatggccatatagcagtccccattccacagggcaagattgttctcctgcttactgtcagagagcttttgttcctaaccagatgtccagatgccagcagagtcagtctttaccttctttggcttcctctttcatcttttgcttaagacctttgttgcaaattcctggcctgccttgttagacccgtagtgtgactgatactctacttgtaagcttgcagatcttagaagtagatagtcctgatagtagattcagaatcctcttgtccctatggtaactttggagactatacagatttgggcagcacttgactggttaagggcacagtctttttcaagactgatcttattttagacactggctggaagcttgggagttcccaggctacttgtacttcagatgaagtgactacaaattcagggttctctttaccttctcaggtttcagaatttgctagagtaattatagaatgtagaaagttactgattgctgtcctaattacaaatttattgcataaaaattataataatcaagttaaccaaaggaagagacacaaagttaggcctgcagaaaggtcaactgctagtgtcctctgcttgtgtccacagggcacatctctctttggcacactgatgtacaatatgcacagattattgtttaccaggaaagttcatctgagtcttagtgtctggagctccttgcagggttagcttcatcactggtgctgtgatcaaattcagtctccatcctcctgcattctctgcaagttttgttgatagcacttatttaagagcccagtttactagctgaatgtttggcctttctgctgtggccaacccttctcccttgttcagtagactgcctagggacccaccctgagtcacctcagcataaatcaataggctatactgtgaagaacaggcacacctgttactcagggattgcatgggtttatataggctgcctcccacagagggcagagtccagccaagttgctcactatacaacaacccccttccacaaagctatctcctcctcattgccagaaatctagtgtcactgttaccctttctttctttcctgtccaggtggtcacacagttgtgccagctgacttcagtctgtcccatatcatcgtcattgttcactgggtactgtgctctttgctttctccctgtgtccgaggtcactgctctgtaactctatgctgggtcctactgggcctggctcttaatacaaaattcactttattttcttacttcagaatttgcttttataccagcactctggaggctgaggcagaaggattgccatgagtttgaggctagcatggactacatagtaaattttaagccagcctaggttatagagtgagattgtattgcaaacaaaacaaaagaagcaaaaacaaacaaaaaatcagaaaaacccacccgaaataaaaaagtttgttattgaagaataaagtatatattataaccccatgtatataaaatacactacagtcaggtatggtgcacatctctaattccaatacttggtaggtgaatgccagatgatcgaagagttcaagatcctttctgtgttgataggatcctgtaactttaattttttcaaacgcctatttttgattatggttcttaaatgctttaacctccttgtaacccaccagaagtagtggaaaagaagggatacggggaagtggacctgtttagaaaggttcttttggagcaactcttatctgtgttgtcctgaaatcagcagttcagttcacaggttagcaggcagtggcagctcaatccacttgcaaacacttcacatcagcagtccagctgggtagagtcaggatagcaaacacgaatcagcagcagtgccatgacctaacaaagacaaccaggcctcagcccacgctccagtcagcaggagggaccaacaggaacatcaggagatcagtgaagatcagcgaagacgaagatgggagacctacaagcactgaatggctagctttataagcaggccttagctcagcctccatcactgtcctttttatactctctccaaacatcatgtgtcctccacgggtcttgccttagcaagacaaaactctgccaatcagcccaagtcctcagaagctgcaaaaaagccatggcacagcaccagaagttttttggtgcatttctctctatagagtcccaactaatgcagttcaactatgcagtgtaaagcaggccagtacatggtgtcattagcagagactcttccgtcatgtgtcctttctcgtccttgctttatcagaacatcctctctcctgtgtttgcttcagagaaaccttccttctcgagtttattgtagtctttcacctgtgtccacttcagctaaatgttctttcacatgtttgccccagcaaagcaccatcgagctgactttccaaagaacctttaagttttctttcacctctgagctataccggagctcagctaaaatgaggcttgtttgtttttggttttctttgctagtttgatttctttttttttttttttttttttttttttttggtttttcaagacagggtttctctgtgtagctctggctgtcctggaactcactttgtagaccaggctggcctcgaactcagaaatccgcctgcctctgcctcccaaatgctgggattaaaggcgtgcaccaccacgcccggctttgatttcttttttttctttgtttgagacagggtctctccacataactctggctgtcctggaagtcactgtttagaccaggttgacctcaaattcagagactgtctgcttctacctcccaagtgctgaggttaaaggcatatgctaccatatgcagcttgccagtttgattttaataactaagtttttctgggtcccaagtgttacttcttccaggtaggttttactctgttaggctggctgctgttagcttggaggcctgacatagttttccacccatagttgaagaactccagtatctaagcaatcacatttggactgctggtcctaatagtgagtgagctgatggagactttgtcagaggtgatttgtccttcgggtgagacctgtgactctttctatgtgcgctttaggatgggttcttagtaataaacatgcccctgtgtgtaagggagaacacagagagaactgaaggctgctcaaagtggaccgcaattggacacgcatcttagttttacttaattttggcttttaatattatatttgtgtatgtgtgtggatatgtgtgcgagtgcatgtgtctgtctggttttttttgtttttgtttttgttttttttggggttttcgagacagggtttctctgtatagtcctggctgtcctggaactcactttgtagaccaggctggccttgaactcagaaattcgcctgcctctgcctccccagtgctgggattaaaggtgtacaccaccacgcccggctagtctgtctgtctttgtgaggtgtgcaatgagatacaggtgtccataaaggctagaagaggatgtgggatcccttggagctggattacagacaggagctacccaagggggttctgggaactgaactcaagtcctccagaagagcagcaagtgctcttaaatgctgagccttttcttcagccctgttttttgttattttttgtttgctttgctttgcttcgctttgttttgctttgttgggagacagtgtctctcatagcccaggctggtcttgaactgtctgtgaagtcaaggacaacctttaacacctgctcctcctgtctccaggtacttgacccaagacttcatgcttgctaagcaagcactttaccaactcagcacattccatcctagagacagattgtgcctagagatagatgtgtttcttgtctcctcagtctgcttctgagctcaggtgtattagaccttttgtcttagttaggattttactgctgtgaacagacaccatgaccaaggcaactcttataaggacaacatttaattggggctggcttacaggcaagaggttcagtctataatcatcaaggtgggagcatggcagcatctaggcaggcatggtacaggcagagctgagagttctacatcttcatctgaagactgctagtgaaagactggctttccaggcatctaggctgatggtcttaaagctcataccctcagtgacacacttactccaacaaggctacccttcctaatagtgccactccctgggccgagcatatagaaaccatcacacctttctccttgggaacttgactgcctgctgctgtatcatgcagtctaggattgtggtcacaatgtgttttcaccttctccctaattgaacagctgtgtgtgccaggagtggtggcgtactgcatgaattctaggcaaacatgggctacatagaaaagccttcccctccttccccccacaccccccaaaacaaacaaacaaacaaacccaaaactgggggctggacagatggctcagcagttttagcacactggcagcttgattcccagcaccaacatggctgcacacaccatctgtaaccctaaccctgaggaagaggatgtgttcatctgggttccaactgggctgtaattaggctctttttgcttttaccgtcctgggccctcctgactacccttctagcctgtgtggcttccactatttttatgcttctgcttttcccagtgagcttgtctcggccatgctcttcctcttccccacatccctcagagtatgtcagcctgggagttcctcctcacagcttacaaaacctttatccctttcccctgggaataagtcactataatagcaaagtacctggtatcagggatgaaccaggggtgttttgtttgaaagataggaattttttcttcatcactgtttgaagggagagtcaaagtctgaccttccagactcctaccatggaagagttctgtacttgtccctggtctcaagtaaattaacatgcatgccatgctctagtatttgagacacccatctttgcatctaaattctactttttatcagattattgttggtctttttgccgttcatttgttgatgtttcccctctccccaaacttttaattccttcctgtgctgtgtagaagagtgaccattcaggagttatttcattgctgttactgttgtccacccaggtagagttagaagtgctcttactgcattcaagcagcagcacgacaccaccctctgattcaggatgttgttcagtattgggatcagcctgtgtatggagtgggtggttccatcactccagcgtgcgtgtgtgtgtgtgtgtgtgtgtgtgtgtgccttagtgtgactgtctgaaaaaacactgtgggaaggtatttttttttttttttttttttttggtttttcgagacagggtttctctgtgtagccctggctgtcctggaactcactttgtagaccaggctgtcctggaactcactttgtagaccaggcctgcctcagcctcagcctcccaagtgctgggattaaaggcgtgcgcctttttgtcatctttgtttaggaggataggaatatgagtcttagtgatttctttttaattaaatctatttccttggtttttgtaaaggtttgtttattgacttggaagctatctgcaaaggaagataaacatttgttctaagtgacatttttttcttttctttttcctttaggtttttcatgatagggtttctttgtatagcccaggctgatgttgaactcacagggtcacctgcctctgtctgtcaagtgctgggactaaaggcgtgcgctagcaatacttggctgacattttttcttttaagcaatacttttttcatatatctatctcacaatatctttttttataaacaaggtctcatttgcaccctggctggctggctttgtagactagccgaccttaaccccacagagctgcatgctgagtactaggataaagacacaggtcacctttcccagctcattaagtctatgtcattgtctgcagaataatttatgctagtaagtcagtcccctttcctttctttttcctcccttttttctctctgagtctgggttgtactctgtagcctaggctagcttgaaattcttgagagtcattgacctttgcctcctaggattgtagtgtaaggcaccacacccggcagcccattcttttccttacctgtttatcttcttagccctgttccttagttcagtacaaatctctaatctctacaagactagtagatcttggttacaaaaaaccatttctgacttaggccttctctgagcattagaggaacctttgggcactagacatgtacatggtgtacatgcatacatccaggcaaaacattcatacatccaaataaaatatttaaatttaaaaaactctttggggcaggcataaaaagtcagaaaaggacttacaggtggctgtgagacaaactccagccctctgtgagagcagagagtgcctataaccggtgagccacctctccggtgttctttttttattttttcaagacaaggtttctctgtatagccctggctgtcctggaactcactctgtagaccaggctggcctcgaactcagaaatccgcctgcctctgcctcccaaatgctgggtttaaaggcgtggactaccacgcccatgcctctgccctctctttagtgtactctcttagcaagacagagcctgccacctatcaagctggctgtgctggcgtgcacctatgatttgtgtctggaagcttgaggacgacatagttcttttgtctaggcaatgtataactccacgtcctataatccttaaaccagcttctaagttcagtagctatcgagagaagtgtgagagatcttgaaagttgtgttcctgacatggtcatgcccgtctgtaattccagcactagggaggttaaccccagcacttgggatgagtttcaggacagcctggtctgtataatgagttccaggagttcagaactgctagggttacaagtgagatcctgttttgggtgggcgggtctttaaaaagaagaaaagagttctgggagctgggagacctgccaccttgtcctctctaagcctcactttcctgttctgtacaatgaggattgaatccatttgatgtccttgaggtctctcttttactgcttaatttaaactgttaagccacaagacccccagtatggcagtgtaattataattaggcttagcaggtcctggagggagagggaagagccagcggtcttacccagagtatcattctttcatggtgctactgatgtttccagactccaagtgacaacccttgtttttctgtgcattgccatttcaagcccataatcttcttgtatctccttgaacttgtgtttactgttagacagccatggtgcagaattcacatttcactgtgctgtttttgtacttgagggagtttgagtggatcacagctggtctctggagagaaggagggctctgtgtgtgtgtgtgtgtgtgtgtgtgtgtgtgtgtgtgtgtgtgggaaagggagagggagggagggagggagggagagagaaagagagagacagagacagagactgagacagactgagacagactgttggagctctagttttgttttttaatttccagtgtcatttttggtgactttagttaaaaataatggtttcaaaagaggcaggtttttgtcctctgagctttgtggatttgtggtgtggatcagcagtaaggacctctcttcttgtttcctttgcttgaagcatttcaccttgagagggaaaaacaagacttgtggctggcttctcagtacaagatgaggtgaccctgaatagcaacaccttattgattggtttctttccagtgaacagtagaagctgagctgctgccatgatcttcactttacctcagatctactagtttgcctttcattctctggaaagacttaaaaatgttgaaagtgctataagaattcttaaaggaaagaaggaaggcaaggcacaggtcttgctggtgctgccttggcttctgctcccatgctcctgcatggactgccttaccattatgtagaatgggttagcatttcaggacttctcatgagcttgtgtgtgactctgccttcttgaagcgaagcatgaaactattacaatgtatagaagagaaatctgaaacctggcaaggaaaggtggtttgtgcagagtcccacttgttaatcaagttagtggatcattaagttaaggccactgattcactcttccacccccaggggcctccggtgtgtctgaccatcacagcacacagcctgtcccgcgggtctggtgggactaggactctggaaagcacacctcagcagtcatttccttaggtggtgaggaagggattagaccctggacatggaagtcagaaaggagagaaggaaggaaggaatccatggacctggtctcttttggaaaatgccaaattaacttgtgactactctgctcccctcccatctcttttcttcccccagtggaactcactctgttgaactcagagagtcacctgcttctgcttcctgaatgctaggattaaaggtgtgtgccaccccactccagcatctcctcccttttaaatccattctggaagtagaactcaggcccctatcttgtgtgccaagtgtttttactcactgagccatctctctggccctcttctttttctgatagagtatcactgtgtagcccaggctagcctgagacttgtgataatccttttgcctctgtctccctagtgctgggattataggcatctgtcatcagagttgtagtttgtttctgtagagctaggcaagtgatgagtcagcatcccctttcaaaccttggggagcaagtttttactggcatgaactcacagagaggcagagttgctcctcttttattgaagaaggttagataggttgttgtgcaggggggatgaacttgtgtctgagacaaagttgcctcctttgaaatatggaatatttggagtaggtatgatgttaaggtttgagtcttggctttgctgttcactcagctgtgtggccttggctcatttactcctcccgcccattcttgagtttgctctagtgatttgtttgatcagttccagttcatagatggaatgcacatagcagtgctagggaaagagtgtgttctctctttagacattctcctcctagctgtgctcatgaatggtgtgtgcacgctcatgtgtgtgtgtgtgcacgcgcgcgtgtgtgttttggggatttcggttctatgagataaggtcttatatgtagtccagactggcctggatctcaggatccttctgcctgatactgggattatagtatccctataatcccagtcatcccatagtaccctgtcatttatgtggtgatccaaactcatggctttgtttgttaggaaatcactactacctgggctacatccttagtcctagtctatttatttttgacagcagcttttggattctgaatttatatgcctccctaagacttccaggcagctgtaatgtcacctaagtttggggggaagtatctgtctgtctgcatttgacatgcgtttctaaatatggctatggatccttttgtgaagagactagagagggaggaagggcatgtgcatccctaacctgttacacagtcttacatgttagggtctcataaccgagggacgagggcactgtgaaatttaactaaatattttagcagaataagaatatcaactagctgcctcgggctcttcatctaccttaacaaaaggctgttgggtggtttaagtagaaatgtattttatcatacttgttgaggttgggtgttacaagattaggctgtcaacacaatatggttctagggaaggcccttcctggtttgacaatagctgccttttctttgtgtggtctttcactgtgtgtactgggagcaagagggccactaagcctacttgactagtatccaacctgtatgacctcctttagtcttaattcccttcggaaagacctgtttcacacacatccgtatgtgactatggaagggtgtgcactgtttagaccatggcaccatcctttccccatagttactcaatgaggtgtgccagtgacatcatcttgtggcttctcctgcagtgttggaccagcctgtattctggagccatgagatctctgtttctttcttcttggcctttggagaggatgccaaagaatagaggattatacttctactttgactggcatatctgggggacaccagcactctgatgtgtaacaagtcctgttttgtcacttgtttagactggagagtgacatcagatgaaacacagtggatgccctctttacaattcataagattaagcaacaggcttcactgaaccttcttcagtctctgtatgaaacactgtgatgtccgtggcatgccatgtgttcagctggtggctgcttcctgccatgctcacttggtttctgcgagatagctggctcccaagcccgtctctgcagcttttggcttggcagctcagttgtttacatcagatcgactgatgtaaatcagatgcagtgcccctcaagtgaagtgctttcctatttgtctgtctttgaagactaggtaaaactgatgagatagtaaggccacgatgctgtcacattagaggagcagtaagactgggggaatgaggaagttttgaatttgtagactagacatgtgtttacattttcattttatctctcagaattaggacttggaaatcatacatgatatttggcattctgggttcatatagacctttaatctcagttctctgagttcatggctagcctggtctacatagcaaattccaggatagccaaggcaacaaagagagaccctgggctttttttttgttgttgttgttttttggtttggtttgtttgttttttaaagatctggagccagatccttactcagagggccttactttgcattaaagaatgagttggggcccagtaaatggctcagtggggaacagcatttaccatataaacctgaggactgagcttgggtccccaagaacccacgtaaagctggattcattagtacatgtccgtgatcccagggcttctacagtcgggtgaggaggggaagcaggaggctctctggaagcttgtgggccagctagtctgtctgtcctgtgcagctggagagtgagtgactctgccttgaacaaggtagaaagtgagagccagcacctcaggttgtcttctgacctcctccacagacgtcctgcactcatgcagacagacacacgtgaagaccgagtaaaggagtgtgctatacaaaagtaacagacttaggtgtgtcttttatggattgtgatccaacttttctgattgccctgcttcctagaccatatactagaacagaagaaaccgggcgtggtggtgcaggactttaatcccagcacttgggaggcagaggcagaggcaggcggatttctgagttcaaggccagcctggtctacaaagcgagttccaggacagccagggctatacagagaaaccctgtcttgaaaaactcaaaaaaaaaaaaaaaaaaaaaaaaaagaacagaaggtttccactgctctgttccaattaaaagtgggtttggttacagttgagaaggtttagtgaattttattttgtgtattgtgtaaatgtaattaaaattcattgttttatttctgaggtagggcttgttatatagccgcctaaaccagcctaaagctcacagtcatcttgcctcggcttcctgagtgctgagattataggtagtcaccacacctgtctctagtgagggtttaaaaagtgacatgtatttctgtgtgtctgagtttgagtgtgtgtacatgaggacggctccagaggcgttgggtcctttggagctggagtcacgggtggttgtaaactgcctgacatgggtgtggggagcacccatgttctctagaagagcagcagcaagtgcttttaatgtcagagccatctcttaggtgcttgttttcactcttactagattccttggttcctcttgtagacctttaatatgttgagagaaatccaggaccctcattgttcaatgctgcgttgtgagataaagcagggttgaaggtgaggccctagggatgactgaaatgagcagagccctggcgagttgaactctttctttcgggcgttaccttccttgagtcccctgtgggcttggcccaggagtgcacggctgcagggcaggcggggcagagcgagcgtctctgtgctgcgccagtgctgacctgggcctcctcggggcaggaccaacctggaggccttgcagaagaagctggaggagctggagcttgacgagcagcagcggaagcggctcgaggcctttctgacgcagaagcagaaggtgggggaactgaaggatgatgactttgagaagatcagcgaactgggagctggcaacggtggagtggtcttcaaggtctcccacaagccatctggcctggttatggctagaaaggtgagcttatctgggtaaacagctaattatcaattaggagcctgaatgggtaaaagaaagggtttgtttgtttgtttgtttgtttgttttcgagacagggtttctctgtatagccctggctgtcctggaactcactctgtagaccaggctggcctcgaactcagaaatccacctgcctctgcctcctgagtgctgggattaagggcgtgcgccacgaccgcctggcaaaaggaggtttttacttaggactttttttgtgcagttagattgaaaaccatacatttgtcaagtgcagaaaggagctgcttttttacacccagttctagtgactgatgctcaggccaaagctgagtttcatggcttcagtcttgacccaatccctttcctgttcaccacgtcataacacgtgccctgtatagagagactatgttctaccatgtttttcagctcacccggctctttcttctctccatgtttgtattgtgccgttccttctagctttcccagtggcatccattttggggacttacctcttgtttatttcctgtcagctgttacaactcatcaattgtcatatgtcatacttattgtctgtggcgtgaccttattaaataacattaaatgtgtctgtcacttgtcttctggttagaacaaggggcaatattgaaacatattaggcaacagctgacattttggctaaatcaatcctatcaggttcctgaagtcaaggaggagcccgtggggtgattagggttaccctacgtcaattctgcatgcctttatacaccacagccctactgaaccgtgtccagaaggccgcatttccctcatctctagaaacttggctttaaaaatggctttagtgggtaaaagtatgtaagtatgctatactactgtgagtactcgagtttacatcaccagatcctacataatagcttgatttgtagtatgagtatccgggatcccagcgttttcatagtgtcgtgggaacttgtgcccacctagcctggcatatgccacaggaaaacagtccaggggctggagagaaggatcagcggttaaaagcagttattgctcttgcagaggacctgggttggttatagtacccacatggctgcttaaaaccatgcttactgcagttctgcacacacatgatgcacatacatatactcaagcatacacatatacaggtgaaggtgaggacagacacctgaggttgtcacctgacctccacatgtgcactattacatgagagtacctttattcacacacgtgcttacacacacatacttagactttacacacccacacaaaggtaaattaataattataatttttaaaatttatttttccaagtgtaggggttcatggctgtagtaagtgtttgaaagaatgatgcagtaagattgtgagttccctgactgagctacaaagtgagctaacctgggcaatatggtgagttcctttttcaaaatcatagagagctggaatgtagcttggtggtagagtacttgtatagcgtgctcaaggttctgtgttcagtcatcagcaccttaagcaaagccaaaaagctgtttctcttcttaccttcagaaacttaaatcttgaagaaagacattcttctttactccacttcttaaaagctttcccctcccgtcttcccttcagctgatccacctggagatcaaacccgcaatccggaaccagatcatccgggagctgcaggtactgcacgagtgcaactccccgtacatcgtgggcttctacggggccttctacagcgacggcgagatcagcatctgcatggagcacatggtgagcagctggctgtcagtctttgcagtggcctgggaacaggctggctctggcctcattgttggtttggatggcgaccagctcttccctgcctccccattccacaccctagaggcctaggagacccgggggcctgactggagtctggtatagtcacaggatgacagcattgcttctcttcaaagagaggtgttagatgccaggaattctcagtgggcttttctccagtatatttcctaattttctcctattttgatagccataagattttgatgtagttcaaatctggctaatacagtataagtccagtctatgtctctgccttcagaaggtttatgatatactttaagggcagccttgggattttttttggaggagctgacgagagcacccccccccccccccacacacacacactagtgaaaggtaagagcaagtcagggagtgggtgtttatgggccagttacatgtgtgggagctagtctgcaggcccttccttttcttcccagtgatggtgaccataaaaaggctcatgcttattgggcatatatatagtaatcaagtgtcatcctaaacagcccagaagatttcctgtgcttcccaaagacatggctgcactcttgttggagtgaaaaggggcaagaaccttctctataacctttagacatgtagaagtggttccaggatccaagttctaaatgacaccatgactaatgcctgcaacagcatatatggcccttcctgatcatagaaggaatattcaaggccagcctggtctacagagtgagttccaggacagccaaggctacacagagaaaccctgtctcaaaaacaacacccccccccccaaaaaaaggatttatttatttatttaatgtatatgagtacactgtagctgttttcagacacaccagaagaaggcatcagatcctgttatagatggttatgagccaccatgtggttgctaggaattggactcaggacctctggaagggcagtcagtgcttttaaccactgagccatatctccagccccttgctgctacttcttaactgtaactttgcatgcagttagtaagtcctatttagtccaatgcctgtacttggttgacttcactacatagagatgtgggactgggctttttctatcctttaagcttaggattgccagctttgtagctgatagaatggcataggaatgttgggaatcagttgtttatgtctttttccttacataaatataaataaggatattgtcatgtttgtcaccatgttgtgttcctgtcatcctctcttgtatctaggatcttgtgcatagtaggtaaatacttaactcctaagctgtgtcccagctccaccactgtcttgaaagttcacattattcctgacaccctgctacagagcaggcactcagtaagtctgtgtttacttaaaaccattgtcttagttaggcgtcaattgctatgagaaatatgataaataccacaaccaaaagcaactgggggagaaaagagtttatttcaacgtataactcccagggcacactccattattttttttttttttttttttggtttttcgagacagggtttctctgtatagccccggctgtcctggaactcactttgtagaccaggctggcctcgaactcagagatccacctgcctctgcctcccgagtgctgggattaaaggcgtgtgccaccacgcccggctggcacactccattattgagagaagtcagggagctaatgcagagtccatggatgaatgctgcttactggctggctcctcatggcttcttcagcctgctttcttgtagcacctaggaccaccagccaagaggtaacatcacccacaatagtctggtcccttccacatttgtcattcaaggaaatgcactacaggcttgcccataggccagtctggtgggggtatttttaattaaggttccttcttctaaaatgactctagcttgtgtcaacctgacataaaactagccagtgcactatttaactgtgaccttgagtagacgtcctcatcgctcagattctcatttcttacaaatgagtcttctcatttgtaaggtggtcatgattctatctgttttgttgctgtgcaggttagaatgacaaacatcagtcagtatgccctccaattcagagtatgcattctgcaagtgctagttcctgctttatttccatggggctggcagttcagagtcaggggagtctacaaacttgatgtctcttatgctttcagcctgccacagtggctgatgtctcctgtacccatttcctttgacctctacacctaggctgacgttcagaatggtgcctggtctgaatggatgtcccctcctctacctaaggagtctgtgctggttgccccctgcccctcaccctaacacatataccatcattttgaatatttgttctatgatcaggaagggccatatatgctgttgcaggcatcagtcatggtgtcatttaaaacttggatcctggaaccaacttctgcatgtctaaaggttatagagaaggttcttgccccttttcactccaacaagagtgcagccatgtctttgggaagcacaggaaatcttctgggctggctgcagtccctgacctggggtgcaaattcttacttgggtcttagctcctgccccttaggactatttagatagggtctcattacacagtccttattggcttggaggttatgtaaaccaggctggcctttaatttagaggtctacctggctctgccttctggttgttgggattaaagaccatgccaccaagcctggcaggactattctactttttctcctcttcttcctcctcctcctcctcctcctcctcctcctcctctttgaacttgcagtgttttttcctgcctctgcctattgcctactgggataacaggtgtgtgctactgtgcctgacatctttggacctttgggtttcttgtactctttgttgatggttcctccccgaccctcccttcttctagcccaaaaagagttttgatgcaactagaaagggaagaagagaagttgagtcaatgctgataagccagaaacaggaagggccagagtagccttctgtcctcttaggacttgctaaagtaatagaaggtggatgtcggcataaccagttataataacaactagctttcaactctcctatcatttgccaagtccttttcacattatgtaagttattaatcacatcacccccatctcatgagatggattgtcagccctctcagctggcaggttgagatagttaagtcctaggagatttcataattgacataaatcatatagccagtgagtgccatcgtctaagcaggtctgcttcctttggtttcatactctctcctctctgtgcaggttctatactcactggaattctgcttctcaacagagaaatgactggatgagttctctagggcccctctccgagcttacactgtttccatggtttggggcacttgtagccagtcacgatttacactagttaatcagcatggcccagtttcataaacttacttttagtgcttattatgtgcattgtcacatgaattgccctgagaactgggaggatagagctctgcacagctggtggttgtgctctcacgttagccgtcagagctgctgagcaccaggtatgctgtttcaagcccactctgctgaagcatcacaagttctgtccctagttccatgcactcaaatgtctcccgctaatatgggatcaaagaggtggtttgtgggtgaatggggctgcactcctggaagcttacttcaggggctaaagttaggccccaaacattgataatgggtttaatggtctggactggggcttggagggagagagctaactaagctttggaagcagcaacaaggcctttgcctcacttgctctaataaagaacagtatcttttcctactttcattttattttgtaagtttttttctctttgtaactcagtgttttgcccatgctgggtaccactgagtgacacctcctgtcatggaccagtgtttttatactagagaagaactcatcctgtcctgaaggtctaacaggactctgttgcaagtagctgttgttagaaggccatgcagccataagagccacaagaggtctttcccagactcgggtctctgccaggcctcctatatcagagccccttactgcaaaaactggctgccacttgcctccagggtgggtcatgtgaagaactctgccctgtagtcacatcccagcttctaaaaggttttgattggtccccactgtcacagtctgtttgatattctatgtcattaacatgccattccagcaggtgattagattgcaagcatataaagctcaaggaattttacatcgtacagtaactatcacctcagttctgcatctggccatatttgcttcatcgactattgtccacctatctactgctcaaataggttttgagatgcattttaaagtcagtttgtgtcaccagcatgcactatccattttctgaagcacccagccagggattcaattcccctagaaatcagtctgaattttgagagccaagcagaaaggaagctccctcaccagaacggaatgctcttgtctgcagagaggagcctttctgctcaattggtagctgagcaaccagggagaagggagttggagttggtggttttgaggcaggagtaaaagcttttgagctattattttcataaagcatttgtctcttctatagagaatcatcacaaaagtaccattgacttagttaataattggcttctaaaaataagcaccatgtcagcagtggtagtcggtgatcgcaagttcttggcaacagtgaagcagaactagagtgctgcagggctggttgcaggggcctgggcagtcctgactagcttgtgctcctggcatcttgtgagctcattgttctccctctaggcttgtcactctcaagggtaaagggaaggagtcattttggcttctttttaatagcttttcttttcttttttctttctttctttctttttaaactaggggagtatgcagtgtacactcagagtgctcgctctctccttctctctcttctcgctctttccctcctttccttcctctctctcagctcatgttctcatcttaaaacaccaggagcagattccctcacttctgcctctatcaagtgtcagttttctacatgggaactcggccacagctggccatttctaacctagtctgatcagccctgcatgtcttcatggagccatggtaagatagaaatactttcttagcaaccctgtgggaaggtcatatgtattaagttagctgggttgccttctgtcctttgccatggttactgtcgtttgaaaggcagttctatttgttgcctaaatggagaaagaaacatgagaaccacctggttctttctgccctatttgaatccagtttcacagagcagctttgtcaccttgttttatacagtcctttcttgactaggcaaagccattcaaactaaggagctgaagcagattctgctagaggcaaattagaagtagcttgttagttttctgtgtttttcctccattggtgaaggaaactgagagatgcatggcttttgtaggagcctgctgacttggggaaggggttcctggggtccggtatcatccttacttagaccaaaggggcctgtagcacttaaggcagccaaaacaggaccagtttgatggcatgagctcagcatggtcacagctaaataaaggaaagtaagtgtatgtataaagggtgttctccctctgtctcaatgcttccactccctagacactctgccatagtgaagttctggattgaggtccagagttctctactctacttggttggctcacccaccaaggtgctacagtattcatcatggtcagaagtcatttgctatattactcttcactttctgcctttgagacagggtctcactatgaaccaggagctagactggtagccagcaagccccaatgatctcctgtctcttccctgaacagtgttggggttacaagtgtgcacacggccatgcctggctttttatatgtatgctggtgatttgaactcaggtcctcatattgcatagtcaacactcttactctcttaagaagtaagagaagttttctaggtttggccttgaccacagctgggcatttctagccatgtctgttcctgtgactgcacagtatcccaggagtgtgacgctgtttagtgtcttggctttcagttttgctgaaatattctgtccatttctttccttgctccttcctttgtttgattgagaaactcctcccctcccctcccctcccctcccctccctccctccctccctcccctccccctcccctcccctcccctcagacttttagaacatttgctgctcttgcagaggacccaggtttggttcccagtactcaaatggtggcttaagccattgctaactccattttcaagagatccagagctcccttctgggcttggaggacatttattcatttttactgtacctgcatgtacatgtgcgcaccacacgcatgcatggtaccctcagaggccagaggaagatgacattgaattccttggcactggaattaaagatggctgtgagctgccatgtgggttctaagagccaaaccagggtcctctgtaggaacaagtactctgagatggttgagccatctctcccaagacctcatttaaattgtaaaaatgtgtgtgtgtgtgtgtgtgtgtgtgtgtgtgtgtgtgtgtgtagagcatgcacatgtggaggacaaatgacagcttttgtgacttgtttttctctgtccactgtgggttctgggcactggacttaggttgtcaggcttttttacctactgggccatggtgctggtccctcatagctaactaatgtatcaagtttttactgtgcttcatgtatattagtttgtttaatccatgtaacagcccatgattataatagtgaccttataattaattattcacagcattttgcaagttgcagaacctgtttagaagtacactagatagtaagggacagagttagtgtttaaacttttggcaggttgactatagagcctgcacagctgacgctatcttatgctgtcagtgtaaagcaagacttttttcatgaccactgtatataagtcatttgtttaaagaagctcacaggattttgtttgattgtttgaagcctgcctgagttctttgatagctggatgaaactgaaggataataattcgttaaacagatgtgttgcatgtgaaacttactttcttttggattttaatagttgaggtgatagaaatgttgttactaactggtatgatattcttgttcttaggatggtgggtccttggatcaagttctgaagaaagctggaagaattcctgagcaaattttaggaaaagttagcattgctgtgagtatgtagtagagtttttttccagagtaacaaattttagaaaaagttagcattgctctgagtatgtagtagagtttctcttctagagtgacgaattgagagaaaataggtgagagaggaaggtgagtcagtgaaggagttgatttcagaaataagcttgctagagcatttcccataggatgaccttaaacatctgtacttctgtccctgctgcttccctactgctgggatggcagatgtgcaccccacacccagttttattctgtgctggggatccatgtggctcttactcctgcaaggcaagcactttacccattgagctaaatcctcagcctcaactttaggttaaaacctgtgtctgaaaaacagggcaaggtatctttgttagagacaagaaaaggtctttaaagttgggggtttagaaaacaatctttcacagagtgttttgaaaacttacattggccacccttaccttaggctaacagtagtgctttatagaactataaagtgatgttgttgcttaatagacagataagttgttggtggaaatgtttaagaagagccattgtttttctaagccagtcccatttcagtttcctttttttttaattttcctctcctccaggtgataaaaggcctgacctatcttcgggagaagcacaagattatgcacagaggtgagaaggattgccaggtgtttcattctgaattacagttgaaatctggaggtttcacatctttttaaaatgtgtttaggggctggagagatggctcagcggttaagagcactgactgctcttccgaaggtcctgagttcaaatcccagcaaccacatggtggctcacaaccatccgtaatgagatctgacactctcttctggtgtgtctgaagacagccacagtgtacttaattataataataaataaatcttttaaaaaaataataaaatgtgtttagccgggcagtggtggttcacgcctttaatcccagcacttaggaggcagaggcaggagaatttctgagttcaaggtcagcctggtctacagagtgagttccaggacaaccagggctacacagagaaaccctgtctcaaaaaaccaaaaaaaaaaaaaaaaaagtgtttagttttgttttggaatgaaagccctttactaaacagggcatagtggtgggtgccttgggaggcatgggtaggtgtatctctgtgcgtttaaagcagccagagcaatatagagtgatcctgtataaagtgttctattactaacatatcctttattgtgagacaaggatcttattatttagccctggcagacctggaactaactatgtagaccagcttggcctgagaactcagacccgcctgccactgcctcctaaatgctgtgattaaaggcatacacatcatgtacatttgctgatatagtctttgttttattgttttaaaagaattatctattttatgtatgagtataccagagctgtcttcagacacaccagaagagggcgtcagatcccattccagatggttgtgagccaccatgtgggatttgaactcaggacctctgaaagagcagtcagtgctcttaaccactgagccgtcttcccagccttgcttgttttttgagacagggtttctctgtgcagctctggttgccctgaagcacctctttttgtaaggctttcttttcaggcagattctctttagtgagggcagcatagacctcaccagccacttacacagcaggttctgcatgtgctcaatcccaggaaagcttcaccttctctcccctgtccacaccagtgctgggcctctgatgggctttcaattaggcctgttgtgccagggcattaatgtgcttgtggctggtcacatagattgatacccaagcaaaactatttggtgtttcagaagaagattatagtaatgaggaaatttgttaataattgttgaggagaaggaatggatgttgaaagcaagcaaatggaatgtagggtggagcacagtactagagcatgttgtagcatgggtaaggctgggctcaattcccaggattttggacaaaaggaagtaaaagggtttccatggcaaagtgactaagccttgagtcaaaaatacaaacaaacaaacaaacaaatacccagtaattcctaacagatggtcaaaacaggagtgagcagatagcttataggccacattgtgcctgctttctttagatttgtatgttctgcaagctaaggatgattttcaaagcttggtgacatgtgatagttgtgtgcaattcaaattttaacatccctggccaggtatggtggcacatgcctttaatcgtagccctggggaggcaggggcaggtagagctctatgagttcaaggccagcctagtctatatagcaagttcagaacacctagggctattggagagactctgcctcaaacaaacaatgagcttaatgtctataaataaagtcctgttagaacacagccacacttacttgcttaagtgttctctgtgactgctttgtggctgtattggtattttcaaacagtctcttgtgaaagaaatgactcatcctaaaatatttactctccagttctttactacaaaagcttcctgttgaggccctgaagtgtgttgacatccataggaggccttctcttttctgaagagaaaggcagagggggagataggggcagggagggggcagagaagtgggcctggaaggagaggagggaagggaagctgtggtcagtctgaatgtaaaggaaatataataaattaattaatgggggaaaaaggttcctgacccaagttaagagaaggaaggattaattgccttggagaaggtaagcaccaaccgtggctctcagcttgtttctgtgggttcttgaagaatgacagctttacagctcttttttttttttttgcttttttgagacagggtttctctgtatatccctggctgtcctagaactcactctgtagaccaggctggcctctaattcagaaatccacttgcctctgcctcccaagtgctgggattaaaggcacttgccaccactgcctggcggagagcagttctttaggggttgccatagcccagtaacacagaatactagagaagggggggggagagggagggagggagggggagcaccatgaatggcaggaggagacatgagagagaagtaataggttttctgagaagcccctaggagcggagggcaggtactagctggaggggtggtgtcaggaggacttgactttggtccttttggaatcagtgtcacattatagctgtgggttgggggttggggggaggggagctgtgattgaacctgctggtcatggagagcagtgacctactagcaaccctggggccctgattgccagtctgttagcggtaacactcagagaggagtctcatgcccaaagagattggtttgctatggaagtctcattacctggttattactctaaaggtggtcctattaactactaccaaatcaagagggaaggcagctcatgagacctgacaccgtggaggagcaacagtagagtcattctcagcctgaggctaggaaccatgttaattagaggcttctgttgtgggattgtcttctatatgggaacagctggttttcttgctggaagtaaatgctgactggctccatacagcaccgccactcagaggtggctacagcaactctttggagtttttccaaacatgtctttccccagcatcctggttgcaggtaaaacttcatggaaagttccttccaactctacccctttgagtgatcctagcaaaactgtaggtaatttatctgtcttacctcttccatttcttgggacaacccaggatcagatgaaactggccagtaaatctctaatagcaccaaggtgatggtacttaataaaagaacattaaccctagcattgtggagtcagagacaggcagatctctgagtttgaaccagcctgctttacattgcaagttccaggccagtcccagtcagggctaagaacactttgtcatgtgttattgcccccatccccccttaaaaccaaatacaaacgtatggtcctagactgctatgtggttgctgccttcacagaggttctggtccaacttggagaagtgagaccatagtgagtcagattaaagactgatgggtggatgatgcaaagggttgggatttgcattgagacagtgggtttcctttcaccctatcagtaaagggctaggattttaggagcatgattggcagaaagtgagctgcagttgaaggtagtgatgagcacatggttactggttactctctctatggatctagagtaagcgaggactaaaactgtccttaaattgtcagtctctcttaagtgtttctttaagggcctggctctctctaaaccaggaaggattggtaagtggcctcttaacctctggtctggacttttttttgatgcctgactttggagcctgggtccacatagtaacatcactagttatcgttcccacccctacccccatttaaggcaaataaatttccatgggcctatcatcttatggctcttattttccacctcctactgagcaaattaggttgaacatgtcaaatgggtttttagcttattttctttagtgtataattagtgtgcaaggtaataagtccttttcccgtcagcgtcagcagagagctgattggctttgagataagcctgcttttcttctaaagtaacagaaatagcacttaatacaggtgtcctggttggtggggttttggtgtgtctgtgtgtatctctgttgtttgttaacttgacataagctagggtcatctggaaagagggaatattaaatgagaaaacagggtttctcttcctatcctggaattcactctgtggaccaggctgaccttgaactctacctctgtctcctgagtgttgggattaaaggcatgcaacaccatcaccatgctaggtcttattttcttggctaatgattgatgtaggagggcccagtttactgtgggtggagccaccccggctgtgatcctgagtggtataagaaagcagctgagcaaaccacagggagcaagtcagtaagcatttcctccacggctcctgcttcaggagtgtgacctgagagtttcttttggtcatagtgttttatcacagcagtagaaacatatggagggagggtttgtgtgtttgtgtgtgtgcacgagcatgtgcatacgagtgtatgcctgtaggtgtggaggagttgacatgtcttcttcaattggtctctgcttcattttttttcagacaaggtctctttctggaccttggagttctctgatttagctagcatggctggttagtgagcctcagggatcctactgtccctgcctccagagcactgagattacaagtgtgtactcctgtgacccacaggtcctcatgcatggcaggcacttcactgcctaggccatccctctagccccaccacaggtgtctttgatgggaaggctacttttttatttttgtcaaggaacttcattatgaatcctcagtttccatgtcaacagggtgggcctgctctgccagatattgctgtagaatcgtagaaatgagaaaagagggtttgaaggatttcccttgctgacctctttttctactctgctcattgaatgtgacccctgttgtatgctggccctcagcctacatgaaccgggtatttctggaaggcaggctggggctgaaagagacttagacttcgagaaaagataatgaagtcaagacaaatatttctctgatcaaggccggagagtttgctaagagagtgtgcttataagggggaaggcccatcccccgtcagcccattcttggtgcctggagccagcctgtaggcgatctacagggtgtgtcttcggaatgtcactaggacctttcagcaggaagcagagtcttggagaagagcaaatagagccatcaaggtcagaaggctccaccctaggtaatctccttctcagtggcagcaaggtcaaagtctggatcagcctgcttcaaggctgagggaggctacagacccctatatatcttgctttggcttttcttatattctgtctccaaaatctgtacaactgctcagaatgtcatgtaccataagaaaggaaccctggactctgtaatatgtcagtgatatcatttgtgggcccattgctgttgggctaggtgagcggtgagttggtgagagggtacaacctatcatgtcttgactaggagagagaaaatcctttaaatgtgtttgtctgggcttgggtatgagatcttcagggtggagaggatttagagttgctggttaggactgatgggcttcccactgggactctgctgcttgaatttagctacaaccaggtggaagacaccttgaaggcctcttgcagttagcgagtctggaggaggtgaatgggctggagctgaggaagcagcgcgtggtaactagaggaggtagatttctctcacacctggatctccaggatttctgcctgtcccaaggcagattggttcccagaaaggctcattgccacagccaactacagcttgctaatggctttaccaagcctcaaggcatgaccggtggtgtgtgagctgtagtcagggccttgactctctagtttggcaggagccctctgttaggagtctggaattcaaatcccaaactactcttaggttgccctgctgttatgacagtgacaatgctgtggtcttctgctccctgttcccagtaccctcccactgctactgggaggagcaaagggagagtgttcaaaagatctgggccttcagctttggcttgcccaaactcctagcctgccccagctgtcctcagctgtcttcagctgtcctcgttacatccattctttctcaggaagtggaacctggtgggaaactagaacctttcatcagcagtctagggaaagtttaggtgggaaaaaattacatttacaagtaatggctagttgaaggctttggagttcttggagttttgttttgtttttgttttgtttttttcttttaaatctctgctgctcagttctctgaggtcctgggtagccagaggtagctccatgaaggctaggagtagactcatttcatttctccatcttaaggagggttcttaatgctctcctaagcatgctgggaagggggtcaggccatttgaaacgtaaagttgctattttaaaaaatctccttagggattggaaatgtagctcagttggtaatgtttgcctagcaggcatgaagtcctagatttattaccagcactgctggcccgcatccttaatcctggtcccaggtgtttggaggcaggaggatcagaaggtcaaggtcgtcctcagctacataggacgcttgaaaccagcctgggttcatgagaccatgtcttcacaatacgtaaacaatagcaaatacaatagctcatttgccttcaaaacaaacatttcatttctcactatctaagatcctgtcgatttcggatccagccttcatcacaaatgagcctgtctggcatccgtctgtgtgtccctctgcttgctcttctccagggctcttccttcttccttccattctctcctcacactctcttgggtgtcccacccacacctgtctcctgcccttctcttcctccatgccttgctcataaagttacatcttagggagtgcagctaaatgtgcccccccccccccagcccaagaaaaaaaataaaggagacatagaacaaaggaatcccctggaaggcggagggcttcactgcctctttcaagcacctgccagccttgccagctaagcagctgccatcaggtgggtgatagcagctctgtctgctgtcgtggtcatccctgtgtacactgtccctctggcgatcacagcctgctggacagcgactgcccttctgatcattgcatagtgcaaggattctatgtagcataaccaagtggctcccgaggcattcgtagacccttgttttagcaggtaggaaatgtttagaagttaaacttgccattatgtgctttgaaccgtggttaatttggtgtcaagaaagaatattttatccagttagttttacatataacttttttttgttgttgttgttttgttttcctttttggtgctagataagcactctttctctgaactgatgaaccctgaaccctctgcccttattctttgatctgctttttttttttttttttttttaagaagatattccccagccgggcatggtggcgcacgcctttaattccagcacttgggaggcagaggcaggcagatttctgagttcgaggccagcctggtctacaaagtgagttccaggacagccaggactatacagagaaaccctgtctcgaaaaaccaaaaaaaaaaaaaaaagaagaagaagatattccccattgctaaagtgaattggcccgatggggcaggaaagggagtaccattcagtatgttatgggcttcctagcagcttgggagcccagtggttacttcacactgcttggcttaccaacacctggccctgaaaggttgggggagaactggaggcttagataagctgttgagaagtgctgggcctctcctgtgccctttgaggcttctgctgggacagtgggaagaagctcaggtaaatctcccaagtcgggaaggggactcaggctctagacaccagaagtggacacgggagggcaggtagacaggaagacatttcggatgcagggaacagcaaaagagaagaaggcaggacttaacacactgggcaattagagtcaggccaacctggattagctcagggagagagggagataagaaacattgggaagttttcagagccagccaaaggggctttgtttggactgtgtttcaaggcaaacgggagccatagcagtctgtataggggctattctggaggagttctagctgtcatgtgtagaagatagagggggaaaatatggggagaggaagagtggggggcagcaggcagctttgggaagctattccacagtgccctttgagattaggaaatgaattcattctagccttgttggacacctcacactttctactgccagaaagagttatctgggctaactaggtgggggtagggtgaggcgcattttctgcctgacactctggcagcattctctactgcgctaggtctcctgatcacgaggaggggcttcatgcagtatatctggctctcaaggcctgaagggtaaagcctctcattttctccagccccagtaatccctgcagatgggtgggtctaggaggctgaagctggagttcagaaccacataagggagagcagggttatgtaagctcaagtgcagatgcctgcttgccatgtgaatagaaatcagatgcaaaacccagctagaggcagctcagcctcggagagcagcagctgcagcctggagggagagaaagcagcagtgccaaagaatgcggccaccatggaggggatgctctgggctgagagggtcagggcagcttcctctgggatggtgtgtgtgtagtatatatgtagacaagggctcactctgtgatgtgagccaccctgctcagaggaaccaggactttccaaaaagtacctgtagcataggtggaagggctcccgccagtgctcctctcttgcttcaggttatacctgaaatgccatgggaaacatttgcggtgggggagtgaggggccttgaggagaaggcttatgttagaaggccttccatgtgctgcctctaccagccctacaggcacatcactcccttggctcttcctaagttgctcccatatcccgaacatgtgacctgaggtctgttctgcactctgtaagctggttagagaaagaacagctggcccctgccacctacctagtgttaaagtagtgctccaatagaagaccgtgcaggtgtgccctcacaccttgcagagtaatggctgtgagtgttacacagtctctcattggttgaattatctcctaagaccagtagtatatacgctggatgctactgggaatttggcagcatgcccctgccctttctgtggtattgcaggggacctatttgaggcaggtgctcagtaaccagtaggcgaaagactggtgaggatgttagacagagggccgtttttgccctgtggccgtgaataaacccttgacccatacatagctctgtattggaagtgggggaggaacctgatacatttaagatttctccctgtgcctgaatgatcactgagagtctctgtgggaggtagagttgtagagaggtttctggctccatagagatgctagaccgatagtgagggctgggtcttcgaaagatcacaccgtggtgctgagtgtagatatgctcattccatggtttgtgttggctcagcgtttaccaaggtaagacagactctgagagctcttcttgccttgctagagctggtgtgaactgacgctgaggatgatacgggctagcccgctcaggggaagggctacctggaatattataagactgtctcccctctgcccccagtttactcttgggaagatttttagaatctattgaagaagaaacaagtaagccaggcagtgctagtgcaggcctttaaccctagcactcaggaagtagaagcaggtgaatctctgagtctgcgccagcctggtctgcacatgagttccaggacagctaggactataaagtcgttttgaaactgtctcaaaaaacttttataaagagtaaataacttagctgggtttggtggcatgaacctgtgatcccagtactggaagctgagcaagcaggaccatgcagccttacattcctttttaatcttagtagtagacacaccgtgtcttgctagtacaggtacctgaagtaatagcctttgagctctcctcctcctgtttgttttggtctgttgagacagggtttctctgtgtaaccctgggaactagctctgtggaccaggctaaccttgaattcaaaggtctgtctgcttttgcctcccaagagccaatgtgccctgctccagactttgacattttgactggtgatgatagctgactccttctgatgagtcatatggccaggtctgagtcctcagagaatagacatctactatctactgtctttggagtttgcaagtcaaggattgcctggattggggcatatggtgtggtctagagagcactgatccttcccctccccagccaccctgccttaagtctctcatttcttgttttctcttcacagatgtcaagccatccaacattctagtgaactcacgtggggagatcaaactctgtgattttggggtcagcgggcagctaattgactctatggccaactccttcgtgggcacgagatcctacatgtcggtatgaactaaagttccctttttccagtgtttctgcaggcttcattcttagcatcagcagccacatattataaccatggagccataagtttgcactgtatggtgatagatagggattgagaaatgagaggtgaattacagtgggcctctgggggagagtaagaatcttccttttacaaatgttcacatataattggggtctcaggcattgagacaacctcaagagattgtgctgtccaagctccagagtctgacttccttttctgaagagacttgagaatatatctgacatcttacgtgattgtcagaccctcaaacccaagacacttggacatgaccacaccccacctggcttactgctggtcctgttatcctctagtggccttgcgtagaggatatgtttgaaaccctttcctccactctgcttctgtcctccctatttactgaatgtctctgggtcatttcccggcctggcgtccagctcctgcttagagtccactctagctcagctacatcctatcttatccttctccccagagcccgactctcctggctcccagtgtcacctgattactgcatgcagctgtcccattgcccatggtcatattatcatggagtttttcccctccttgtaccacaagcttcagcccaggtgtctttcgtaggacctggcagggtctggcacattaagggttaggaatgctggtgagtggctgatgtggggttgactgaatgagagggtctttggatagtccatttctaagtgtagcagggaaagatggaaatctgtgggaagtgcttcagaggcagtgcacaggaggatgagagtaagggtagtttttatacaaccaagggaaaagtgcagaaaaaaggtgcagatggtaaggataggcctaaggcccagagtgtttcatgcacagtcaaagagttgtcatagccttagggggtctcagtccatccctgcagctatatcatcagtagagataaaggttcctatgtaagagatgagaacagctagagctaggaagccagcagcccctactgcttatgtaggggttatgaccaactccccattgctccttactgctctcctcctcccctgtgactcaagctactgtcagtatcacaataaccttaccccacaccccctctttagtatctatagggaagttctaatgcacacatattccccctccccccaactccactggctacagcggagttctgctctttgctgatctcttcttctgtagatggggaggctgaacagtttgcacctggggccgcacagttgccaattctcaagttcattaggccttggaacttactgatccatgatttagtggctgggtttttgttggttatatatggtcagttttaaagtaatccatagtagagttggtggaaatttttcatgggagaagctagttatgtgtctaaataaatgcactatgatcactgaaggtttttgtagggtctgtgacaaactaatgctcagtgtgcagacactgtgctgtttcctctctgctgcttgtcacctttgtcagcgaatgattgtgtagagttctgccttgtctgaatgttttcatttcacttggttcctgctgtgacactagaaagtagagtggaaattttgttgtcatcactgttacgagttagcagtggtgatttctgtatataaaaatccccattttatatacagggaacctgagattcaggatccccacagtgcttaagtctcagagtggggaactcatgataagcctctcgtgtgtctgagacatgctacttatatgtgaaggtcaggggccagactgggcagagcaggaaccacaagcggccaggacctgactctgcggatgctgccggctgagacagggtccagggaaaatggagcagtgaggagaggtcagagctgtaatgcatggaggccagaggaactcttttaactttgaggtgtcagagtaggggacaccagaaggtaaaagcaccgaagccgccctgggggcctgtctagagcaagaactaaccatccatctcccccgtagcctgagagactccaggggactcactactctgtgcagtcggacatctggagcatggggctctctctggtggagatggcagttgggagataccccattcctcctcctgatgccaaggagctggagctactgtttggatgccatgtggaaggagacgcagccgaaacaccacccaggccaaggacccctgggaggcctctcagctgtgagtgaggactgggaggcaggggtggtggtgggtgagtctaccctttgactcatagtgacaagtagcctcttatctgtatctataaagtattttctttttcttctttataaatctgcagcatatggaatggacagccgacctcccatggcaatttttgagttgttggattacattgtcaatgaggtaagtgctgccaggtttccttgaccttctgcataagacagtaagtagagggctggagagtttactgctgctagattgctcagcagttaagagcactgactgccctaccagaggtcttgtgttcaattcccagcaaccacatggtggctcataaccatatatgctgagatctgatacccttttctggtgtgtctaaagaaagctacagtgggctggtgagatggctcagcggttaagagcactgactgctcttccaaaggtcttgagttcaaatcccagcaaccacatggtggctcacaaccatccgtaatgagatctgactccctcttctggagtgtctgaagacagctacagtgtacttacatatgataaataaataaatcttttaaaaaaatttaaaaacagaaagctacagtattcatataaataatttttaaaacaagtaaaagaaagcaagaagaaggtggtggtggcatgcacttttaatcccagcacttgggaggcagaggcagatggatctctgagttcaaggccagcttgatctacagagtgagttccaggacagacatgctacactgaagacaccctgtcttgaaaaaaaaaaaaaaaaaaaacaaaacaaaacaaaaaagtaagtagttatgggctgtggggatagattagtggttcagcatagtggctactcttgcagagaacctgggttccattcccagcactcatacgacagttcacaatcatctgtaactccaggtcctaggaatctgacaccctcctctgtgggcacggcatgaatgtgatgcatagaccaacatttgggcagaaaacctatacacaaaataaaatggggggaaaaaacaagaaaaaggaaaaacggcttgggggaaaaacaacccactagttattgtgtgtggtgtgcacctgtaatcccaatacttagagtgagactggagagttccaagcctgaggtaggcctgtactacatagtaagatccctgtctcagaaagggaggtgggaggggaaactgtggttgagttgttcatatggtgtggtcctcagggtgcctgagctttgctcttggaattgtcagctcagagtcccttcttcttttcccaagatgaggagcctcccgttcactactgatgtctgcctgtctccatttactaggctgtctaatgcatgtgcagacatctgagcacaggaggtgcgaggcagagtaagtgggatggatcggagatggaagagcaggagcccctagtccccatgatagctaggagtggtgggtggagaactgcaacatacagacttggattattattttatgtgctgttaaacagttgtaagtgactatagaaagagatgaggaagccaggcgtggtggcgcatgcctttaatcccagcacttgggaggcagaggcagacgaatttctgagttcgaggccagcctgatctacagagtgagttccaggatagccaggactatacagagaaatcctgtctcgggggaaaaaaaaaaagaaagaaagagatgaggaatatccatgatcaatttctgtgaaaaacagcaaattacttttggattacttcctgcaatcccaacacctggcaggccaagggggaattccatgatttctaggctggcctgcactgtagaatgagactgtttcagagtaagtgggggagggggatcttttttaatgtatatgcctattgtaggtgattaaaaatttcaaactcttggatgattttactatgaagaaccagaccacttgtgaaattatgtataagtaagtttacattaaggaagggtaagactcactgaagtgtaggttgggcagtacagggacgtgagaaggagcccactgggccagcatgctgccctgcagcaggagcagccttggcagttgagaaggggtgagtgctgacatgtttcagaggcagcactgtgctgtggactgggctcagatcaggccatcacccatccttgattcaaaacatttaaacatccttgtatactcctctgaaaacagacccttaaaagcacaagtgggtctattgcttgtcacgaacctaacagggaatatcctggtcaccacagaggttataaatcagtgagtgcttttctgcccatcacggagctgtttccttctctactgtgtgcagagcactgtgcgaagcagcagagagggacaaggcagagcagtgcaggcttgggttcatcagtgcagggtgggccatctgtcctctgcctgctgaaacctatatggctctgggagggaggtccgtgagaggctgcctggaccacctcctgtacagctctgcacactgctttgcccacagtgctcacagtctgttctcactctgttcttaaagccagctgaggtggggaaactgtctctgtcctctttacataggtaaggaaactgaagctccaggatgggcagtagccggcatcttttccccagtgctttcacctgcctctttccgttccctgatgccaagagcctttgctagcacccagtcctttcttgcctgtcccctcctgctcaggaggaacagacactgtccttctggaagccagctgtttcctcttgaatattccacacaacctcagcagttctctgggtggggcttgtcctacaggattgggccactgttctacaatctggttcgcagctgacctcaaactgactaagacgtcagggtgagagggagggcttgctgggctttttagtaaggggcttgtgttttgttttttctgcagttttgggaatcagacctatgcctcctgcatgctatggaagctctgccactgaactgagcattcctgcagtaccactgcttgttccatttgttttagatcgggtctcattttgtagcctagagtagtctcaaatgcctcagcctccccaagtgctgggacgagaagcaggcaccacccaattcagagatctatctacctctgcctctggaatgcttgggctggtatttcattagagcagcgacatcttaggtactggcacaggtcatgtaaactaacaggtttcctggaggtactctcaggatcctcgtgctgcatcatccacactcagcctctgtagttaatgttttattaacctctgactctccagggttcagcaaggggggttgtggctgggagtaccatgaggagtatctcctggtttgggcatccctgtagcttctgttgttggtaactgctagtggcatttccaggtcagccagcactcttacactacacttcctgtacacctgagtacctacactcagagggtccagagctaaaacacagccttctataggagagtgaacaggctgaggggaataggtttgttctgtcagagtggtagaatacttgaagtactcccaataaggtgagccaggaggagttagaggtcccaagccactttcctggaactgatgagggcagcagaggccagaggcaaggtgggtgtgatggagaggtgatggagcaggaatcaagagtttctcacatgttgacatgtttgcagcctcctccaaaactgcccagtggagtattcagtctggagtttcaggattttgtgaataaatggtaagtttgtaccatgttctaagactccacccccctccccctgcccttaccctatcccctattaaccttggctgctgccatacctcatatcccttgtgatgctgggactcgtgactatctgattctgggtgccactctcccctgaatttcagggaccatcctgttgctttctgaccttgatttagctcagcaagacttttgtgtgtttggcgtaatgatggtgtgcctataatggggggtgattgcaggcactggccctcagccttcataagaggcaggcagacaaacataagcagggactgggaagtagcactcctaacattatttatcttcttttcagcttaataaagaaccctgcagagagagcagatctgaagcagctcatggtgagtcttacagagcctgtttgttcatctgagccatttttctgctcattcccactccttatacttcagtcaggtttagggtttcacagtgccagggatcaaactcctctgtcctgtgggtttcaggggcacctgcgatgcagtcagggagggacttccccgcagccttagttctgactagttcacctcacatatccagtatcctgagttactctccaactggttctagtttgatggcagtgacacacacgtggtactgtaatgtccagacaaggccatgccctgtgtagccttgagtgtagtgtactttctaacaagttgcccagggcctcacagcttctctgtttggcagagggggtctctgggctgcagctggcctacttgctgctcaagagtgagcactagaggcatcttctgcgcggtccccaggccacctcgcttttccttcttggccatttttaacagaatcccctttccttgtttcctgcacaggtacatgctttcatcaaaagatctgacgccgaggaggtagacttcgcaggctggctctgctccaccattgggcttaaccagcccagcacaccaacccacgctgccagcatctgagcctttaggaagcagcaaagaggaattctctgcccagtggcatgccatgttgctttcaggcctctcccatgcttgtctatgttcagacgtgcatctcatctgtgacaaaggatgaagaacacagcatgtgccaaattgtacttgtgtcatttttaatatcattgtctttatcactatggttactcccctaagtggattggctttgtgcttggggctatttgtctgttcatcaaacacatgccaggctgaactacagtgaaaccctagtgacctgggtggtcgttcttactgatgtttgcactgctgttcatcgtgactcactagctggctgcctgtattgtcaggattctcggaccttggtacttcactcttgctggtgacctctcagtctgagagggagccttgtgagacccttcacaggcagtgcatgcatggaaagcatgctttgctgctactgaaatgagcatcagaacgtgtacgtcatggtatttttattttttgcttttggtatagaactcagcaattcccatcaaaaaaacctaagcagagcccatcactgccatgatagctgggcttcagtctgtctactgtggtgatttttagacttctggttgtatttctatatttatttttaaatatacagtgtgggatacttagtggtgtgtgtctctaagtttggattagtgtttctaaattggtggttattttgaatgtcacaaatggattaaagcatcaatgtatcaagagttctatctttcttccagtctaagtaccaatgctattgtaaacaacgtgtatagtgcctacaaattgtatgaaaccccttttaaccactttaatcaagatgtttatcaaatctaatctcttattctaataaaaatactatcaagttaaaataaaagggacaagagattt

SEQ ID NO: 56 - DNA, 33864 bp, Homo sapiens
ccgatcccgttatcgcgagaagccggtccgcgatcttgtggccgcccctcccctccccctgcctctcggactcgggctgcggcgtcagccttcttcgggcctcggcagcggtagcggctcgctcgcctcagccccagcgcccctcggctaccctcggcccaggcccgcagcgccgcccgccctcggccgccccgacgccggcctgggccgcggccgcagccccgggctcgcgtaggcgccgaccgctcccggcccgccccctatgggccccggctagaggcgccgccgccgccggcccgcggagccccgatgctggcccggaggaagccggtgctgccggcgctcaccatcaaccctaccatcgccgagggcccatcccctaccagcgagggcgcctccgagtgagtgggcaggggtcagccggaggcttggggtgcacggggcagggagccctcggggaaggacggggcgaggggacgggggttcgcgaggagtgcacgaggcaggggggtcacgggggaggacggggtgagtggtgcacggggcagggggttctcgaggggaggacagggcaggggaccctcgggggaggacggggcagggggccctcgggggaggacggggcagggggccctcggaggacggggcgaagggtgcacggggcaggggggtctttgagcagtgagattgggcgaggggaggtccttgtggtggaaaagatggggtgtggggttcctgaagagtggaattgggataacgggagtctctgagtagtgaagttggggtgaaggatgtctctaagaggagaggatggggacaggggtccctgagcagcgaggttgagtgaggggaggtccctgcagtgcagaagatggggtgtggggcttctgaaaagtgaagctggggtgaggggagtccctcagtaggaaaatcggaatgaggggtgtccccaaggagagaacaggatgaggctccccaagcagtgagatcggggtgaggggtatctctaagaggagagaacacagtgtggggtccttgagtagtgaaatgagggtgaagagttcctaagaggaaaggacggagtaaaggttgccgtagtcatgagatgagggtgaggggagaccctgagtagggaaatcggggtgcagggcattcctgagaggagaggatggggtgtggggaggtcaggcagcccctgaggaggaaatctgggcaagggggctccagaggggagaggatggggtgaggggtccctgagtaatgagactgagatggggtagggtccctggtaggaaaagacggggtaagggtccctcaataatgagatagggccaagggaggtccctgtgggaaaagacagggcatggagtcactgagtagcagaatggtggtaggtctctgagtagtgaaatggggtgaacggtccctgaatagtgaaatcggggagatggtggggtccctgagtaatgagattggagtgaggggagatccctttggggaaaagatggggtttggaatccctaagtcgtgagatcaggccaaggagatgtccttgcagagagaagatggggtgcagggcccctgaattgtgagatggggttgagggggtccctgggaggagaggatgtgtcggtgggggcctgtgggggaaggataggcaaggggtgttctgcatattgaaatgatagtgaagcgagtcccttgggggagagatggggtgagggggtccctatgggggaaagatggggtgggagggttcctatgggggagagatggggtgagggggtccctatgggggagagatggggtgggagggtccctatgggggagagatggggtgagggggtccctatgggggagagatggggtgagggggtccctgtgggggagagatggggtgggagggtccctatgggggagagatggggtgggagggtccctatgggggagagatggggtgggagggtccctatgggggagagatggggtgggagggttcctatgggggagagatggggtgggagggtgcctgagccacaggttgagagtgcagcacctgggtggggaggacaggctgagaggtcttgggggggcggggagcggtccttttggggaatgagtccctgagtaatgaggttggcatgggatgaagagggcacctagggtgccaaggtggggcaggggggtcccttaggggagaggatggggtgaggaggtccatagacaaccagggaaaagggaagagaggggaggacagggggctcccagaagggtcaggatgtgggagaggggtgtcctagggggtcacgatggggtgggagaccctagaaaggtcaggatcgggggactttgggggggtcagggtgggagttctggggtatctgaggacaagggggtgtcttaggggtgtcaggacatgggggggctttagcggggtcaggatgggagttctagcgggttccagatggaggggtttctgctgggggaggtctagtgggatcaggacaggggttccagggggttcatgttgtggggggggtcaggttgggtcctcgggggtcatgttgggggattctgggggggtcaggttagggggtcctcggggggtcatgttgtgggggttctgggagggcagagcagggggtcctaggggtctcatgttggggttctgagggggtcaggatggggtcccagggaggtcaagatgtcaagatgggcatctctgagagggcatctcctgcttgtggcggtgcccagtgtgtggagtccctgaagctggaagtgtgaggagacagggaagccagagtgtgaggaacgaggaggcgtggggatcaggggaccctgctggcccctgaaagcagaggtgcagattctgaagtgagtggaccggaaaacccttgtgaggggctgacccagtgcagaagctttgaggaggtggagggcgaccagaggcctgggtgaagggatctgagaaaggggtatgctggggtccgggtggcgtgctggcagaatcgcactgctccaggacgagggaggggactgggtgttgggggcacacactggtggggtcatgccagggtgatctctgcactcccgttctgcaggccgaggcagggcagggcgatccccggggcccttggctggggtccgggtgccgtgcctgcggtgtgacccctcaagaaccaggtgtcagggactgtggcatgtctggtggcctctcccgcttgggggtcggccttctgtgacccagatgaagactcttgatgccaatgtgtgcaagtcaacacgggcacagccagacacggggacccgttcctcattctctgcacagaactcgcccttcacatttctcttccgtgtggggtttgattcccatctcttgaaggattcccccaggagaggaagctggctgtagggacgccaaggttttgttttgttttgtttaataaccacagttgggttgccagtaaatttaagatggattagtcagctgactccagaatgcattttcaatgttttgagcagtacttgagaccttccaagtctgccatcagaagtgttcattcatggctgggtgtggtggctcacgcctgtaatcccagccctttgggaggccaaggtgggtggattacttgaggcccagagttcaagaccaacctggccaacatggcaaaaccccgtctctattaaaaatgccaaaaaaattagctgagcgcggtgatgcacacctgtaatcccagctactcaggaggctgaggcaggagaatcgcttggacccaggaggcagaggttgcagtgagctgagatcgtgccagtgcactccagcctgggcgacagagcaagactgtctcaaaaaaaataaatattcatttattcattgatgttattcattcattcattcatgttcccctccttaccttctgtcccactcccagggtctcgccatttctgcttcttctgggtccttgttcagcagctcctcagtgagcacctactagggccctgtttcccctcatgggggacactaagatgagcaggggttgtcctgacctcaggcaggtgttgttacctcgggcaggttcccccacccctgtgagtctgttccctcctgcctgggcctccggggacgatggtgagaatggaatgagatggtgtttgtccagcccaggaagcggtgcccaggcccctgccttccagcgagctctttgcagcaccagctccagcgccatcgcctcggttctggcctgtgtgccccgtggcttacgccacttccagctgtaggcgaacagtggtcgaactttgggattggaaatttccagatggaaggagcagtccacgccttcattccctgcttcagtcccctctctggctgtccaccttggctttagctccttcctgaattgggacctctggaggtggcctgttcttccagagagccatttaaagctgcactgcctggttgagtagcccctggctacaggcaacacataaaacaagaattgcccaaacccacgagagcataggcgcaataatgccattgtagatttcaaaggcttaagacggaaacagtgtgaaacattcattcatttttcatactggttgtacgttgaaaatgataacatttttgatgggttaaatcaaatgtgttattaaaattaatttcagccaggtgcagtggcttatgtctgtaatcccagcactttgggaggccaaggtgggcaggtggcttgaacccaggaattcaagagcagcctgaccaacatggcgaaaccttgtctctactaaaaatacaaaaattagctgggcgtggtggcgggtgcttgtaattccagctacttcggaggctgaggcaggagaattgcttgaacccgtgaggtggaggttgcagtgagccaagatcacaccactgtactccagcctgggcgacagaatgagactttgtctcagaaaataataataataataaaaattaattaattaaaaagagccagacatgatggctcacacctgtgatcctagctactaggaaggctgaggtgggaggatcacttgaggacaggagttggaggctgcagtgagctgtaatcgtgccgctgcaccccagcttgggaggtagagcaggaccctgtctctaaataaatgaagtgagttcacctgttctttttaaacatgggtactagaagattttaatttgtgcgcatggtttacattccattgcttgtgcacagcaatgggttcctgtgtgcattgcgcttagttgtctgttactccaggatctggttctgagtcaaggcatttgtgaaaatagcttactgtcgaaatttcctctgaagattccttgaatcacccaataaagtgcaatgtacttgcttgtttaaattgttagaaattttttattgtgtagaaacaaggtcttgctctgtcacccaggctggagtacattgtcacgatcatggctcactgcagtctcgacctcctgggctcagcctcctgagtaactagaactacaggcatgagccactgtgctcggctataggtctcactttgttgcccaggctggtcatgcttattttttgttttttttgttttttggtttgttttgttttgagacagagcctccctctgctgcccaggctggagtgcagtggcaagatctcagttcactgcaatctccccctcccgggttcaagcagttctcgtgtctcagcctcccaagtagctgggactgcaaacgtgcaccaccgtgcctacctgatgcagcttttgtgctgagccttctgccctctactcttggttctcattctgtgctctgaggctgctcagaacgcttgttcctctatctcctgcaaagacagacatcttggcccgggctccgttcacccgatcccagcttcctcgtctcctcccgacatggtccggagctcgtgcgttaggaaggaggtctcccggccgcgtgcaatggctcacgcctataatcccagcactttgagaggctgaggcaggcggatcactcaatgtcaggagttggagaccagcctgaccaacatggcgaaaccctgtctctactgaaaatacaaaaattagccgggcatggtggcgggagcctgtaatctcagctacttgggaggctgaggcaggagaatctcttgaacccgggaggccaaggttgcagggagccgagatcgcgccactgcattccagcctgagcaacagagggagactccgtctcaaaaaaaaaagaaaaagaaaagaaaaagacggaggcttcctgggtcctttgagctgcagcttatccttgaggtcctgaggtctgctagacttgttgagacaggatcaaggcagcgtcctcagttcccggggagccgccctggattctggtcattggtgtgtctatgggggtacacagcatggatcctttccttctacaccatgaacccctcaagtgcaggaatccagtctgtgtcctcctgggggccgatgcaccacggccacatagcaaacggccagatggagtctccctaggtagctaacccctaccctggggggtctctgcagggcaaacctggtggacctgcagaagaagctggaggagctggaacttgacgagcagcagaagaagcggctggaagcctttctcacccagaaagccaaggtcggcgaactcaaagacgatgacttcgaaaggatctcagagctgggcgcgggcaacggcggggtggtcaccaaagtccagcacagaccctcgggcctcatcatggccaggaaggtgagcactgcggggtcggggaggtcggggagtggtggggaaggtccccctggaaacaggaggcaggttgggaaggcagccgggtctctgcattctgattagctccaggctctgtccctcatccccaccagggactctaggtcctgagaaagggcccagcttctgggcagatgggagccgtgccagccacaccagccacacacagctgtgccctccagtgactactttctgccctggagggcacttgaaatccatattcccagaaagctagcacgtgggggtttcagaaatgcgagtgtgttatggttctccagagaaacaagcgatgaagacgaagcgtgtgtgtgtttgcgcctatgtgtacagccacctcagggcgatggctcagccagtgacagaccgcctacgcagcggtggcgacgtaagatgatcaggccatgtttttgctgtgccttctgtatgtttatttttatttttatttttactttttgagacggggtcttgctctgttgcccaggctggagtgcagtggcatgatcttggctcacttcaacctccgcctcctgggttcaaggattctcttgcctcagcctcccgagtagctgggattacaggcacacaccaccaggcccagctcatttttttgtgtttttagtagaggcagggtttcgccatgttggccaggctggtctggaactcttgaccccaggtgatccgcctgcctcggttctctatatttaaataaacagacagcagctcagcactgcgctgtacagagcatgggagcctgggtgtggaatgggctttccagtgtttgcacagtgacgacatcgcccagagagggatttctcagtgtatccctgtccttaatgatacttgagtgtatgtgtagagagagatttattctaaggaattggctggagtgcagtggtgcgatcttggctcactgcaacctctacctcctgggttcaagggattctcctgcctcagcctcccgagtagctgggattacaggtgcatgccaccacacccagttaatttttgtttttttagtagagatggggttcaccgtgttggccaggctggtctcgaactcctgacctcaagtgatcctcttgcctcggcctcccaaagtgctaggattacaggcatgagccaccgcgcctgggcaggcttttccctgaaggccttcagctgattggctgagactcacccaccctggggtggagtaatctgctttgctcagagtctgccaatttaaaggttaatcacatcttaaaaacataccttcccagcaacctctagactggcgtttgacaactgggcaccgtggtctcaccgaggagacacacaaagctgactgtcacccaccctttgaaagtctgcaagccctggtgctgacggcccccgtgcttagtcatcccgggctcctgggccatgatgcagcctctgtgctctgtgtttgagaatagtgcccaggggatacagggaggatgtgaccacttggggacagtggctcttaaacacagaagtaggggacttagtgttgacagggtgttcagctcctcaccggtgttctttcagacctagaacgctgcctcttcctggaagcccaccatcctgtagttccccaaactgggggaacgtgactgcacctagtcccgtgggtctgcgcaggtggcagcagtgcttgagggccctgccttcctcgggagcagcggctcaactcctgcggggatttagctctgcagctctgtcttctggcctctagagtgctgccctccctccctcctgaagtgtgcagccgcggacttgctatttctgtccccgtactgcaggcagcctcttccaaaccggagcagccttggaaagctcaggtccgcctccgcccgaagcactgggtggaaaaaggcaagcgtgtggttcacacagccacagcagggccttgagacagtgccagtcctcgtgtgtgccagggaccctcaggcttctgggggagcctccagtggtccctgatgggctgggcagtggacatgaacccaatgcttgctgtatcagcagctcctgctcctgctgacaggcgcaggtgaagccgggcccacctgcagctttactgtagcggggaaagggagatcggggcctttgaacctgagggcaggcgtggctgggcaggttctgtggtctggtgggtggagatgtcccagcatcagctctgggtgtcagtactgtccttccgtcatgtaagatgtcagtcatcttgggggaggcggggaaagggcgcacgggactctcgttactatttttgcaacttcctgtgcttctataattctttcaaaattaggttttctttaaagtgcccgaaaactcgggtgggagaggatgcattgagctcgtgggctcagcggctctggctgctatgcaggtagggctgcaagggctcctttcatttcatcttatttatttacttatttttatttatttatttttttgagacagagtctcgctctgtcacccagactggagtgcagtggcacaatctcggctcactgcaacctccacctcacaggttcaagcgattctcctcccttagcctcctgagtggctggcatgcctggctaatgtttgtatttttagtagagacggggtttcaccatgttggccaggctggtctcaaacatctgacctcaaggaatccatgcatcttggcctcccagattgctgggattacaggcgtgagccaccgcgcctggcccagtctcggtatttgaggtcatgctggtttgtaaatgtctttttggcttgaccgtggcctctgacccctctcccattggagcagcgtccccgcgttacctgggccagggagataggtgaagaacttgctgcttgttacgcgtgtggggcttctttgaattgtccatgctcatagcagagatgagagtgtttgttctcgcctctgagttcctccactccgctgtagcttacttccagggtggcggtcacacggcctgcccaaggccacctcacagtaccagctgctgtctcacaagtgacgacctgagtcgaagccgctgccaacacctttgacgcgtgttctcattaaaattgaacagcagcctcgttttacagttgaagaaaccgaggctgtgtggggtcagtgcctgaatcggattcgaaccctcttggatctgctcggacttgggagcagctgccggggctgagcctccagatccactgcactgcggtcccctagctggccaccgctcccagcctgtgtgttaatttttaaaatctcttgtagagatgaaggcttgctacgctgcccagtgttgaactcctggcctgaagcgatcctcccgcctcagcctcccaaagcactggaattacagatgtgagccactgccccggctctcttccaatttttgacaacacctaattcaggatgtttggaagcgcagtgtgggctgcacgtgactcttggctacatccagcttgggagctgtcagtttctgatccatgatttacgaggttgctgagatcattccaggcctgcggggtggcggccggggggcggctcggtcctcctcttcccctcctgctctcgctgacactcagtgaagctctttcctctcttttcctactccgaatcccccaaccccacccctggctcaaattcctcattcttctgtagcaaccgtctccacctccgagccaggtctggcatttagttttaacaccctgacaccatccacatttaatcagctattagagctggcacggcctgggctgtggtgtcctggaaagaatacgggctccagtgttccccgaggcagccccagtcctgacttagcagctaatgccactgggaacatggctccgaggctccgaacctgagcttgctcagtcagcaccagtggggcagtacacccatcccccgggcttgtcagggtgaactttagagggtgcaggtgctcaggaacgccccctcccctcctgtccatctgtctgtctgtctgcctttccccttgcacaccctcagtggtggctgcccgtttatctggaatgctcgctcgacaggccccaggtattacagaaccattaaaactgagatcacgccgcagccgccctgtgcagactggcctccctcgcctctgctatttactacagccttccagaaggcctctcgcttccgacggcctcatttcacgttcggagctcctgggttccaaggcctctgggattcctcccagtagcccatccgccacttcctctcctaaattacgacttgcgacggccagccgaacgcgcgctctttcctgcttcttgtcacccatctgtggctcctttgaagtttttggtcaggaactgagccgtccaagacagcagcccccgttcagatgtggctaccgggctcttaaaatgcggtcagtccggacgtgctgaacatggaaaacacgcaccaagcttcaagggctcggtgtgaaaacaaatgtggccttttccagtaaatctcccaacctccacgtgaacatccaagcttcagtaccaggcccttgtgcaacgggagtgagcaccagcacctctcagttacagcctggctggaggggagagcatcctggggtgctggggtggccctggggcctgtggggtcaccatgagggagtggagtagcccaggggccaccgtctggagctggattctgcaggctggcctgaggggagaagccagcgctacaggggcaggcaggggcgggcaggcaggggcaggcagcgccagggctgcggtcaaggtgggagacgcttagcctgaggagcggccgggcggggggaggtgggcaccgtgccccgggccctgccatgcttctcaaggtcacaggcctagagcaggggccactccccacacacgccctgtgctgtggccacggtcagcctcctgctgccctgaacacagcgagggctccttcatgcctccgtgcccgctgacaggcggctctttgtccctctgcctggaacaccctcccccatctcctcctcatggtgactctgtccttcctcaaggcccggccccagtgtcacctccttgttgctgctccccaggcacctgggttgattctccttggtggactttttgccacattgaggtggtcttacccattcctgttcccgtcctgaccccaggtctcctccaggaaggagctgtctccgtgcttggccgccccttcactgactgcacctgggcctggctttgcctctgtggcggatgagtggaaaccatgtctttttcttgtcttattgcagtggctggagcgggatgctgtgattctccagggtgccgtcccaaagcctcaggctgctccttgccatgctgggggtcctggctcttctggggcttgtccatggggttaggggttgcccgtggtgtttttgttgttgttgttgttgttgttttgtttttttgggggtttttttgagacaaagtctcgctcttgtcccccaggctggagtgcaatggtgcgatctcggctcactgcaacctctgcctcctgggttcaagtgattctcctgcctcagcctcccgagtagctgggattacaggcgcctgccaccacacccggctaaatttgtatttttagtagagacggggtttcaccatgttggtccggctggtcttgaactcctgacctcaagcagtccgcccacctcagcctcccggagtgcgggattacaggcgtgagccacacaccaggcctcctttctgcatctcttgagcggatctttggcttcttgcctttttaaagtggcaccggggtcaacttgatgaaaatttcccctgccgtcttgaacttgggttgaaggagagggagaattctcaggggcgcccgcggctctgtgtggctaacgtctccacggggtgtctccagcttgagggtgggaaggggctcgggatagacccaccccaagtggagagaggcctggaggggagccattgccctgcctccctcctgggaaaggcaagcactttgtcaaagtctgatttgatggggaaaaatgctttcacacagctcccactacaactgagtgggaattaagtgtttgcttaattggtcttttttgaaaacaggtttattgaggtgtaattcacataccttacagtgtcccctttgaaagtatgtgactcagtggattgtaggatattcacggcatcgtcctcatcaccacagtcaattttacagtattccatcaccccaaaaagaaccctgtccacatcagcagtcacccccatcccctcctccagcccccggcacccacacatccccttcctgtctctggatcagcctgtcctggacatttcacagaaatgggatcacatattatgtggccttttgtgtctggcatctcgcactaagcatgacatcctcagggttcacccacgctgtggccggggtcttggcctggttcctctttacggctgagtcctgtttcagtgaggggtgggctgcgctgggttggcctgttctgccctgggtggacgcctgggttctttccacccttgcctgctgtgagtcgtgctgctgtgagcacttgggacacgtttctgtgtggacgtatgtgtccacttctaggcagacacctaggggtggaattgcggagggggtactgagttggtcttgaccactgttgggaacgcctgcagagcagaggccccaaatgccttcatcccgttttcgggcaccccccaagccagtctcgcccctctccccttgcagctgatccaccttgagatcaagccggccatccggaaccagatcatccgcgagctgcaggtcctgcacgaatgcaactcgccgtacatcgtgggcttctacggggccttctacagtgacggggagatcagcatttgcatggaacacatggtgagtgcgtccggggcaggggcaggggcagggcctccacggaacagagcatgttggggagaaggaagaccccctcacggcccctttcctcagaggcaacagtgcgctggcttccaggggatccttctcaaggcagtcgatgccatacaagtatgtatatgtagatgcctttggttttgttttgttttctttttgtttttttgagaggcagtctcactctgtcactcaggctagaatctagtagtggcacaatctcggctcactgcaacctccacctcccagattcaagtgatacttctgactcagcctcccgagtagctgggattacaggcgcccgccaccactcctggctaatttttgtatttttagtagagacagggtttcaccatcttggccaggctggtctcaaactcctgacctcaggtgatccacctgcctcgacttcccaaagtgctgggattacaggtgtgagccaccgcgcccagccaatgattttgttttttaagcactcatgtcttcctcccagctttgctttttctcttgctgtatcccgggcgtccttatgacagcagagagggaaaacactcccgttttggggggtacgtaggttgtttccagtctctgccctatctcaaataacatggcactgactcgcaggcacacctgtgaggtaagctgtgtgagggaattgctgggttccagggtagatgcaattaaaaactgatccctattaggccgggcacggtggctcatgcctgtaatcctaccattttgggaggctgaggtgggaggatcatttaagcccaggagttcgataccaggctgggcaacatagtgagaaaccatctctataatttaaaatattaggtgagtgtggtggcacgtgcctgttttaaaattgttaacaacatttaaaaatggggataaaaatagcaccagctacatgagaggctgaggtgggaagatcacttgagcccaggaggttgaggctacagtgagctttggtcacgccactgcactccagcccgggcagcagagcgagatgctgtctcaaaacataacaaagctgatgactgtttttaaatggccttctcaggaaagtgtggcagtctgagcttgtcaaggcaggcctgtgcctcccccagctcagatctgtgggaccacagtctctagggtggggtacaggcacccccttcattgactctgacgtgcccccttgttaagacactctggcctcgaagcccagaagtgggtgagattgggtggaacaaaaggagaagtggccagagctcaaaaccccggaggaaatgctgccgaccccgccacaccgagctcatcaggtatcagaccgcctgccgcacagcgtcgtttgcaaaaccagaatgcttgggtgacaccctgcaaacgtgcgatcccctttgacagttttgtaatgaaggcaggaagtgaatttgagcaaggcccccacgtagccatgtgacccgagcaaggcagcacccgccttggagcccctttcccgcctgcgagggagacctggcgtctgccccgctgctcgcagagtcacgttgccggcggcatcaaagggcgaggaaaggatgaggaagcgctttgtggtctgaggcagcccctctgtcatgtggtgctccctattcctcctcctcgtcttcctcgtcttccccctcctcctcgcgcccggcaggcaccctcgctactcaggagttctgtccatcctcgttttgtgtggctgactcagttctcgagcccccttcctcccatgcagaaaggggacagtgtggcaacccgcccccaacctctattcttggtgaatttaaaatgggggttcccagagtgggtgctggcaccccaggggacaccacacagaccaccaggctgcaggagggagacacaggccgtgctgtctgtgttatggagtgcaccctttaaaagttccgaggtggtctagccaggggcggtggctcacacctgtaatcccagcactttgggaggccgaggcgagttcaggagatcgagactattctggcttggctaacgtggtgaaaccccgtctctactaaaaaaaaaaaaaaaaatacaaaaaaaattagccaggcatggtggcgggtgcctgtagtcccagctacttgggaggctgaggcaggggaatggcgtgaaccctggaggcagagctttcagtgagctgagatcgtgccactgcactccagcctgggccacagagcgagactccatctcaaaacaaacaaacaaacaaaaacaacgtggagcacgttgatttttaaagcattgggtgagccctgacagggcagcatccgtggaagtaaagtcatccaagggggccatccctgccatcctcgccggccctgtgaattctctccatgctgaacgatgctctcggaattcacctgagtgcccataggtttccatggaagggcctgcccagcacctgattcattccctcccaggccaccccagtgaggcaaaggggcagcttagcaccggggctgaggatgggcgtccgggtcaggtctcggccccaccgctcacccttaccacgggttcgggacaggactcttgccgcttctgctgtgaagctgagggaggtcgtagtccctgctggggtgaggactgtgtgagctcctcccaggatggcacccggcacgcacaggtgttgcatccatgtcctggctgctgcagccatttccctgtatttctacgctgtttcctcatatttctatgtcatctttattttgcatttttttccttctttttttgtggggggtagggggtacaaggtctctctctgtcacccaggttggagtgcagtggcatgatcctagctcactgcagcctccacctcttgggctcaaacgatcctcctgcctcaaccttccaggtagccgggactacaggtgcaccagcacgcttgagtagctttttaagtttgtttttttttttttttttttttttgagacggagtctagctctgtcgcccaggctggagtgcagtggcacaatcttggctcactgcaagctccacctcccaggttcacgccattctcccgcctcagcctcccgagtagctgggactacaggcgcccgccaccacagccggctaattttttgtatttttagtagagacggggtttcgctgtgttagccaggatggtctcgatctcctgacctcgtgatccgcctgcctctgcctcccaaaagtgctgggattacaggcgtgagccaccgcgcccggcaagtttttttgtagatatgggatggcactatgtttcccaggctaatcttgaactcctgggctcaaacgattctcccgcctcagcctcccaaagtgctgggattacaggggtgagccaccgtgcccagtgatgtatttatataaaatggcaagcacttgttggtgactggaacttaggaacagtggggctggctgcttccctggggtctgaacctattactggataactcggggcaagaacccagtggacagtggggcctcatgggatggggaaaggagagccagtggcttacggacctcgtagaggtgccccttggcctttctgggggtctcgtcctatctgctgaagaatgcccgtcttgttctactgtaatggaaactggacatgtccatcagtaagggagtgattaaagaatgatatttggctgctttgcagtggcaaagtgaaatccacaatggtgtactgaatgggagtatccccacagtacaacactattcatgtagtggaggggtggttgtagaaaataaacatagcatgggctgggtgcagtggctcacgtttgtaatcctagcactttgggaggccaaggcaggcggatcacgaggtcaagagttcaagaccatcctggccaacatggtgaaaccccatctatactaaaaatacaaaattagctgggcatggtggcgcacgcctgtagtcccagctcctcaggaggctgaggcaggagaatcacatgcacccgggaggcggaggttgcagtgagccgagatcatgccactgcactccagcctggcgacagcaagactccatttcaaaataaaagaaaaataaaataaacatagcattggcccattcatttgtttattgtattttcaagtcagggtcttgctcagttgtccagcctggagtgtactggtgctgtcctcccacgtcagcctcccgagtagttgagaccacaggcgtgagccaccatgcacagctaatttatttgcttatttgtgtagagatagggtctctccatattgcccagactggtcttgaactcctggccacaagtgaccctcctgcctcggcctcccaaagtgctgggattacagacatgagcccatttcgatgttgttttaaactctggctgggcaagcatgctttaatcccagtgctttgggagaatcccatgagcccagtaggtcgaggctgcagtgagctatgattgagccactgctctacagcctgggcaagagagtgagtcccgagtctgtgtttccaaatacacagcaagatgcgggggccaggtgctcactcctgtgatcccagcactttgggaggctgaagtgggaggacctcttcagccaggacttcgagagcagcctgggcaacatgaggaacccccgtctctacaaaaaattagcaggacatggtggcgcgcctgtactcccagctacttgggaagctgaggtgggaggactgcctgaaccaaggaggtggaggctgcagtgagccaagatcacagcactatgctgcagtctgggcgacccctgcctgaaagaaagaaagagagagatgaagaaagatctggaacaatataagtcacacttgaggggggaatggtggaagtgatgcggcgtccaggttatttatcctcatttgaattttttataagaaaaatgtgtttgccgggtgcggtggctcaagcctgtaatcccagcactttgggaggccgaggcgggcggatcacgaggtcaggagatcgagaccatcctggctaacaccagtagtgaaaccccatctctactaaaaatacaaaaaattagccgagtgtggtggcgggcacctgtagtcccagctactcaggaggctgaggcaggagaatggcgtgaacccgggaggcggagcttgcagtgagccgagatggtgccactgcacccccgcctgggcaacagagcgagactccgcctcaggaaaaaaaaaaaaagaaagaaaaatgtgttcacctactacctacgtaacaaaattacagttacaagaccattttaaacatcacacacacacacacacacacacacacacacacacacacacacacacacggtagacgtgtatggtcatgcacagagtgagatttggggtcagcagtacacagctgcaataccccctgcaccacatcctgtctctgtgactcagacaaattgcttaccctgccagactttggtctttatagctggagatcagcccttctcaaccaggggcagttctccctcccaggagacacctggcactgtctggggatgtgtgtggttgtcacaactgggggatgctcctggcgtggagtggatggaggccagggacgctactcagcgccctgcagtgcccaggtcggccccaccccagagagtgacctggccccgatgtcacagtggagaaaggcggctgcagagagagcgatgctcctgtgaggcgtcttccaccagctcctgaggctgcagcacagcgctccgcccgccctcatctccggggagaggctctttgaattttctcactaaacaaacattgattgcggccccaggagaaacgaagacggaaggagctgtgctggggagcaggggttttagggttgcgtttggtgcgtctgtttggttttcgccaccctgcctctttcgagtcgttggtctctttctggtttttgtttttttgagacagggtcttgctctgtcacccaggctggagtgcagtggtgtgatctcggctcactgcaaccttgacctcccaggttcaagggatcctcccacctcagccttctgagtagctgggactacaggcgtgcaccaccacgcccggctgattttggtatggggtctcactgtgtggctcgggatggtctcaaactcctcagctcaagcattctttttgctttggcctcccaaagtggtaggattataggtgtgcgccaccacgtgcggctttttttttttttttttttaattgaggagtcttgctctctcgcccaggcgagagagaagtggcacgatctcgactcacagcaacctctgcctcccaggttcaagtgatcttcctgcctcagcctcccgagtagctgagattacaggcatccaccaccacgcccagctaattttttttatttttagtggagatggggttttaccatattggccaggctggtctcaaactcctgacctcaagtgatccgcctgcctcagcctcccaaagtcctggcattacaggcgtgagtcaccgctcccagcccatgtccggcctcattttaagtaattcttttaaggtagattgataaaaactgagaatagaagcagcttccacctggccctggctcactggagctcccgtcctggcacctcctcctgggctgtctgagccctggccatacctgccctctcaccctgtgtgtctgcgtcttcagcctggagctggtggatggagtcacgtgtatgctttagaggtctcaaagcgtgttgggttttctagaactgccttcggcctttctctccaagcctagctgggcagaagtggccagagagcggcaacccgggcacccctgagtcccaggatttctcccccggctcctcccacccatgtgaatgaaagccatcccagggaaggctgggcttttgcaggagtcctggagcagcatggtggggaaatccaggctccccagccagcctctccaggctcctccagcccgccctctctagcctcagttccactttcctctctgctgagcacagaagagacgcacgccagacggtggcagtgggaacttggcctgtcacccctgctgtcctgggggtggcctggcaggtgtgtccggagcctctgcctctgaagaggcaccttgggtggctcccagtgcctggggttttggcatttgggggttttggtccccaggtttgttgccaggcagccttgggcaagacatggaatttctgtttcatcatttatgacatggatgtggggccacacccggggaccagcctacccatgatgactcgtttccaggccctccgcaggatgcccggcacagtggcgaggagaccacaggctgtggggaggggccgaggttaccgtcacctgggctggcgtcactgggatccctcctgcagtccatgcaccccctggcccctggtcctactcggcctggcctttctgccctaggtggcagggacaggcgcagggcagacgcccagcagtggagccgcagggcttggcgagggagccccctgggggtctggacgggcacacagcgacccgccgcctcctcccacgcggggcagcacccgcgtctcctccgcgccctcaccctccccttcccttcgtgtgctgggaagaggacgcaggcccaagacgctggtctccagcctggccgcctcccgtggcgcacagacaagcccaccacgtaggctgcagggagtgcgggccccacagctgcctgagcccccggccgcggcttgggctggcccggagcagagcctctgccgtggcgacctcaggagggccgagtcacgcaactgattcgaggatgggacgggaggcgggggaaccctgggccctgttccttccccaccttgtgggtgggtgttcagacccaaaggcagaactgtcagaagacgccctgcccttggcccgtgggtggagttgggctccggcccctgcttcccgtcaggaggcagaccaccccctcgccgggagtggggggacgcatccgtggcttcccggccacctgcgcagagcctgcactcactccttgtgtgccctctaggacggcggctccctggaccaggtgctgaaagaggccaagaggattcccgaggagatcctggggaaagtcagcatcgcggtgagtccaccgcagacccacatcgcgcccccaccgcactctgcacggacctcttccacacggccagggttccgggagccactcacagtgtggtgggggttagggtggcccctgcagaaagagagtggccaaggctgtgcccacctgctgtggagcttgaacaagtgacgtcccttttggggcctgaggtcaccatctgccaagtgaagacgttataggtccctcttcactcttagtatcctctgtttgccacactggtcccctctgcccctcgtggcagggggatgttggcagctggcacgttgcaggggacaggagcttgttgaaagggagactctggggtgggatgtgggacgccaggacctccagacacactcaccattgctgttagaaatgtcaccggggccaagggcgtctctgctgcccggtctccagcacagctgctccgtagagccgtgtggtttcagcagaccgtgcgtgttgcttcttggagcttgcaccttgtccatagcaggggccgagtcccgcctgcccataccagtgttggattaagacacaggacgcatgctgccagacacgcgtttccgagttgaaagctgccgtcacactgcctgtgctgcttgcttcacttctcgggatgctgcttccagggcgggcctgggggaaacatcgtccttcccaggcacccttagcccgtcccatctgggggcccttagcacagtccctgggaccccagatgctgcctttcaggctgatgtgggcaaactcggcagcccagcctactcccgggccatgggccaccatctcagcttccctggggctaagccgtgtgctctgaatcaaaggcagtagtggcatcggcggcactgcggccatgggaaccggggttgacttgcacacgccagcacagggctgtcagcactgtctcgtctctggcctcgcttgctccaccccagcgagctcctcacagcctgaaatggttcctgccgcagctccctcgctccagctctgactgctcagctctgacccccgggctcggtcaggagctaagccctggtggccttgtcccgtgactccctccgcgctcccctgcaggttctccggggcttggcgtacctccgagagaagcaccagatcatgcaccgaggtaaggcccagcccgccctccccagagccccgggggccggcaggcaactgttgggcgcccctcacccgcagcctgccgcctccagatgtgaagccctccaacatcctcgtgaactctagaggggagatcaagctgtgtgacttcggggtgagcggccagctcatcgactccatggccaactccttcgtgggcacgcgctcctacatggctgtgagtccccgctggctctcccctccagctctcctccctgctgctctcccccaagctctccccacccagctctgccagccagctctccccctcagctctcacccccatgtctcctgcgcagctgtccctcccagttctcctgcgcagctctccccgcctcccacgaggctttcccaactatttcgtgggcacacactcctacatggctgttagcacccccgggacagtcccaccccagctgcaccctccccttcatcagctctccccacttgccacaaggcacgtctaaagctggtgcctcctgggagcctgcttttcggattccccttgctctttattttttatttgttaatttactaatcttttgtagacacggggtctcgctgtattgcccaggctgctcatgaactcctggactcaagtgaccttctttcctcagcctcccaaagtgctgggattccactagcagtgagcctgagccaccacgcccggccagatctccccttcctgttggaattctctcttaggtttttgtctctagcagtgcctaccaggtttctttcttttttttttttttttttttttttttgagacagagtcttgctctgtcacccaggctggagtgcaatggcacaatcttggctcattgcaacctccgcctcccacccgggagcaattctcctgcctcagccttccaagcagctggggctacaggcatgtgccaccacagctgggtaatttggtttttgtttttgttgttgttgttgttttttgagacacagtctcacactctcacccaggctggagtgcagtggcgccatctccgctcactgcaagctccgcctcccggattcacaccattctcctgcctcagcctcccgagtagctgggactacaggcgctcgccaccacgcccggctaattttttgtgtttttagtagagacagggtttcaccatgtcagccaggatggtctcaatctgaccttgtgatccgcccgcctcggcctcccaaagtgctgggattacaggcgtgagccaccgtgcccggcagccttggctaacttttaaaaaaatgtttttagtagagatggggtctcgccatattggctagcctagtcttaactcctgggcttccacctcaacctcccaaagtgctgggattacaggcatgggccactgcacccggcccttagttaatttctggaccaaggaattggaatctggggtctttcaggaaacgactggggattcagcaacctgccaaattgagccttggagcagcctctgagatgttagctgtggaggaggaggcccctgcttcctggggcccatcatccattcccaaaagtgctgagcattgcaggctcttcaagagctgcggtcaacaccagctccaggcctcgggctggaagcctcttcagcaagtgccgcagggaggccctgggtgggtgagccgggaggtagaattgcgtaacagctctctatccattgctgcggtcattagccatggagagggtgacgggggctgtaacggggcaagcctcccgggttccagctgccatcctcgcccctctgggctctttcctccctggctctgctgcagccggagcggttgcagggcacacattactcggtgcagtcggacatctggagcatgggcctgtccctggtggagctggccgtcggaaggtaccccatccccccgcccgacgccaaagagctggaggccatctttggccggcccgtggtcgacggggaagaaggagagcctcacagcatctcgcctcggccgaggccccccgggcgccccgtcagcggtacggcctgaatctgcaacttccggtctggacgcgcagtgccctgcgcggggcctgctgtgccagggtcagcagctgcctcccctctgcccctggcgcaccacctgtccccctggatggtgccgactgtggtcagcagtcctcccatggtcctggggtttccggggacagagctggaagcagtgagcaccccaaacctgttctgtccggggcagctgcacctgttgttgccagctggagggatctgggagcgcagctttgccaccaagcccctgggcagttggattttccaacattttatcccgaaagcattcaaacgcacagaaaagtggaaggaattggccgccacagagcctgcattctgcaggtgacacgctcctgtgctgcgggccaagccttccagggagtcctgaagtggagattggacttggcatggccctcagtggcctgttggctccggccccaacacacacaggaggggacacagcccgggagggggcgggagggctcaggccccagggacagctgggctcgcagaggacaatccggcacttagggcgggcacctcgggagcgggagctccctgacgccagtcagagagggccgagcggacacttccaccgcctgagggaagagccgggggcggaccctgcttggtgcagaatcacaggagggtcctgtgattttttttaaagtcagacatcagggagagttggtggcgtcagaccccaaaggaccctgtagcggactgtggttggttttaaaaccatgtttccgaactacaaagcacacaccccacaactcatttcaggtgagcagttcagtggttttcagtcacagtgctgcgccccatcacctctaattccagaaccttctcagctccccaagaggaaaccctgtccccatcagctgtcactctccatccccttcctgcctctggactggcctgtcctgggcatttcacagaaatggggtcacacacttgtgtggccttctgtgttttgtgtgtggcttctctcctggagcgcagtgtcctcaagggtcatccacgccatggtgcgtgtcagagcctgggtccttttgaaaggctgagtagtattttatgacacgaacaggccacgttttgtggtcctacccggatggattggggctgtgagaaggagattttcatagcactggcaagcccacctcctcctctccagccagactgctgggatgtcttgatctcatcccagggagaggcccccaagtccttatcctcaggcctagcctcagcctctcccagtcccaactctcaggtggtataccatccccagcccagggccccagcccacctgcccatttcaggacgggcagaaggcgaaagtccagctgccaagcccaggcctggccagctggttctcagacaggggtcagccacccctagccagtctcccgtcctgagtggcacttggggcctgcccccatcaccgccagcagctccatgcaaggtcacgcggctgtccttgcctgcggtcagcaccgtccctccccctgccctccagagaggaggggtgatgactttggcacgtccggcaagcctcaccgagccaaatgtgtgacttctcaaaaaatgttcttgttccttttgccttttttttaattcactagaggctcaggcaaggagtagctgtcccagggaatggaacccagagtcaggcaggggagctttgtccagtgcctctgcacacccgcctccaatttaggctggcatgtggaggagggcgcctggtggtgatcagccccctgggagcccaacccccagcagaagtgaggtggccatcggcccatctcacctccatctctctccctgtgcaggtcacgggatggatagccggcctgccatggccatctttgaactcctggactatattgtgaacgaggtttgtgcttgatgccttttggcttttcttttccttttctttcttctttctttttttttttttttttttttttaggcagagtctctctctgaccagagcaagagtcaccaaggctggagtacagtggtgccttctcggctcactgaaacctccactttccaagctcatgtgattctcgtgcctcagcctcccgagtagctgggattacaggtgcgcaccaccacacccagctaatttttttttttttttttgagacattgtctagctttgtagtgcagtggcttgatctcagctcactgcaacctccgcctcccaggttcaagcaattcttgaaccaattccacgtgtgtcgcgtctcccatcttctactgtgctgcacaagcccagctccttcccaagggcattgtttttttatgaagacgaacccagaattcccaccgcagcctctcaccctgagtccagagggaggtgtgtgccagcagccctgggctcaggccgaggagccagcctgccccttgagcagtggcccagtgtctctgcatcagagcgtcctggcgcccgtgggcgtggactcataaatcaccccgcttccacggagaaaggtacaggaatggcccttgcctcttggaaggaggcccagagagcctagaaggacctgtaggtcccggggtggctcctgctccgtcagtccccataacaacccagtgagccacagtatgagggtttccaccgcccagatgagtaaaacaaggcacaaggagggacgcggcctccttccaggcctgcagctgtcagggaggcacaggactgcaccccaaggtcctgttggccacgtgaccaggccgggccacctccctgggccttctgtgggtttctgtgtctttggtggccctttggagctggggcagagaaacgggcatttgagctgcctgcagactgggctaggcctggggttgggtggcgagatgatgacggagccaggtggggtggccctggtgacccagctctccctgcacctagcagccacacccatgcccagtgagcacatcccccgacctctcccccgcctcttcccgcccctgcccctgcgcgggaaaggcctgcccctgccctgctggcaccgcttacacggccactcccgctccggggacgtgtgtcaggccaggctccccagtgcttgggcttaaaactgtggacccagtttggccgggcacggtggctcaggtgtgtaattccagcactttgggaggccacagtgggtggatcacctgaggtcaggagttcgagaccagcctggccaacctggtgaaataccgtctctactaaaaatataaaaattagccaggcgcagtggtgggcacctgtcatcccagctactcaggaggctgaggctggagaatcccttgaaccccggaggtggaggctgcagtgagccaagatcacgccattgcactccagcctgggcaacagagcgagactgtctcaaaacaaaataactttggatccagatgtccctctgtggggcccagtcccaaagctcatccttcagccagtgacactggggaaggaagcaagtgacgacactcgagaggttgtcctgttgataaaagggggacgcaccccactctttccctctaagcagccgtgactctcaaacgagagctttcgggagaaggccacctctgacagggtgcagcccagttggcatgtggtgtcggccaggcctgcagggtgggtgaccggacaggacagtgaggggtagagagggctgcagccgagggtccctgacgatgcccagggctgaccccaccctctgttctcctccacagccacctcctaagctgcccaacggtgtgttcacccccgacttccaggagtttgtcaataaatggtaggtggagccgggctgcccacacccctggccgggacccagatgtgccactccttccgggtcctgggtggggcccgtggcccagcctgcccatccagaatcccagtgcagcgttaggcaggactcagcccaacgggaagccagattccttttcccagagctgtggggctgcagctcccggctgccatgccatcctgtccgtgagcccaggggtgaagcaggattgcaggccctgtgcacatgacggtgtccccagctcactgtctgcagcaggagaagcctctgtctggtccccggacccctggtgtgctgactgtgggctccccgggatccgcccgcaggttctgggagggtcgccagccccactccattctcctgcccccaagcacccagcagcacctgtggcgtgggcttcacaggcatgtgccgcagaccacggggaaggagctgcggacaccccgctgcccacagggccggtccatgtgtgtgagctcgggacgccgtggaacggcaccgcactcctggtgccggagttgccccgggcccttggcgtgcgctccggcgatgttgccccgggcctggggttttattagacagttagctggggttgcgtccaggcttctgacccaccaggcggggtttcccaccctctttccctctcaccctcccgctggggggtgtcctgcccctggcaccaaagtgcagaggtggatccctcgtcctctgccaggaggcagaacagagcagccactctgtgccactctctctggtcggagagatccaggccccctccgaccacggcccacacgcgggtgccccggggccaccagctgactgccctgtcttgtctcctccaccgcctcccggtcctgcctcttggaacccccagcctcatcaagaacccagcggagcgggcggacctgaagatgctcacagtgagtgatgccagcgggttctgggaccgggagggtgcaggctgccacccaggccccaggaaataaggctgctgggcctggccctgcccggggagccagcacctgcgaccaggatgtgggcaggccgggtgtgccaggccacgccgaggaccctctgtgggtctctctcatccatgagagaagccatcctgggctggctgcggggagcagagggtgtgtgcgtgggaacagctctgggctctgagctccgccgctcctgcctggtgctggtcccgcacccacaggatgagaccccgggcttctttgccctcatgagaggctggaggcagctctcagccccccaggctcctttccctgcaaactagagggtgaccatccctgttctgcacactggcaagcaggtcccccgaggccgtgcgtacttcggtgtccccttaaacccccatcctctgatatcctcggaagcccagctgttcaccaaaactcgcctccccagcggggactacaccctcagaggagggccccgggcatcatcctcctgccctcagcccagcctgcatcccgagtgctttcccataccacagccaccgtcagcgaccttcaaacccctcgacagctgattggcggattggagatgccacccccctagacagcccgttactttctgtgcctgtaagaaaagaagagatgccagctacagacacccaaccgggtgccttctaatactggaatgtggctttcagttttgtttttttcttgagagtcggacagagtctcactctgtcgcccagactggagtgcagtgaagcaatctcagctcactgcagtctcagcctcccaggctcacacaattctccagtcagcctcccaggtagctacgattacaggcacccgccaccacacccggctaatttttgtatttttagtagaaacaggctttcaccatgttgtccaggctggcctcaaactcctgacctcaggtgatccacctgcctcagcctcccaaagtgcagagattacagatgtgagccaccgcacctggtcaaaaaaatttttgagatacagccttgctctgtcccccaggctggaatgcagtggtgcgattgtagctcactgtagccccaactcccgtgctcaagtgatcctcccactcagcctcctgagcagctggggctaccgatgtgtgccaccaagcccagctagtttttgtgtgtgggttttgtttttccccgcaaagatgaagtctcactcttgtcacccaggttggagtgcagtggtacgatctcggctcactgcaacctccgcctcccaggttcagggaattctcctgtcttagcctcctcagcctcctaagtagctgggattacaggtggctgccaccacgcccagctaatttttgtatttttagtagagatggggtttccccgtgttggccaggctggtctcgaactcctgacctcaggtgatctgcctgcctcagcctcgcaaagtgctgggattacaggcgtgagccaccgtgcccgacctgcccagctagttttttttatagagacagggtcttgctaattgtccaggctggtctcaaactcctgggctcaaatgattctcccaccttggcctcccagagggctgggattacaggtgtgagccactgcacctggcatgtgtgactttttttcttttttaatgaggcaggctgggcattgtggtgggcacttggaatcctagtgccatagggggatggctctctgaggccaggagttcaaggccagcctgggcaacatggtgagactgtgcctctccaaaataaataaataactaaaaagagaggggtactaatgttgaaataactttttttttccctcagacggagtcttgctctgttgcccaggctggagtgcagtggcgcaatctcggctcactgcaaactccatcttccaggttcaagcggttctcctgcctcagcctctcgagtagctgggattacaggctcgtgccaccacacccggctaatttttgtgtttttagtagagatggggtttcaccatgttgaccaggccagtctcgaacttgtgatccacccacctaggtctcccagagtgctgagattataagcatgagccactgggcctggctgaaatagccatttttgaaccagcttcttaaaaatgctcccctgttgggtatcctggacctagccaagatgtgtcctatcaagttggttggtttttcacccatacctacaccgacttttaggaagataggcaccttggcctgcctccagctgcaaaagaggcagcattcaggggcccaaggtcctggacaccaccctcctgggaaccccaaaggcctctactcacccactgtggggtggcccagcacagcctcttccccaagggcacccgccctcctcccccagcccttccaaccaagaggcttctcatgttgtgctgtcctgtacaggaaccgctggtcacacgtggctgttgaagtgtgttcagtggggccgggcacagtggctcacacctgtaatcccggtactttgggaggccgaggtgagcggatcatttgaggacaggatttcgagaccagcctgggcaacatggaaaaacccggtctcaactaaaaatacaaaaattagctgggcatggtagcacgcacctgtaatcccagctacttgggaggctgaggcgggagaattgcttgaacctgggaggcagaggttacagtgagctgagatcataccactgcactccagcctgtgcgacagagcaagactgtctcaaaaaataaaaattaaggccagttgcggtggctcacacctataatcccagcacttcgggaagctgaggcaggaggatcatttgagttcaggagttcgagaccaacctggccaacatggtgaatccccgtctctactaaaaatacaaaaattagctgggtgtggtggcacatgcctgtaatcccagctactggggagggtgaggcaggagaatcgcttgaacccgggaggcggaggttgcagtgagctaagatcacaccactgcactccagcctgggcaacaagagtgaaactccatctaaaaaaaaaaaaaattaaagtaaaagtatttaattaatttgttaaactgaaataaaattgaggcttttgttctcaagccatgggagccacagtccaggggctctggagcctcatgtgctggcgagtgggacggtgcctgtacaatgctcttcgcggagttctgtggaacagcccgttcttgcctgggctgtcctgctccgggggaccctggcaatggctgaggacattgtggtgtcacgacttggggaagcccctggcatggagtgggtggaggccagggacgctgctcagtaccctgcagtacccaggatggccccacgccagagaatgatccggccccggtgtccacagcggccggaggaccctgggcttgcgcgagcgtagaccctcccctgggagcgcaggctgccgtgctggtggtgtccccgccccaggtggagtgcagcatcctgagacccctcccaggcctggcacacgccgctgcccctttctgggtttctttccctctcctaccccgagtgcgtcttcctgtggggaagggagggtctcctctgttttttgctttctgtcccgtaccatctgccagggctgggcagacgctggccctccccgtcctactgtgactccaggcccgggtgctcacggctcccctttccttgcagaaccacaccttcatcaagcggtccgaggtggaagaagtggattttgccggctggttgtgtaaaaccctgcggctgaaccagcccggcacacccacgcgcaccgccgtgtgacagtggccgggctccctgcgtcccgctggtgacctgcccaccgtccctgtccatgccccgcccttccagctgaggacaggctggcgcctccacccaccctcctgcctcacccctgcggagagcaccgtggcggggcgacagcgcatgcaggaacgggggtctcctctcctgcccgtcctggccggggtgcctctggggacgggcgacgctgctgtgtgtggtctcagaggctctgcttccttaggttacaaaacaaaacagggagagaaaaagcaaa

SEQ ID NO: 57 - DNA, 33864 bp, Pan troglodytes; identical to SEQ ID NO: 56

SEQ ID NO: 58 - DNA, 18786 bp, Mus musculus
gaaaaagatctcgcgagagctcggcctgcgagcttgtggccgccccctgttccccgacctcccggctgcgctgcagcgtcagcttcactcggcctcggcgtcggtctgctcgccccggcgctccgggctcgtccgccttccaccttctgcccggcctaggccgcagccccgggcccgcgtcgcgccgccccctatgggccccggctgaggcgtcgccgctggccgtggagccccgatgctggcccggaggaagccggtgttaccggcactcactatcaaccctaccatcgccgagggcccgtcccccaccagcgagggcgcctctgagtgagtaggcggggcgtgtgaggacaggggcgggcctcggcgtgaagggggcgtgaccacaagtgggggtgtggtctgaagggatagcagcgcccgggaggacaggggctggtcctgagaatggtgtggatggaggtgagaggggcgtggagttcgagggctggaacaaagcctggttgggggtccgggcatggagggggttgtgggggggggggtggaggcagggccagttgggtgagtcacgtggtgtgtcagcttggcccggggaaaggggcgtggtctaaggtgagtggcctgtgagcttagagggccgtggcctttgaggactagaacaaaagcctggttggggtcggggccagagcagtgaggctggtggtcttatcaggttggccagatgggagaggggcgtggcccaaggggagagccctgagtcctgtgagcgtagaggggcggggcctcggccggaacttggctttagaaaagttggtctggagagtagcagtgcctgaggcagggtagggatggggacaaggtgcagggatctgagagaatggctttgggaaaatctctgctgttgaaggggaaacagggggcaaagggggcggcgtgggtacaagaggggggcaggtcctgcaggtgttgggaccaagaaaggggagctagagagaggtatgacttggagtaaggagaggggcctgaagagaggcagggcaattggagacccaagaaagaagacgtcctgaaggtggccaggagaatcaggggagcagtgaggctttccgggtgtgtgtgtgtgaggtgtggtatggttagaggaacagaggccgtgcggggtagcctagcctagcgcttaagactgggtaccaggtgagtggagcagttgaaggcatgacttgtctgaggaggcaaggctggccttgcaggggcagagggaaggaacctgttggaagaagcaaggggaggtgcaggggagagcctggcttggggagtacatggtgacctagtggaaagtggacagtgcccttggagatgggtgtgggggtaacagactcactatgatggggtgggatgagcgatgcagttgggtacaaagccttcctgaaaaagggtcaagtaaggacgattgatcaaataaggttagggataaggtttttttgggaggagaaggggaaggctggtcttcctgaagggaaaagaggggtgtcccaggtgaggacagcctaagaatccttgagtgataccagaccagggaggcctctgtcaggaaagactcggtgagacacccctttgtgggcatatcagcatgatggaagtgcctcagtctgaaggcagctgttgaggaccccagagtgcataaagatggcctggggtgtggtgttccaggaaagaatggggagaaggctttccagtgtggaacttatagtaatggcatgagggggacctgaggcgttgggtgaagtgcctaagagactgaagcccatgatgaaaaatgtcagagaagggggtgctaggtcttggaggttgaatcctgctagccaaagctaatggcttaaaacacccactgggagacatgggagggcttaggtgcttcccagcagctaaggacaagataaaggggcagccagaaggtgctgagtgcttcaagggctacatacagtacagcctggggtcctgtaagggcgactggtgcattctcatgctagcaggctcatgggatgtgtgtgcaagaactgggtgtgacagatggtcaggtgggtggcttttctgagggcctcccctccccttggatgaagatggaggtgggaacaggtttgtttgtttgtttgtttgtttctgagacagggtttctctgtgtagccctggctgtcctggaactcactctttagaccaggctggcctcgaactcagaaatctgcctgcctctgcctcccaagtgctggaattacaggtgtgcgccaccactgcccggcaggtttcttagttataaaagccaagccggtgctgctgaggaaggatgatcaattcaagccacactaggtcacagtgtgcattcaggggtggtctgggtagcttttagaccctgtcacaaaggatagacccctctacctagaatccaccagtgagggactggatatgggtgtacctagtgtgtgggtggcctcagctttgattagcataatcacacatacaattaaatcccaggcatggctgctgccactttaatctcctccctcttgggcctggttcttggctccaaagctacttgaaatgccctcataaagacagggtcttagcctaggccttggtgcacctggcctctgctcctttgcctcttcatgtagcctgggggtactgggggttctctgaggcagtttgtcatgattcctccatacctggagacccagcctctgagtctagtaatgtgtccatttcccacatgatggggatcctggagcgcaggcgtggagttcaggtccttggctcaccctctgctcctggggtgctgcagggcaaacctggtggacctccagaagaagctggaagagctggacctggatgagcagcaaaggaagcggctggaggccttccttacccagaaggctaaggtcggtgagctcaaggacgacgactttgagaggatctcagagctgggtgccggcaatggcggagtggtcaccaaggcccggcataggccgtcaggcctcatcatggccagaaaggtgagaaggttctgggtgggcatttgtcctgtcatcttctatggttggtcatatgatgctggatcggggtcttactgtgaagccctggtccatttggaatttgctctgtagaccaagcaggcctaaaactcacagatttttgcctctgctggattctctggcaggaatgtggcatactggtgagttctagcctggcatgcaccaaatgttcttcccttccaagacaaaactcttgccaggctggtctgtgaggcactgatgattagctacagaaaggccgtgcatggagtttgcatgcctgttagtctgtgatgatctgccagggtggtcctgactcagtggccagagcgctgggccagcgtacacacggccctggggtccatccccagtcccatgtaaacccggcatgaagtgcacgcctgttatcccaggatgatgagaagtgcaaagtcatcctcagcagcatcctggtccaaggccagcctgggctacctgaggctgagcatggagagaaactaacacaataaaccaggtccgctctgcagagcagcaggactgatggggttccgtgctcagagcagagagcttggttctgttgggatggtgctgggcatcaacccagtgtctcagtacactgggcaggctctgctgagagagagtgggtgcctgtgatggtagatttgtctgctggttggtaaggggtcagggaagatgggcacgctggagcctcagcaggcttgaaggctacttggaagcagtgacctgctttctaccttcagctgattggatgaagtcaccctgtcacagggtcacctgcttttcttatttgaaagcttaccactttgtaggttgcccattccagccacaaggaggctggtgtttgtgtgcacactgggctccaggaggtcggtgtatgtaggcaggaggctggtgggtgtgcacgcaggattctagggatttggcaagaagatgaagatcctcagcctgtaggattctagccagctgaagatggaccctgcctgcctgctggcttatctcccttagtgccaagagtcccctcaaggtgtggaacagtgagataaggacatcaccaatggtgacacctgcacatcagggtgctggtgtgtcaacacacctgacctttcttgaagtctctagctggctgttaagcaaggggagccacctcatccccagccagagtcctttgctggccctgaagattttgctttggcatcctggactctccacccacctcatgcagaacgctgctgtgacattcagagggcagaaggggaggcctgaatcacccgggagctccctctcatcttccgggcagctgtgatgtgctggctgcaacagaggtgccgattgtgtgggagctgagcctcagcagtgtctggacgcaggtccctcctgatgggcaatgttgagagctgtgtgcatcccctcagctagcatgccctgtctgccacatgggagtgatcatcaccaacagtggacagacagtgcaggaggtccaacatgcccaatccatttttgctctttgtgactggtccaacctctagtgacatctttgaccctctgtcctgggccccttgtggcttgagcctggtatggtgagcagaacttgtgtggggctgtagcatacaggctggaagctggttctccacagctagtagcgtttttgtccaaagctcgtgcagcctgaaggcctcatctccatgccaactgttccctgacaagagcaccgtgcacagaactgcttacctgtgtgtgattgctggaagctggtgacaggctaatggcacagtgagcaaggcaggagcaggcttaggattgcatgttcttggaaacttctatgtcctctggtccaggctctggacaggttgccatggcatttgtcaaagacagagcctccagaacctgctgtggtataggctccgcttatcttgcagactgtttgtagtcacagaggaagtatcttccagcctttgcaccccatttccacatttccctgatagatcttgcttacaagctggctccactaccagcagtgggtacacagagacctgcagtcaggtccatgcaagggatccaagtcctctggagtggcagagatctaagtgtccagggcctatgtttgagctgcaccaggtggccaccatgcatttagactgctggagacagatgtgggccaagaggctaggaccacacattgccacccaaatggctcctcagcctctagtctgtaccctgcaggactaaggaagtagcagacaagtgtctggatgaggccttttgagttcctcctccaggctcagcatggaaagagaaatccatcccggctccttggctgctccctggtactccaggcccccagggctccaacacactggcacattccactgactgcccacatttgcttccagcttgcccaaggttttcagagcagacctgggccccacgggccccagttatgtgggcaccaagaaatgcagtcctatcatatggtcccatgtccaagcacgtggacttcctggcaggaggcaggagaggggattccgtacttgtcacagttgtgaagtctgtaaagcatgggaggcccgggtacaggaggtaggttcaagccagtctgggctactgtgctaggcttggttgagcatttggggttttaaaatatgtgtggcgctcagccttcgtgtggaaaatactgttgttttgatgcaagaattttttttttttttttttttttttttttggtttttcgagacagggtttctctgtgtagccttggctgtcctggaactaactctgtagaccaggctggcctcaaactcagaaatccgcctgtctctgcctcccaagtgctgggattaaaggtgtgtgccacctctgtccggtgcaggatctttttgagacagggtcttattacatagccatggttattctagaactcactctatagatagaccaggctggcctcaaactcacaaagatctgtgccacgctgaaacaagaccttgctctgttgcccctgctggcctggacctcctaatcccactgcctcagtctccttaggtttgtcatcagaaatagaggagtagtggccccatactgggctctcgttttgtggttttactttggtacacattttaagttttttttttctttttagtatagaatagagtttattaagggtatgaggaggggagttaggagggtggtagaggcagagaaaggcagagagaggaagagtagagaaatagaggagtagtggctggccatgagcacgtgggggtgggggggagagggaagggagggaaggagagcaagagaacaagagcaaggagttttgtttatgtatgtgagtgctttgtctgcatctatacctgtgtgccagaggaagacattacagatggctgtgagccaccatgaacctctggaagagcagctagtacttttaaccactgaggcatctctctaacctgtgatttacttaaagaaaaaaaaagtttgtctatgggtgcccagaggcaggaaggaattggagtcacaggcggttgtgagcagccacacgtggtgccagaaacattagtctggcctctgcaagtcctcttaaccactgagccatctctgcagcctgttctgtggtttctgcgtgtaagagtaccgagattgttggtttccactgaaatggtgcccgtggacagcaggcgctgcctgcatggctacttggaggatctcccagatgcaggtacctctgcaccaggatgaagtggagacataagggttctttggaaagtcagttgtgttagatggtgttttgctggggcaaacacatgaagatgaaggagtgttttcctgaagtagacacgggtatgaaaggctagggcagagtcatgaagaaacgtttcgctgaagcaaacacaggagagaggatgttctgctaaagcaagcatgtgaaaggacagatgatgaaggattcattgctaacaacacacatgtattagtccatcttatgttgcgaagttgagctccatttgtcaggacttcagaaagagaaacgcaccagaaaacgtcaggtggtgtactgaggcaagcgccatagagcacgtgtgatgattggagggagtgtaaataggactcaacagactgtgggaggagcttgttggtagagctggctgtgcagcatcatggcgctgagagtcacagcttctcctggtgttcctgttggccttggtctctcctgttgactcatgctgaggcctggctgactctgctaagttatacattactgctgttgtgtgtttgctctcctgactctactgaactggactactggtgtattcatgaaaaatgattgcaagtagatcaagctgccactgctgacctgtgaactgaactgctgatttccagacaacacagatagggttgctccaaagaacctttcttttttgtttgtttgttttttgttttttgagacagggtttttctgtgtagccctggctgtcctggaactcactctgtagaccgggctggccttgaactcagaaatccgcctgcctctgcctcccgagtgctggcattaaaggcgtgtgccaccacgcccggcacccaaagaaccttcctaaacaggtccacttctcccgtatccttcctttttcactacctctgctaggtggtgggctagaagcgaagtgaatgagtcattaaaagtaggctttgagggctggagagatggctcagcagttaagagtactgactgctcttccgaaggtcctgagttcaaatcccagcaaccacatggtgacttacaaccatctgtaatgagatctgacgccctcttctggtgtgtctgaagacagctacagtgtacttgcatataacaataaataaatctttaaaaaatgttaaaaaaaaaaaaagtaggctttgagaaaactatagttacaccagaccctttctggtatgggagccagtgcgtgacctgggaggaaggagaatcatgacatgttcccttggcctgttgggatcgaaagccatactgggaaccttgtccagaaccctgcgggtcctggaaaactgaccacagggtcggggcaggacctacagggaccacaaggtcacagggacacttcctaagcctcttacctgtcccaagctcactgactccctcatgaccccagtattctcctctgggtcgctctgtgtccaccctctttgtggaaaggcctccagcttgcccagacttcctgctcagcagttagaccaggatgcctcgctgtggtttctgtgaaggcccctagcaggggtttccactgtaggatgtctctctacctcagacccttgccttgcccatgcaaagagcatctctgtctccaggctgcccacgtgaccacagcctacagtggagcagtagtaggacttgtttcgtttttcctggtgcttggtgtgaacctggacctaccttgcaggctctacctgtgcttcctgcagagctacagcagactctggtggtgacatctggtctccctggcaaatctagagacatgggtctgctgtgtggcgctcacaggcctggccacagttgttccccactgggcactgggttctaggcttgtggattctggttgctccctcacagtgccttctctgtttggccttctctctggaaggacagtgagtggaaggatgacactgctctggacagcttagagtcctcagtggccaccaaggcctgtgggaatggtgggtctggaggaagggtctgaggggctgatgttgccttgggtgcattgggtagcttggtgtatcttttcccccacaggaatagaatagtgacattcccttttcaaaatcttcatttttaaaccagttttactgaaaacgtgaaaacattgcatcaccatgctctgtcatgctagcaatctctgtcatccacagatccatgcctgggcctttccttctctcgggtgtgtgcctacttttaatgacttcaggactggggcttaagggcttgctggccactcgccccttcctctttagtagctgctcttccttcctgtagctgatccacctggagatcaaaccggccgtgcgcaaccagatcatccgggagctgcaggtgctgcacgagtgcaactcgccctacatcgtgggcttctatggggccttctacagcgacggcgagatcagcatctgcatggagcacatggtgaggatgggagggagggcctgcttaccctctgcatctgctccaggaagcatgcaccccctgtgggaagtgggttcctgttccatggctgtgtgctaagctctgagatggaaggatgcagccaggcctgtgggtccccagcttcagatgagctgcactcctcgctttctaggtaacagtctgggtcatcagagttgggcaggatggagaacttgggccaaaaagagaccccaacctgctgagtcaggtgcaagaaccctgcgactcaccaaaaggcttggcagctgctgtggtcttcaactatgcttcagaccattagggtatgggaagcaggaactgaatttgagaaagatgcaggcgactgttgggtcccctcacacctagctgtgagtctgcctctcctttgagcctaccgtgcttgcctcagggataagtgaacactccctccaatcctttcatagatgttgcatccattgggccacaggcctcctggtcccctgcaggaaggggactccagcctaaggaacatggctctcattgcccgagtggctagggtctgtactataagagacacaggtgtcctccatgcctacaggtgcctctcacactgtgttgggacaggaagctcccagaggcaggaggattgccttgaatttgaggccagcttgagctacatagcaagacactatgtcaaaacaaaactgagccaggcaacggtacatggccaccatcctcatacgaggacgagaaggtcatatatagccctatctcaatgacaagaaaaaatggccactctgccctgctggctgatgcagtctggttttaagtcataggttacatggtataaaggaaagcctacctttagggattgggggatgttgggtggccttttggctggtcctgggcctagtccactttcaatttcctgtaggggtgacacagaaacagtgttcagctccagagactgaagtcagggagtgactatgccaccagtgtggctcccagacctggggtgcaggcagcagtgggctctcctcacttgctattattggcttgtgttaggcagccccacccctacccctcagcccccgccgagagagaacttgtcactcaagagtaggaaaatgcagttgttgtcagtggtacagctctttgggtaccacactacagtggtctacattcaacaagacttagaaagggcaagatgacaccaggccatagctttgtctatgcctgtggcctaccctgggctaattggaactgtggtctctgtctgaaagcttgggtgcacagggccttgtcactgatctggaatgttccagccccagcttgaaaaaaggctcggggagcgggggagtggtggtggtggtggcagaactgctcaacctatatctggaagccaaggaaaagaggagagagaagctggggtcctgctgtcatcatccaaggccagacttccttctaggccaccctctcaagaggccctgccctcttcctactgccacacttacgcccagttagcacagaagggaagctcttctgggtgtccttaagtggggacacctgctaggagcctgctggagagctcacactgtcatttgcagtgtgcccatggcagggagagcaggaagttctgggggctcagcctgggctgtgtcggatctccttaagaaaatgtgttgaggggctggtgagatggctcagtgggtaagagcacccgactgctcttccaaaggtccgaagttcaaatcccagcaaccacatggtggctcacaaccatccgtaatgagatctgactccctcttctggagggtctgaagacagctacagtgtacttacatgtaataaataaataaataaatctttaaaaaataaaaaaaaaaaaaaaaaaaaaaaaagaaaatgtgttgatgctcgatggaacagtgagtttctagagtcctggaggtgtatgcaggggctggccagcagcactcaggtctccatcttgccccgggacactatgacctggttaagatcacccaggctcaaccctggagatgatcccaccagaaactcagccaaatctgtcacactcaggaacttctaggatagagttgagagaggccaggcagactgctcagccctgcagggttcagtgtgacctaagagaaataatgaccttgctgtcctcactagatagtaccatgtccttccctaatgcccagccagtgtcatttccagtctgtccataagaacaaaacatagtgctggaccatgatagtgcacacctttaatcccagcactctggaggcagaggcaggtggatcactgggttcgaggccagcctggtctacagagcaagttccaggatgatattcctacatagagaaaccctgccttgaataacagaaggggaaggagagagtgggtggagaagggggataaaacacaggattccagtgacccagtgcccagctggaccagatgcactgggaggctcgggcagctcggaggaggccccttcctgaccttaactcctgaggtcttgctttgtgtcaggtcagacaccagctccacagatgtcactggcagtgactgcctagtctcctggcccagctggagtcaggaccacaccttaggtgtaaggaacagccagggtggtgacctgcaggccacctcatgcccttttatggggcacagcccttggacttcaggtctggtcatcagcttatcccaggagcaatagctgtgagccagtcctgttttgtcctgcccaaggacctcctgtgtcctcatagtccttggtgcaaggagctggctcttgacagaagtggttctatcattcaagctcagagctctgcagcctcccatacaaatacatgcttaggaacctggaaaagcaagctctgcagggggctgacagggttggcctgcttggggtttgggttgggcttcttgacaaagccagctaccagctgctgtcatctctgcatacaggatggtggctcactggaccaggtactgaaggaggccaagcggattcctgaagacatcttggggaaggtcagcattgcggtaagttggctgctgctgcttcctgggagattgagcaaatcacatccccatccatgtgaggtcctctgtgggccacaccatcacctggggcctgtgagcacctttcttcctggataagaatgactagttgggctgcccattgtggtgtgtagtgactgcaggtcagccagggcaatacagtgagaccctgacttaaaagaggaaataaaaaattccaggggagccgggcgtgatggcgcatgcctttaatcccagcactcgggaggcagaggcaggcggatttctgagttcgaggccaccctggtctacagagtgagttccaggacagccagggctacacagagaaaccctgtctcaaaaaccaaaaaccaaaaaccaaaaaccaaaaccaaaaacaaaataaaaaaactatccaaaataaatgcataaaaaaaaattccagggggaaaaaaaaagccgggcagtggtggcacacacctttaatcccagcacttgggaagcagaggcaggcgggtttctgagttcaaggccagcctggtctacagagtgagctccgggacagcagggctacacacagaaaccctgtctcaaaaaaacaaaaaaatataacaagacaagcaaaaaattccaggcatggtagtatatgcctgtcacctcaacagctgagggacggaggcagagatgcagtgagtttgaggtagccctgggccctcactttgaaatacagtgtccatgtgcttgctgcaggttcctgtatgggacttggggatgtatatatcacatgcctgccatggcactaccctgtggctggggaggctcatcacagcctagccatgctgccctggacacacaggctacccagctctgaccttcctgtaggtgctccggggcctggcctacctccgagagaagcaccagatcatgcacagaggtaagcgggccaggctggcgtgcacagaggtaagtgggccaggctggcctgggtaggacacagtggctgcaacctcacccctgaccctgtctgcagatgtgaagccctccaacatcctggtgaactctcgcggggagattaagctgtgtgacttcggggtgagcggccagctgatcgactccatggccaactcgtttgtagggacgcgctcctacatgtccgtgagtgtcctagcctctgaacatgcatcctcagtggggtctgtctgcttgtgtgtgggaccctaccctgttgctaccaaccccagctgtgttctgtttctttgacagccagagcggctgcagggcacccactactctgtgcagtcggacatctggagcatggggctgtcgctggtggagctggccatcgggaggtatcccattcccccacctgatgccaaggaactagaggccagctttggccggcctgtggtggacggggcagacggagaaccccatagtgtctccccgaggcccaggccccctggacgccccatcagtggtatgggacattacagctagctggagagggatgggtgggggatcagctgccaccctgatggccctctctgtaccagctgtcccctgctgtggtcagcagtcctcagatggtcctgggctttctggggacagagttacacgcagcgagaatctcattctccgtccagggcagctgcacctgttgctgccagctggaatgcccagaaactccactctaggtcaggcctcagctggttgctgggtttcccgggcatttctacgtgaaaatgtgtaaatgggggcaggagtacaaagggagccacccactgcttgcagcctacacatctgtagcctgtcatccaggaagccccagatgcaggtaacctggtgacatccctggggccttggtggcacaggaagcacagaatggagggaaactagtttccaggggacctaaggagacaatcgagcccttggagtggctgccttggccactgaggggcagggacgaggtcctggtgtgggacagagctgctgcagagcacctacctcctgggatttaagtcatggaatgggtgactttgtaactgcagacacacaacataaacaccactgtttgcttcctggaagccctgcagtccagtggttagcatatccacagatgagagtgtccatcacctctatctgattcttgaacattcagccacccctaaaggaatcccattcacggatgctatcaccttgtcacttacctggccctagcccctgcacacaacaaccccaccccacccattatcctgctgtggacatttcctgttgtggactccacactatgtaacttttgtgtctaggtcttacaaagtaccatgtcttggagttccctgcatgtagctggactcattccctgtatatctcagtgtatggtgtgtgcttcacatgcctttaaagagcagagagccccctccccaccctgtgccccacactggctgctcgccctgacaccagatctcaggacacagtcctcagttggctccaatcctttggcgagctttggtggtgacactaggccggctcactgcctttcttgtcctagtcccaaggcagcccatgacaagatgggcaaatggtgcagttcagctgctgggcatcagggccttgggcaagggtcgacatccacctgttccgaatccccagcagctgctctgagaggtcacattggtgttcctgctgagttgccagtcccctcccccacccacggagcatccttcagcctgtgagagtgtagaagtatatcctggcagaaggaccggctctctcaagatttgtgtccctcacagttatgtgttctttgtactgtcaagtaggtcatgggatggacagccgaccggccatggccatctttgagctgctggactacatagtgaacgaggtatgtacccttggccttcaggtacttcattcagggaattggctggcccaccctggagtttcctggggggaagggatgttgtgggctgcacctctgcagtccccagtcagaaagccatccagtgtcttcatcatgcctgtgatccaagctacacagcagctcaggcaagacggttgagctagaggtcagtgtgggccagcctaggccagtaatgtggcttgctccatagaaagaaggctggaggcatgggagagtgaattccttcctagaatcctcctccagtgaggtgagggactggctcacatccacaggcacagaaagtggctcctagggcagactaattggaacccagtacccttgtgtccaaggctgaggcaggattgccttgagacacatagtaatttccagaacagtcttagctacagtgtgagaccctgactcaaaagcagccagaaatagaacaacaacaaatccaagcaagtctccagagggagccaaagtcacatgtgaatgtgcatggttgtgcccaggggtgaagaacactgacagaagatgggctttgtggcctgggacagggctgccactgttcctggcattgatagtccagctcagccagcacttctcccaggaagtctggagccaccatcaacaggaagggctttaccctgtaccacaggcatccccacccactagatagtgttggtaaaagctgaaccggaggagcctggccagatgatggggtggccagcaattcctgcagccacctaagtgatccttccctgtcctccacagccacctcccaagctgcccagtggtgtgttcagctcagacttccaggagtttgtgaataaatggtgagatgggcccatgggatgggtggggcagcctcacactccagctgtgggtttctgggctatggtgtgcagttaggggtcaaagtatttcccaaaatcacacagctgggtgctgttgccttcaggctgaggatccatgcatggcccggctgtgtcctgcgctcccacacaatgggcctggtggtgtgggggcagctgagctgctggactccccagccccttgacgtctgtggtgtttctggagcatggggctccagaggcaggccatgtgtgtgtcccccaaggtgctgtctctgcttggtagtggactgtgccaccttgtatctgcctcccaccagggtcttctccttttcagtttactaattcattaggaatttagcaatttagttgtggggacataggggctagagatgcactcctgacacaccagcattctggaggacaaggtcatcatctgctagtgagttcaaggccagcctgggatacagaagaccctttcacccaaaatgtaaaaacgcagtgctcctggtgcgagttgagtcatgcttcacacacctgagccagggctcctgagtaacatccatgtcttctccctcccccagtctcattaagaacccagcagagcgagcagatctgaagctgctgatggtgagtggaggtggctcctgggccagggattggggctgtctgcatggacgggaaaagtcttcacgctgccagtctcagcagtctggtgcctgaagtggtacagaggtgagggtgtgcttcaattgccacctctcacttctcagaggccatgtccttcatagccatcaagggcttaggccatctgtgaggctagggactatctgagatgaaaacactcataggcctgcaccccgagagcctccacccacagggtgggacagcagagcccagacacacacacacacacacacacacacacacacacacacacacaccccttcctggacagaccgagtttgatttaagcaccatctgtctattttttaggcccctaagaaagcaagccatgctaggcacagatgtgagcaccactgctccaccccagaggcccagagatgaacacaggagtacacacccgccatggcagtattgaggaggccagctcaggcacacacccatcttcccagcactctgggaggtgaggcaagaagatgaaaatgtcagggtcaactttgactatagaagttttaaggccagctttggctacatgagcactgtctcaaaaagaaaaggagcagttgggtggtgcactgcacacctttaaccccagcactcaggaggtagagccaggtagatctctgagttcgaggccagcctggtctacagagtgagtccaggacagccagagctacacagagaaaccctgtctcaaaagacaaaaaacgtagacatccaagataggggaatggggtgggtgcccttgctccatgtaaccctgccatggcctcctgtgtcctttgcacctaagtctcctctgccaaggagtcagcagtggggttttaggggcaagcctcctctccctgggaaacctgccccaggctctcatagtcacaagatggatcagagatagccaggccacctgagcaggcctgggtctcaggctgtgactgatgccttgcatctttcagaaccacgccttcatcaagcgctctgagggggaggaagtggacttcgccggctggctgtgcagaaccctgcggctgaagcagcccagcacacccacgcggactgcagtgtgacagccagcgcccagcagtctgtgtccttgtccctgtcggcacagtggccgctgcctctggggacagtgatgctgtttgttgtggcaggggacctatgcccatgcatttgaaaaccaaacaaaatgaagaaagagaaagaaagaaagaaagctagctgcggctgtgctcctgcccattgcttgttgtgacctcactcagcaggtggaagaagggcaggccaagggatgaggagacactaccctcacctcccttcctgggccccagctcttgcagtgcacatgcagcctccttcctagcagggggtgtgggagcaggggacccctctgggctccagggagcatagctaactcagcatagtgcaaaggcagtgccctgcatgagatccggaggagaccccagtggatctgggtcatggaactcaatgagagcctcgccacagcctgcagccaccccaccagggtcccacctatcccaccagtcagtcagactcagccacagtggcctgtaagggaagcctgaggcctcctgcccacaatctgaatgaagagcattcctgctaacacagagagatacacttgctaatacagacctggtgcccgagcactgtacaagtctggggagtgtctgcaccttcttgctgcccctctcagggatgacaaaagtattcctttttcagatgccccaaggaagccaccatgtggggcttcacatgctccagccaggttgtccaagcaggtgccgtccaccacactgctggctgctcttgcactgtgcagggacccctactgcctaggggtgcccagtgtggtgtgggagagcaatgcctactctccgcctctgccatgagctgcatccatccctcacattcctaaatactaggaaggctgagtcgggaaaacgacaggttttgggccactgtgggctacctagtgagaatgtcttacatcatggaaatggtgcaatcaca

SEQ ID NO: 59 - DNA, 18786 bp, Homo sapiens; identical to SEQ ID NO: 58

SEQ ID NO: 60 - DNA, 27112 bp, Pan troglodytes
  misc_feature (11059)..(12190): n is a, c, g, or t
  misc_feature (22822)..(24035): n is a, c, g, or t
  misc_feature (26221)..(27012): n is a, c, g, or t
ccgcgctcgcgcccggacgcggcggcccggtgagtccccgcccgccgtggccgcccgggcctggatttcctccccgcgggccgggccgctttgttcgcggccggtcgggccggggcgcgagccgcggcgccgccagaatggaggagcgggagcaggaagtggccgagcgggcctgggcggggagggcgcggggcgcgcgggcccggccaagggagggcggccccacgccgggtgccgggggtgcaggctgccggccccagcctccctcatgaccttggggaggccgctccgccgggcgaggccgggacccgagagaagggacgccgccgggcctggagccggggctcggggtgcccctgcgggccgtggggctccccgggcgctgggccagcgaggcagccggcggaggtgccccggggttggagaaagactcgccgcggccggccttcaagtttgtgggagggccccggaaggagacttcatttcccacggacaaaaagttgtacgtggtggcggggtacccaggctagccacaaaggactgtgaccctcctgggccccggaactgcttcctgtcttgggtgggccctggaggtcctgcccgcccatcccagaggccaaggcttggagggcagctggggcttgccccttagattgagtatcctggggcgctagcgagcttggtcctgtcgggacggcctctgagtgctgccttggtcagcgggtgggcttgggcccctgctctgcagccagaggccgccccactttcactcctgggtctctcggccttgctccaggcggccacttcttgactgctttgagtccctcatccgagcgaagggcggacggagtccattggtgggggtccggttgcctctcccgggagctgtgtagacttctcctacaccagggttctggaggcagatggaggagccctttcgaaacacagagtatttttttttaagttgtgacttaataatagtagcaagaatatgtgcttatggtaaaggcaggcggcaggtacagaggctgtgggaagttggggtccttccgcccccacgggcagccctgtgctggcctggtgtatacgtttctgtgcagacgtacaccaccctgtgtgtgcacagatgtatttttacacatggctctggacagctgtctgactctgtcagcagcaggccttggaggggctcaggcccgtgtgggggtggggggacatccagaggtctttgagtccagccctctgcctccaggccacgcccactcagtgttgtcagagccccctgtgcctgaggcgtgcgcggctcggagtcctgccctcggagtcctgcggtgccttcctcgagtctggcctgctttccatcctgctaagtacttggggcagttccctctttgggtaaggtgtggtcttccctgtcctggcattagacacaaggcagtgggccttcctgccattctaagtgtagcttaagacaatcagtgcaaagcaaccctttgtgggtgtccagcccttgcctcaggaggccagaaaggtggcctgaggggagagcgtctaagctggctgtggaaagacccatgttgggatccattccacagaggtcgtcaggggtctctgcctggcctggaggtcccagagaggaccctcctcccctcaggaaggcccatctggaagggtagcagaggactgctcacaggaagagcatgcgaagtgctctttctggggatgcctgtagttggtgatgtgggaactgggttttgagggatgcctaggagttcatccatcagaggggaaatgaggaagccatgcaggatcaatggataaagtgtgctcaggtgagggttggctggtgggccgctgcagggcgggggcctgtccagtgctcccctacttacttgctgcctcccgactgctgtaattatgggtctgtaaccaccctggactgggtgctcctcactgacggacttgtctgaacctctctttgtctccagtgcccagcactgggcctggcaaaacctgagacgcccggtacatgttggccaaatgaatgaaccagattcagaccggcaggggcgctgtggtttaggaggggcctggggtttctcccaggaggtttttgggcttgccctggagggctctggactcccgtttgcgccagtggcctgcatcctggtcctgtcttcctcatgtttgaatttctttgctttcctagtctggggagcagggaggagccctgtgccctgtcccaggatccatgggtaggaacaccatggacagggagagcaaacggggccatctgtcaccaggggcttagggaaggccgagccagcctgggtcaaagaagtcaaaggggctgcctggaggaggcagcctgtcagctggtgcatcaggttagggaggctgggaaggccttttggggatgggggtgatttgtccaaaggctgggggaggtgggaatggggaggtgagcaaggcagcagctctcagagcctggctgttgcgggtggtggtggcaggggctgggggctctaagcctagaataaggagaggcccaggtccagggaactgtgttcaattacatggattttacacttggcagccctgagtgttttggggagagggaaggcgggcttacacatggggaattgggagcttagagggatggcagcccacctgggaaggcaggtgcgggtggagcccccaggcacgtgcagtgggtctctggctcacccagggcgaggagctgcccttagccgggcatggcctcacattcagcttccttcgcttctcccagaggctgtggccaggccagctgggctcggggagcgccagcctgagaggagcgcgtgagcgtcgcgggagcctcgggcaccatgagcgacgtggctattgtgaaggagggctggctgcacaaacgaggttagtacccgctgccagggctgggcctggggagggagagacgggggtagtagccccagggtctgtgagtgcctgtgccctgctgcgtgggaggggctgcctcccctggggctcctgggctggcctagggtgagtgtcctgggccccatgtcttcccacggcatggagggcacggcctcggggaggccaggaggatgaggccctgtgcagggccggccatctgagtggcttcctggtgtgggccctggcaggcgggggagctgctgccagcctctctcctggctttcctggaaggcagcgaggacactgggctgttccagggtctggcacgctggcggcccagggcactgcccaagggctcctgagggcagggcagggctgcttggcttggcctggtgcctgcttcaggcctgagctttgggggtggggggaatccgtaccgcctgggcacagggcatgtttgccttggagctgcagagctggctgagccaagtcccccagcccctgtgtccccctcctcactcatttggccttgcagcctatggaggaggtgctgcccgaggggcctggccagcagctgggtgggatgggagctggggacatagccccaccccttccaaccctgtgcaggcccttctgcctcacccaccctccattgctcagcggggtgcggtggagtctgggtggctgttttgctcctctgtcctgctcgggtgggcttcctgttcaggtccaggtcctctggccaagtcactctcttctgccccaggcagaatcggtccgccctctcctgacttctttttccagacttgttccctcctaagttctagtgatctcatgccagcagcccccccgctttacgtacaccctctagcagatgggtttcacatctggtagtggggagaccccaaacacagctggagcagacagggaggtgtggcaaaagtaggtgtcacaagatggggcattgtgggatgtataggagctcacagaagagcaggcctaaggagccacaggagcctgggggtggggtgaaggagtgaccgagatgagatgctgggggaatcaggggtgtggctggctgtgtgtttggagtgtttgagtgggcagctaccagtgatggcacgcggggcctcgagatgaagacaaggaggctgcagacgcctgtggtccttggggagcttctggccctgcttccccccaaggcctcctgccccatcctgccttctccatcccctccccgtgtgctgtcccctgcttgttccccaggagtcctgccacctgtgcctggaggtcctcacctcacctcacagccctctttggtgtcagggaccccctgccccgaccctggccctgttcctctctgtgtcacatacagtctgctgcctggggccgctgcttctttatccttggcaaatgtgtgtttgttgatagactgttggatctcgggctgacccaggagatgccagggccttgactgcccaggggcccaggccccagttactggggcacccatcagccagctgggcctaggcaggagtgctcccccgaggccagggtgattttcaggttgctgctgatgtcatgccttcaggaggggcctggcagggacaggacatcaggcccagtggggcgtccagagagctgagtttgaaccctggttagccactctatcaccatgtccctttccaagagcaaggtcattgagctccttgggcctcagtttccccatctacaccagggagcggtggtgggagagagacctggtggagtggagaatggcttgtgggcagccctgagttggggtcctgccagcctcagcagcctctgggctctgtcatctggcccctagcctcaggccaggagagagggtcctgtacctcaacccccggctcttcctcctccatccccagtgtagtgggcgctgaggatgggaggtggcgtggatatgacatatgcccttggcaggcatagcccctcttgttgccaagagcaggtggcgtccacccgcacgtccggctgctgcttgcggaggaaagcctgtcctccggggcctgccgcatttccccactcccgtccctggggtcccctgtgtgtcttgcagatgtgctgtgccaccctcctggcagggccagccccacccgcaacactggttagaggtactagctgccttcctgtccctagcggggctgtgctgggctgaccccacccgtgcttcacggtgctcaggcctggctgggggtggggagggagggagggacgcagtgactgtcctccaggcccggccgcagccccttgcagacgccctgttccactcccccccaaccttgctcctgcaggtcagggtgcttgtctcggaggctggcccgcacctgtcccctttgccgggactccccacggccatggcctggggcactttggttctcagctgaacccccagctgacaatcccaccacggctacttgggctggccacacgtggcgtgatggtgccttcgggggtgatgtggtcatggagatgagaggggacgggtatgccctgtgtgtgaggggtggggtggcagtgtctgcaggctccttctcctgctccttgggaggtgagcgtcatctctgggaagtggcccaggctgctttctgttgttctgatgtgtgtgctctgagtcagaggagcttcagggacagaagggaccgggcatggggacacaggagttccggctgcaggcctgtgtggacctgtggctggacccaggcgaggcctctaacagggagatggttcctggagggtgagcttaggctgttaagggcaggagctagtgaggaggctggtggggcctatagggacggggggccagatgtcccctcctgtttcggctgtctcactggataagcagcccagctcagctctggccattggtggtctggtgggctcagtgttgctcagacgtttgcattttcaaagatttgttctgttgtgtgaagtctcctgatttttgaaggttgacaattttaaaaaatcaaccctgggccagggcgcaggtctggctgaactcggcctccagcctgcagttttccttcctttgatagctccgtgccaggctttggccagaggccgtgtggctcttttgaggtactttcccccaacagcttgctcaccttgcccgcttgccccagaactcctggggccgtgcaccagcctggctgcagcctagccccgtggagagctgccctggtgcagccccggcctggagcctgtttttgtctactcacggctgtcttcctgagcgtccccccgtccacatggctggaccaagtgggtcaggagagggccgaggcgggtggccgggatgctgggacccaggatgaggcgctctgggctctcgagacagggctgggcctaggccaggagtgggtgccggccgcaggggcaccacctggactccctcaggctggtcgctgtctgagaggggccggggaagagctgcaggcctggctgccttcggcaggctgtgacccagcaggccaaggccgagtgggcggggatcgagggaagctgcctgtggcgcgtgggttatgcggcagacgctcctgagtgtgtgggcagcgtgtccaagccacggatctgggtgcctggccgggcccgggtgacacgggaccatgtgtccatgcggctcaaggagggtccagtctccggacatctgagtccttgccatgccctaccccgggcccatgcctggcatagaccccccagtccaggcctcagggcagccccctcaccactcctgctgagttagccccaggcgtcccggtggggagtatggaggctggtctctgaccccaagcaggtgcccaggctgggcctccttcccaccccctctccccgccttgaagtcctggcactggctgtccctgcggggggacactgaggcagggagagagtggttctaccccagtgtgttacttcgctttggtgagtgacatagaacctcactgcatccccagctgctgctcagccatccagctggtcctggggtccctgcgtgaggtgggggacctcagagggtacaggccactccccttcatcctggaggaggccttggctttgctgagtaaacgcccttgagaagaggtggggggctccgagcccactccggagagcagctgctcggagggccccgcagggctaattgtgtgtgtgcaaatggaggctgctcattaccccaccaggatgaggggcccagcaggaccctgagggagggagcccgcagactctcccctcagcctgtgggaacctttgggctccaggccagggctgcctgtgcctcctgggcctcagtttttcccaggctgtcaggtgagggtcaaccccaggctgcgtctgggtggcttcagtgtgagccccgcgggccctgggctggttagtgccaagctccgcctcccctgggggagcgttgagggtctggaatggcccccgtgggcaggccagggacagagatggggaggcaagtgtgctggctcctggtgggagggctgggcagagagtgggggtcccaacagccctgggcctacccgggagaggggcaggaggcacaggctggtggaggtcatggcatggctgtggtggaggccgccagcatcagggaggttcctgttttgggagcttgttgagttctcacttcaaaaacaacaaaagaggaagccgaggtggccttgagtgggggtgaggggtcactgctggccccagccctggacctcagcccccacgcctggtggctcctgagtggacagctcttcttcctatgtgtttcttggtcactggccctctctgggcagggatgccctgtggggggctggactccgggaagggaaactgaggcccaggagagtggacagaatgtgggtggaatgattcctgtgctggggcctagacccctgcacaccttgcgctctcaggagaagcctggctgggttgcatcaggccgggttcctagaagtcctgcacgaggctgagcggagggaactggcgcggcccccgctggcgtcccctctgcctgggcacacccggcccggcttggggccagcaccttgccctcgggccctcccatagctgagactggtggctgtggctctgggcctgctccccaggccaccctgggtgggcagatgcctgctgcttctgtctgcttggaccactgtgcctagtcccatggcctcaggagaaggttcccccagcccagcgctggggccctgggcaggttggcagagggccctggggctccaggccaggatggggctgttgggcgaaccctaggccccttacttcctcatctccaatgggagttcccttccctgccatgccgcctttaggtgtgtcttccttgaaccttaaggaatgacaggtttggatttcagaaacgttggaattgagggggttgggagttcatgggtgactctactgccaatgttgggggctttggggtgggatccttggggcgctgtgtttgggctcacacaccccccaggtgggcccggtgaccgcagaccccacccataccctgtaacctggcgggcccacctgcccaggccctcagctggttgtccagctcaggggtggagacaccccctgggcaggcctggcggggaggtggctgctccctgggcctggagaatgcagagaggccctttggctggcccgggtctggctggcctccccacagactggggccaggggcacagcagctaggtgtagggcgcggagacgctgagcgcacaggcttggtgaggtgtgcggtgaggccatgggggtcagggccacagtgtcccagcaggccaggggatcagaaggagcaccctccacagctggccgtgctctgagggccctcctgccccaggcgtggctccaagttggggcagaaacaagagcaggccgatggtggggagatggaaggcccctctctggcgggtgcttcccatggtcggtgtggaggacgaggtccctactgcctggttccagttctcccagcaatgcagggcacttttcctggggtgtcagggattgagaggccagcactggagcccttcaaccgccaggggccctgcccaagagagacgggaggagggaggggctgtgggcatggctgcgtgcccccggccgagccccggaaggagcctgtgcccgtgcccacttcctttcccgagggcagtgtctacatgtgggacactgtggccagccctccctcgcagcaggcgctgtgtgctgtccccatgcccagcttcctcccacgcagggagcgagggtgagggccctgggaacccaccgggtggagggcacttggcaaagcctgctgcaagttatggggagagtgggcgggggcagagtaggaggtgccagggaggggctgcagcctcatctgcaggggtcctgagtaggcagggtgggccatgacatgggtggggcttgtttggggcagaccaaaaatgaggtgggggacagggacagggacagggtcttgggatgtgctgggctctgcgatggatgggtgtgtggcaggtggggtgcctttgcctgcccgaggggtgggtgacgggcagtgcctgtgggggaggacatccaggcccaggtggtctgtcaggggcagcaccagggaggcccagtaccccacccagtagagccccaggagaatggaaagctgagacccaggtgcttccctggagtggcaggaagaggggccccagcgcctctagctgtgcctcagcgaggtggacggggtcatggtggtgccgcctgcccgcacccatgttcctcctggtatgtttgtgtcgggctgaggcctgctcggtggtggagcggaaggaggtgaagaatttgcagttcgtgtcaagttacaacccctgccttggcggcaggacctggggtctctggtcatgatctgcctctgagggtcacctcccctaagtctccgtttccccagggagctgatgggcatgatgagccctgcccgccctgcctgcctggtgggctttctgggagagcagaatgggtcctgggctgggagaggcccaggcaggtggagcgccagtcctctgcctggcgggaacagacacctctccttgtgcagactggccacttgtgccccctcagaagggcttgtgctgggaggagcagtggatgtatttcacccacagacctgggggctccagctgagtggggtcagctggcctccgttgtgtggcccctctcctgcccccaccccagcctggttgtttacagggttcgagggctgctggtaaaggggtgtgtactcccgggcccgggcagaggcctggcaggccgggcccttcgcggtgagctgtgcggtttcctggcaggcggggagggtgggttgcgggcccctcatgggctgccgtcagtggagccgtctgctcaatgtgctggagaaggtaaatgggcccccggcagctgtcggggcgatggatgtgtcggcagtggggaccacggtggccgctgtcagctggcgcccgctcccagggcctgctgggctcactttgctgtggagaagcagctcggtgccgcctggcaccctgccagccgctgccaccaccgtctctgcgaagtgtttatccagcagtttcctgagaactggggactttgagaaaatgttcagggagctgaggacgtggtggcctagaggggctgacacacctggtggctcaggaggtggtcagtcccgggacgtggagggccaccagctggccctcaggggcccacccagtcctgcccgtggcgcgtgggtcctggcccccaggtctaagtgggtgccgctttggggggcctgacccacagtgtggcctgggacacgtgtgcgaggcgtggagagggtgggctgcctgtgactgtccatgtggtccccgtggtggtggtggggtgggttgggggaggccaggcaggagcagcttcctctcagaaccccggtatttggtccaggaggacttctgggaaggaaccctctttccctgggggtgctccagccccttcctggggatgagcggggttggggatggaaggtcactcctgccggagggccacccgggacatcgggatgccagagggaccagggctgggggtgtgtggggccctaggagtgcannnnnnnnnnnnnnnnnnnnnnnnnnnnnnnnnnnnnnnnnnnnnnnnnnnnnnnnnnnnnnnnnnnnnnnnnnnnnnnnnnnnnnnnnnnnnnnnnnnnnnnnnnnnnnnnnnnnnnnnnnnnnnnnnnnnnnnnnnnnnnnnnnnnnnnnnnnnnnnnnnnnnnnnnnnnnnnnnnnnnnnnnnnnnnnnnnnnnnnnnnnnnnnnnnnnnnnnnnnnnnnnnnnnnnnnnnnnnnnnnnnnnnnnnnnnnnnnnnnnnnnnnnnnnnnnnnnnnnnnnnnnnnnnnnnnnnnnnnnnnnnnnnnnnnnnnnnnnnnnnnnnnnnnnnnnnnnnnnnnnnnnnnnnnnnnnnnnnnnnnnnnnnnnnnnnnnnnnnnnnnnnnnnnnnnnnnnnnnnnnnnnnnnnnnnnnnnnnnnnnnnnnnnnnnnnnnnnnnnnnnnnnnnnnnnnnnnnnnnnnnnnnnnnnnnnnnnnnnnnnnnnnnnnnnnnnnnnnnnnnnnnnnnnnnnnnnnnnnnnnnnnnnnnnnnnnnnnnnnnnnnnnnnnnnnnnnnnnnnnnnnnnnnnnnnnnnnnnnnnnnnnnnnnnnnnnnnnnnnnnnnnnnnnnnnnnnnnnnnnnnnnnnnnnnnnnnnnnnnnnnnnnnnnnnnnnnnnnnnnnnnnnnnnnnnnnnnnnnnnnnnnnnnnnnnnnnnnnnnnnnnnnnnnnnnnnnnnnnnnnnnnnnnnnnnnnnnnnnnnnnnnnnnnnnnnnnnnnnnnnnnnnnnnnnnnnnnnnnnnnnnnnnnnnnnnnnnnnnnnnnnnnnnnnnnnnnnnnnnnnnnnnnnnnnnnnnnnnnnnnnnnnnnnnnnnnnnnnnnnnnnnnnnnnnnnnnnnnnnnnnnnnnnnnnnnnnnnnnnnnnnnnnnnnnnnnnnnnnnnnnnnnnnnnnnnnnnnnnnnnnnnnnnnnnnnnnnnnnnnnnnnnnnnnnnnnnnnnnnnnnnnnnnnnnnnnnnnnnnnnnnnnnnnnnnnnnnnnnnnnnnnnnnnnnnnnnnnnnnnnnnnnnnnnnnnnnnnnnnnnnnnnnnnnnnnnnnnnnnnnnnnnnnnnnnnnnnnnnnnnnnnnnnnnnnnnnnnnnnnnnnnnnnnnnnngggtggggtggggggatgccagctggccgatggtggggagatggaaggcccctctgtggcgggtgcttcccatggtcggtgtggaggacgaggtccctactgcctggttccagttcctccagcaatgcagggcacttttcctggggcgtcagggattgagaggccactctccaagtggactgtactcctgcctcgagtggggggcatctgaggaccacagcagggtggggcactcaagtaagtcctggatgacaggttccagttcccctggggaccctcaggatagcgaaggagaagactccatgtgggttggtctctgtgtgaggggtctgggagggcagccctggctgatgtgtctgtgctcccaccctcctgagggacccggagtaagcaggtgcaggcctgcaggcgtcctgtggccatgaggacagtgatgctgggccccgggtggctgtctcctccacctgccccgtcctgtgtcaccccagtcctggatcagggagtagtggggccctgccgcatctgctgttggggctggccgcccacccagcatcctgtctgggctgaactcattaagatgcgcgccacggccctggctgcagctggcacccccccaagtgatcctctagctgaccctctaggcgagagatgaagaaagagaactgtgtgtctctggaccccttaccccgggtccctggggatcctgctcctcccctggaggggtctgtgtgctgggctgggatgctgaagacaaaggccacgtgaggccccttcactcacacccgtctcctggggtaggccctgatcgccgtctgttccctgggtctgtggggccaggcgagaggaaggcactgaaagcccagggcccatttgggcctctgcccatcccaggactccccaggaatgctcggggctgggcacctgtcctctcccaccccccacgcctggtaagcgccacccctgggcctgcccctcccgcacccccagatccagctcccagaaccccccagatgcagctcacagaacctggggctgggcttgtggcagcagggtcaggggcaaggctggggttgggcacgggagctgcgtgctcgggggcagcacggggccatgctgggcacggtgggggctggcagcagttggtggataagatgggtttcaggggtgccgggcctggtcgctcatcagtcttcccgctcagttagcgtcccggggagtggcagctggcaggatgggaggcactccatcaggggccgacagctccagactggcacgcaggcgggtgggcgtgagcggcggggtggcccatgatgggggacgggtggggtgggctgcatgcagccccctgagcctgctctgctctcactgagagcccctgtctgcctgctgcacctgcaggggccctgtggctggggaggggacgtgggaggcggggtggagctgcgtggcacgtatgtgcgtgtgtgtgcacactcgggggtgtgcgagatcccaggtcagggacagaggccggcgcccaagggtagcaggaccacgcctgctcggcagcccactggcaggggcatggagggcttgcggagtgggtggggtcccctgatgagtgctcttgggcacaggggcagattctgggccctggatcatcctccctgcaactgggtgttggccgtcctccagaggtgtcaggcagctatgagtgggctgtggctgtccccttccttgtccaccccagacctgacaacagcctctccccacactcaggccctgctgggtggggtgtccccaccctccaccagcatccccccagcagccctggcttgggcagagagagggctggtcttgtggagaccacgccccgtggtgctggtgggaagggcatcgggcagctggggctggggtaggagggagaggtcacctggccagggggtggccatttgtcgagccttggtggctcacctcttattaaagaactgccccgtggctccctggaaagtagaatgcctgctgggatgcccatgacccatgtcctcggagctcccctggggctgctgccctgctgggacttccctgtgcaccagggagggctggacgcgtctgggctcaccacgaagacccagcaggactgggtggtgggtggtctggtgatgggacaattgcttgtcccccacatccctcccggtgtccctgtctggggctcagtgtagcatgaaaacccaggccccagagctcagggaccccaaccccttaccctggccccctccctaatccctgcccagtgaccccctccccaacccctgcccagtggcccctcagatgaagcagtcgcctaattagtaagttccctgttgttcaaactccttgcttggcaaaatgtaagtggaacatttttttccgagtgtcagtatgaaaaatggtacttgctgggctatcaccgaggacagctgctctgattctgaagtgtgaacgcctgcgtacggctgatgctgcaaaacttgagggagaacgttcccgtgtacctgaatgacccacgggtgggacgcggcagggccgacggcggcagggcctgagtgtgggtctcagcctggggacttgacaccctctgtgccctggggcccctgcccagctggctgggccacctccgtgtctggcttcatcggcagtccccaagacggtgctccaggcccctagacagggagtgcgatcccacggcagtgggcagtcctgtcccgcgagcccggccctcagtctgagtggtgctgacctctaactgtggacgccatgctccatcctcctggtgggtggcggcggggcgggggggggggcggccatgctgggcagcccacacaagccactgtcacctgctgtcgccacctggccgaccctggttgattggggaatgctgtcagccccgcagcccctgtggccatagctggagcccgagctgctgctggtgcctgctggggactggctggtttagggctgcctcctccgggaaggctgtgcagactggcccagacctcttcccagcctcctgtccatggtactccatcccctgcatccagctggcccagcccgttttcagacacagctcggggtggctcttctgagaggggcactgtggtggggcgagtctgccttcccgttgacccagggccgtttctgtcgctggccctaagaaacagctcccgcaccgcgcctgccccctgggactcaggcgtcccgggcacatctgtcctggcacacccagttcctgcctggctgcctggcgagggtctgacgggtagagtgtgcgtggctctcaccacccgcacgtccgtaggggagtacatcaagacctggcggccacgctacttcctcctcaagaatgatggcaccttcattggctacaaggagcggccgcaggatgtggaccaacgtgaggcccccctcaacaacttctctgtggcgcgtaagtatccccttggcctctcgggattcagatttgggggttggctggagccctctttgcccaccaggccccacgatgggggtcccctggagcctccatgtcctgggctggcaagcaacaagcactggctgggtgggggtctctgggccgagtcccgaggctggctgggcaggggtctccgggctgagtcccaaagctgaggctggctaggcaggggtctctggtccgagtcccgaggccgaggctggctgggcaggggtttctgggccgagtcccgaggccgaggctggctgggcaggggtctccgagccgagtcctgaggctggctgggcaggggtctccgagccgagtcctgaggctggctaggcgggggtctctgggctgagtcccgaggctgaggctggctaggcgggggtctctgggccgagtcccaaggctggctgaccctggagcagttccctggtgcccatgctctggaagctggagggtccggacaagtggcagcagagtccagtctcagggtggacagctgccccgggggcccctcctccaaggggggtagatagagcccatcagggcctctccttgggaaaccccttgggtgagggggcaagagtccatgggggtctccagctctgaagcctccatcactcgaggaagagctcgtgcttctccctgcacaggctctcagcctccagaccccatggcagagcctttgcttcccctctgtgaggctgcctccttgcccatggaggggcaggtgcagaaaggccagcgggggaccttggccggagcatcccacagagatgagagacatgtgacactccctgctccgccctgctgtggctttattccttacctgtagcgggggcaggtgcgaccctacccatgtcagacgggaaccctggcatggagacccaggcgccctgctaggtgggaggctggggacatgtgggcctcccagcatggtccccattttctgtgtccctgtcctggagcccagctctgcctgtggcagccagagacacgggttgggcatgcaggtgtgactgagtggctaattagggcccagttgtgggccatctatatgtggcagggctgggtaactgcaggcctctgggatctgtctcaggcaggtctgtggtgcagagcgaggtgcccaccaggggctggccttaggttccatccccatgtgctgcatcggcccctcccctccaagtagctctgccctcctttctttgaggcctgcggtcctccgactcccttgaccttgctggacccccaggttctggtccagggtctaggaggaggttaaacgcagggaatccgtccccaggctggacagggaaggactcccacccttggtgcctgcaggtataaggggaggtggggtcagtctggcaccctggctgctaggtggtctgtggccagcaaaccgtgccctgaagcttctagttgggaggggcagaggccttgccctgcaaagccccaggctgaggggctggggttggggtggggtttaccaggacctggttcctgtaagccgaggtctccttccctgactcttccagcctcaagccagcagtagcagggcagcctgatagagtagggcaccccaggggtgaggggagaccaggaaggcagacacccctgtctcctgacagcctcgtaaccatgcaggagactcactgtgacttgtcccacaccctccccagtgtctcctcagttggggctgggggcttcagggatcagggagaggctgggtaccagcagtgtgcctggtggcacctgggacagggccttgctgggggcgggtgctgtgggtgtgctcgccaggccgaggcattgggaaggaacgaggtggggagctctctggagaggcacacgggtgggtaccagctggaggtgttgcctgagcagctggcaaggctggggccttcagattaggccataggtgagtggcctggagcgcctggccaaggagcagagctgggcaggggccaggggctgtgctgggcctctgtccgggggcttttctctggggaacggttccggggcagtgggctcgagactctggccctggggattgcacattggggcagatcggaccatccaggagcgagtgggaggtgggtgtgccggggcttcacaccggtttccacttttctggcctgtgttgacacaggccaccctccccaccaggctggtcccgagccccctcctggcccccaggcctggaagacagcttccttgctgcctggccaggcccccttgtggttgccagggcctcgatgctggaatgtcagaggccccccactggcccctcagcctcctcctgctttgcacaggctgggccagagcctgccacggagccccagcggctacacactccactcactcacacctctcagggccccgcacgttcccacagccctcagggtgtacgtgctgtaggtgtggctgtgccccaggtatgtgttccccaggtgtgcttgtgccccaggtgtggctgtgccccaggtgttcgtgtgccccagatgtggctaggtgtctagatgtgttctagatgtctgtgtattccagtgtggctgtgtctcaggtgtgcgtgtgccccaggtgtgcgtgtgccccaggtgtggctttgcctccagtgtgtgtgccccagatgtatgtgtgccccaggtgtggctgtgtcccaggtgtgcgtgtgcctcaggtgtgtgtgtgccccaggtgtggctttgcctccagtgtgtgtgccccagatgtatgtgtgccccaggtgtggctgtgccccaggtgtggctgtgccccaggtgtgggtgtactccaggtgtggctgtgccccaggtgtgggtgtgccccaggtgtgggtgtgccccaggtgtgcgtgtgccccaggtatgcatgtgcctcaggtgtgcgtgtgccccaggtgtggctttgcctccagtgtgtgtgccccagatgtgtgtgtgccccagatgtatgtgtgccccagatgtatgtgtgccccagatgtatgtgtgccccaggtgtggctgtgccccaggtgtgcctgtgccccaggtgtgggtgtactccaggtgtggctgtgccccaggtgtgggctgtgctccaggtggctgtatttcccaggtactcagggtgaggttgggaaaaaagcaggacatttctacactaggtgggacaagcaggtttctggggtgcccccctcatgccagccgttctgtgggatctccatacccctcatcctctgaggcctggcgcacggcagggctcagagactgaaggaaggactgtaggagtggacgatggtggggttttgacctgacaccgggccagatgccctgtgtggctgcctcagcctggagtagagtgtctgagctggaacaggggtcctagccccactctgtgaggcgagaaactgaggcttggagagaggaagagatggggcttcccaggacctggtgggtggtatgcaaggggagctggctggtgcggcgggggctgtggtgagggccctgggaggggcagggggatgcacgcagacagaggctctgcctgcccgcagagtgccagctgatgaagacggagcggcctcggcccaacaccttcatcatccgctgcctgcagtggaccactgtcattgaacgcaccttccatgtggagactcctgaggagcggtacgtgggctgtggcggccaggccaggcgcttgggcagccccagggcttaggagggacacggggatggcggggtgctggcacctctgcctgtagccatcctcactccccagtgctcccaggccctcctcagagcccagtttggaaactggcccagtcctgcctatggggtttgggtggggaaactgaggctggagataaaaactggctagggaccgggtgcagtggctcacgtctataatctcggcactttgggaggccgaggtgcgcagatcacttgagaccaggagtttgagactagcctgccaacatggtgaaacccccatctctactaaaaatataaaacagctgggtgtggtggtgcacacctgtaatcccagctacttgggaggctgaggcacaagaatcgcttgaacccgagaggcagaggctgcaggagccgagattttaccactgcactccagccagggcaatagagcaagactccgtctcaaaaaaagaaaaacccagtggagagggccagtcctgcttggggggcggagtcctgctgtgggcctgagtcctgctgtgggcctgagtcctgctgggggttggagtccggttgtggggacagagtcctgctggggggataagcctgggtgtcccccacgtccaagagagcttcgtgaccctgagtgtatgtggccagaccaggtcaagtggtggcctcctcagggccgtctctggggaccccgacagctgtgggaccacgcttgtgaggctggcgggtgggtgaaagacgtggggtggagctcccgatctggtgcaggcctgcagcctcacctgacctcctgcagggaggagtggacaaccgccatccagactgtggccgacggcctcaagaagcaggaggaggaggagatggacttccggtcgggctcacccagtgacaactcaggggctgaagagatggaggtgtccctggccaagcccaagcaccgcgtggtgaggcctgtccccacttctgcctgtgcctggggctgccttggactgtggagggctgggtgggtcatggggtcccagctcggcccaggagacactcagcactccacggcatctccacctaggccggttttccatgtagggcgcagctgcctcccaggtgggtcctcttccccatgtcagaggaaaactggggttgctgagccctgccaggcttgggcagtgttaccccacccttccctgaaccccatgctctgagctggggccgcagccatgtgttctctgtaagcctggactccccgctgagcccagtaggccaccaggtgtgaagtgggcgcctctcctggctctgcctccgactctggggcccctcatgccaccccacgcgtgccgaccagctgggcactgttggcagcgccgcgtgctgaccctggtgcctgcccatagaccatgaacgagtttgagtacctgaagctgctgggcaagggcacttttggcaaggtgatcctggtgaaggagaaggccacaggccgctactacgccatgaagatcctcaagaaggaagtcatcgtggccaaggtggggccggggcagtggggcagggtggagatgagggtgcggggcggcagctcacccagccctgctttacaggacgaggtggcccacacactcaccgagaaccgcgtcctgcagaactccaggcaccccttcctcacagtgagtgggagcccagatggggctgaagggctggggccaggtagcgactcctggggctgtctctaggggacgatgtcctgtcttcttgggcacgtgagggctttacacaccgcggactccgccgctggtgagacaggcctgccctggagggtcaggctgtggaggtgcccagtgtgggctaggggctgtgctcgctgctcctgtgtgcgggcaggtgggtgcggcaggtggccctggtcttccttgcactctgccgaggctccaggaggccccagctccccatgccctgcagccctgcctgccaggcttttgttgaggcccgggctctgtcctgcagaacctgttctggggacttggcccaggaggtatttactgtgaagggggccaggctccagccacttggttagttccaggtcactgtgtttggggacgattctcctgcagatggggcctttgctttaaaagcacggtcgcctgtggtggaaggcgggagggtgggtctcgcctgggagggtgtgtcctccctttgccaaggccctggtgctgggagcactgtcacctgctgaggtcccaactcaccctggaggacctcagcccaggccaccttgctcacctttcaaacactccttggcacctcaggggcttccggggcccagcctgatggtggcgtggcatgaggcagtgtggtgtggggcagtgtggcgtggggcagcgtggcatgggggcagtgtgatgtgggggtgtgtggtgtggggcagtgtgatgtgggagtgtgtggtgtggggcagtgtgatggggtgtgtgatgtggggatgtgtggtgtgaggcagtgtggtatcaggcggcgtggtatcaggcagcgtggtgtcgggcagtgtggtgtggggctacgggcggtgtggtatcaggcgacgtggtatcaagcagcgtggtgtcgggcagcgtggtgcggggctgccgtcctgcctgtggggccgcagttccagctccgcttccttgcaggccctgaagtactctttccagacccacgaccgcctctgcttcgtcatggagtacgccaacgggggcgaggtaggggctggggctgcgggggatggacttcgcggcctgtgggccgcccatggtggggctggtccttcccggagcctcggctactctccatggcaccagacggtgctccctgctgggtgggtggtgtgatgcctgcccaggcagctgcctgctgtggggtgacttgttcctgctgagttagggcttctgagactttccaggcccccgtgccctctggtggctggtcccttccctgtgcaatgccgagacccggtctgagaaaccgcagccctgcaggccatgggggcagaggcccgagccacggctgtgcctcaggttgcgcctcccgcagctgttcttccacctgtcccgggagcgtgtgttctccgaggaccgggcccgcttctatggcgctgagatcgtgtcagccctggactacctgcactcggagaagaacgtggtgtaccgggacctcaaggtgcgctggcgggcaggcagggggcagggccctgggggcctggcggcactgacctgaggcacctttcccctagctggagaacctcatgctggacaaggacgggcacattaagatcacagacttcgggctgtgcaaggaggggatcaaggacggtgccaccatgaagaccttttgtggcacatctgagtacctggccccccgagtgtgcgcctcacctgcgtgcatacgcgttgctgcgtccccgcgtcctgagcacacgcaatgctgtgtcctctnnnnnnnnnnnnnnnnnnnnnnnnnnnnnnnnnnnnnnnnnnnnnnnnnnnnnnnnnnnnnnnnnnnnnnnnnnnnnnnnnnnnnnnnnnnnnnnnnnnnnnnnnnnnnnnnnnnnnnnnnnnnnnnnnnnnnnnnnnnnnnnnnnnnnnnnnnnnnnnnnnnnnnnnnnnnnnnnnnnnnnnnnnnnnnnnnnnnnnnnnnnnnnnnnnnnnnnnnnnnnnnnnnnnnnnnnnnnnnnnnnnnnnnnnnnnnnnnnnnnnnnnnnnnnnnnnnnnnnnnnnnnnnnnnnnnnnnnnnnnnnnnnnnnnnnnnnnnnnnnnnnnnnnnnnnnnnnnnnnnnnnnnnnnnnnnnnnnnnnnnnnnnnnnnnnnnnnnnnnnnnnnnnnnnnnnnnnnnnnnnnnnnnnnnnnnnnnnnnnnnnnnnnnnnnnnnnnnnnnnnnnnnnnnnnnnnnnnnnnnnnnnnnnnnnnnnnnnnnnnnnnnnnnnnnnnnnnnnnnnnnnnnnnnnnnnnnnnnnnnnnnnnnnnnnnnnnnnnnnnnnnnnnnnnnnnnnnnnnnnnnnnnnnnnnnnnnnnnnnnnnnnnnnnnnnnnnnnnnnnnnnnnnnnnnnnnnnnnnnnnnnnnnnnnnnnnnnnnnnnnnnnnnnnnnnnnnnnnnnnnnnnnnnnnnnnnnnnnnnnnnnnnnnnnnnnnnnnnnnnnnnnnnnnnnnnnnnnnnnnnnnnnnnnnnnnnnnnnnnnnnnnnnnnnnnnnnnnnnnnnnnnnnnnnnnnnnnnnnnnnnnnnnnnnnnnnnnnnnnnnnnnnnnnnnnnnnnnnnnnnnnnnnnnnnnnnnnnnnnnnnnnnnnnnnnnnnnnnnnnnnnnnnnnnnnnnnnnnnnnnnnnnnnnnnnnnnnnnnnnnnnnnnnnnnnnnnnnnnnnnnnnnnnnnnnnnnnnnnnnnnnnnnnnnnnnnnnnnnnnnnnnnnnnnnnnnnnnnnnnnnnnnnnnnnnnnnnnnnnnnnnnnnnnnnnnnnnnnnnnnnnnnnnnnnnnnnnnnnnnnnnnnnnnnnnnnnnnnnnnnnnnnnnnnnnnnnnnnnnnnnnnnnnnnnnnnnnnnnnnnnnnnnnnnnnnnnnnnnnnnnnnnnnnnnnnnnnnnnnnnnnnnnnnnnnnnnnnnnnnnnnnnnnnnnnnnnnnnnnnnnnnnnnnnnnnnnnnnnnnnnnnnnnnnnnnnnttcaccccgttcccagcctgcccctcccctgaatgcctgtcctatgccgtgtgcagctggtcgggctgggcagccctgggacccatctgggcacctgtcctcccattaacacagggtgccctggtcctggtccccgttcctgccttgaggcctgccaccctcctgccctgccctccaagggtatggggggcctgggcagcactcaacctctgcccagccttgaccagagaccttgctaattgacaatggacaatgctggtgcccaggccagactctggggtggggcagtgcttgagggggtccttgactgtgggacctgaggggctctctggcagctcctcacgtgtgcacatcaccttatagtcacccttgatcctgggtcattgagagtcctgtctgcagccagatgccagcaggctgtggtcctgtagtccctgagccatggaggcagggtgggctcatcctgtgcaccttgttccacagtctccctctttcccaatttacaagaagaccaataagaaaaataagaaaacaagaaagaaaaaggaaaaataaagtcatcacctcctggtagcagggagggtctctcagagctgggctgcactacctcctgtcgcctcctggggctgctgtgagggcagctttgcgtctcagctgttgagggttgtctccgtgctcctgcacccctcatgtccctccctcccagagctgcctctgtcgggggctggtggcttgctgctctctgacatcagtcctgcctggagaccccttggagatccaggtgctttgagggtcttgagcacacttgagggtgtgctgggagtggggagcgaagctcatgactgtcccgtctgcccacctctgcagctcagcccacccttcaagccccaggtcacatcggagactgacaccaggtattttgatgaggagttcacggcccagatgatcaccatcacaccacctgaccaaggtgaggggccactgcctgcccccgcccactcccttttctctccacactcagagaggcctgcagtgttcagcttttttggcttcagatgttttaaaatctaaatatttaaaaaggttccttttggagagtgccaatgatcagggtgggaggcagtgctctgagggcccaggtccctgtgtcaatctgtggggccctgtctcagtttcctggcagtatggcagcgtgctggccgcgctttaagaggttggcttcctactggagctgtgggtgggtggaggtggcagggaggtggggcacccgggtctgagctgtctacacccacagatgacagcatggagtgtgtggacagcgagcgcaggccccacttcccccagttctcctactcggccagcggcacggcctgaggcggcggtggactgcgctggacgaaagcttggagggatggagaggcggcctcgtgccatgatctgtatttaatggtttttatttctcgggtgcatttgagagaagccacgctgtcctctcgagcccagatggaaagacgtttttgtgctgtgggcagcaccctcccccgcagcggggtagggaagaaaactatcctgcgggttttaatttatttcatccagtttgttctccgggtgtggcctcagccctcagaacaatccgattcacgtagggaaatgttaaggacttctgcagctatgcgcgatgtggcattggggggccgggcaggtcctgcccatgtgtcccctcactctgtcagccagccgccctgggctgtctgtcaccagctatctgtcatctctctggggccctgggcctcagttcaacctggtggcaccagatgcaacctcactatggcatgctggccggcaccctctcctgggggtggcaggcacacagcagccccccagcactaaggccgtgtctctgaggacgtcatcggaggctgggcccctgggatgggaccagggatgggggatgggccagggtttacccagtgggacagaggagcaaggtttaaatttgttattgtgtattatgttgttcaaatgcattttgggggtttttaatctttgtgacaggaaagccctcccccttccccttctgtgtcacagttcttggtgactgtcccaccgggagcctccccctcagatgatctctccacggtagcacttgaccttttcgacgcttaacctttccgctgtcgccccannnnnnnnnnnnnnnnnnnnnnnnnnnnnnnnnnnnnnnnnnnnnnnnnnnnnnnnnnnnnnnnnnnnnnnnnnnnnnnnnnnnnnnnnnnnnnnnnnnnnnnnnnnnnnnnnnnnnnnnnnnnnnnnnnnnnnnnnnnnnnnnnnnnnnnnnnnnnnnnnnnnnnnnnnnnnnnnnnnnnnnnnnnnnnnnnnnnnnnnnnnnnnnnnnnnnnnnnnnnnnnnnnnnnnnnnnnnnnnnnnnnnnnnnnnnnnnnnnnnnnnnnnnnnnnnnnnnnnnnnnnnnnnnnnnnnnnnnnnnnnnnnnnnnnnnnnnnnnnnnnnnnnnnnnnnnnnnnnnnnnnnnnnnnnnnnnnnnnnnnnnnnnnnnnnnnnnnnnnnnnnnnnnnnnnnnnnnnnnnnnnnnnnnnnnnnnnnnnnnnnnnnnnnnnnnnnnnnnnnnnnnnnnnnnnnnnnnnnnnnnnnnnnnnnnnnnnnnnnnnnnnnnnnnnnnnnnnnnnnnnnnnnnnnnnnnnnnnnnnnnnnnnnnnnnnnnnnnnnnnnnnnnnnnnnnnnnnnnnnnnnnnnnnnnnnnnnnnnnnnnnnnnnnnnnnnnnnnnnnnnnnnnnnnnnnnnnnnnnnnnnnnnnnnnnnnnnnnnnnnnnnnnnnnnnnnnnnnnnnnnnnnnnnnnnnnnnnnnnnnnnnnnnnnnnnnnnnnnnnnnnnnnnnnnnnnnnnnnnnnnnnnnnnnnnnnnnnnnnnnnnnnnnnnnnnnnnnnnnnnnnnnnnnnnnnnnnnnnnnnnnnnnnnnnnncgccactgtggtggattttcttaaacattcaactttagtatttttattcttataatatgaaaccttccctccaaattcttcaataaaagttgcttttcaa

SEQ ID NO: 61 - DNA, 20982 bp, Mus musculus
caagcctcacccatctgagtccacagcaaggtcttggctgactgagtcctacccctgaatctgccccctctgggtgtccaggtgtgctcccgtcctccctgtcacctggggagtccttatcagttgctgtggcaggcagtactgggttggatgagccctcaatagccttctttcttgtgttggctggcctttaggacaccggtgaccggtctctcccggctcccaagatggggacagttgggcctcttgagagtcaaactgattcacttcccacgctggcctccctccttggggtctggagagctaggcagggaagggccaggtcccacaaaccgggaaacccagaccagagctggagctctggatctgcggcggggctccgttacccgcgtggccctggctcggggccacccgagggcggcgcctgcggggccgcgctcgcgctcacggggtgcctcgccctggccgcgggccgcgccgggggcgcccggggcggcggaggcggatgtgggcgggcggcgcgggcgcggggcggggagaaggcgggccggcggcggcggcggcagcaccgagtcggcgggcggccggcccagcgcggcagcgcacgcgagtccgggaccagcggagcggaccgagcagcgtcctgtggccggcaccgcggcggcccagatccggccagcagcgcgcgcccggacgccgctgccttcagccggccccgcccagcgcccgcccgcgggatgcggagcggcgggcgcccgaggccgcggcccggctaggcccagtcgcccgcacgcggcggcccggtgagtgcccgcgccgcgccctgttccgggccgcggccaccccgctttgttcccggccgcgccgcgcctcggagtaggagcaggaagtggccgagcggaggcctgggcggggagcgcgcggggccgggctggtcgcgcaggaggcccacgccggcgagggtgcgggcggccgctgcgtgaccttgggtggccgctccacggggccaggtcgcgggagaggggcgctgttggtgtgcgcagtgggggccggtgcgccctggggcctggggctgcccgggcactcggccagcgagggtaggagaaaggctcgccccgcggcctgcgtgcggtgggagggccctgggaaggagaactcatttcccacggacagaaagttgtgcgcggtggcacagtgcccaggctagcccacaaaggactgctaaccctcctgggcccggaagctgcttcctggactaggtggtttctggaggtgccggggggggggggggccttgaggacggcgtggactcggtctcccggatccgggatactggctgagctgatggaattgtctaaagaggactggtttctaagttgggcggtggtggaaccttgggcctctgctgtgtggccaaactcctccttcccccaggcccctggtcttgctccaggtggctagccttgactgcctagagccatcactaaagtgaagggcgagtcgccttggtggggccccagctgggcgtgtggctcacgggccagtgtcccagaggggctgaactcttaagacttaacaatagcaaccatatgcccttacggcatggcatggtgggaagagtgtcccatgcttaagtcggcttgatgtggacattggcgttaacatggctgtgtttcttcactccgtgtgtatgaatttatttttacacggctctggacagctgactgtcatcagcagaccttggggctgggtgggggtaggggacatccaccgagagagatcttgcagtacagccctctgcctccaggccacacccactctgacagtcactgagctgggatttcttcttggcttatctttttcgttctggcttttagtcgccacctgcttgctgagggaagggctctttccttcttgggccaggtgtggtctttcctactttggcatttggcatttgacacatagcagccggcctcccttttgttccacatttagcttcatacaaggcaaagtgacagagactctgggtgccagcttgtgtcttctgggctagagagatgacatagggggttgccagtcagctgtagtagaccctagttgggatctattccacggcggccttccagtcttttcctggggattgtccacatgaactccaggtggagggacaacacaggcttgctggtcaagggctgttcaggtgcactttcccagaatgtccagacttggggatatttgaaggatacctaggtgtccctctggaagagaagcaattggggggcggggggatctttgcgaggtgagctggcaccctttgctttgcacaggctagctagttggccgctgcaggacccttgtgtgttacctgccctgtttgtgggctcccggatactgtaattgtgggtcgtaaccactgctttgggtgttcccagcaggctgtctcagagtctctctgtctcaggcgtagggtgaaggctcgacagaaccatatgtgcctagtgtgtactcaccaagtgaaggggacagcttcacaggcagggtgctgtgttcccaaggggtctggggttctgcctgaggagtttttagtgttgtcctgaaggactttgggctcagcttcataccgtgcctgttctacttgtgctctccagtgttggccttcccgcgttcctaacgtgagccgtagggaccctgcgacctgcagtaggcctcccagactgtagggggtggtgagacagtggtaagcacccctcactagtgcgaggcagagcagaagcagtcagggctgcctggaggaggtggcctaatctgctggggtagcaaattgaacaagctgcctaacaggaaaagccttctggaaatgaatgtttctagcagagaccaggatgatgggggttggccacagccttgcaccccggactaccaggcctagatctgggtgtgtagcatctactactggagggaggtcttctatagcaacctttggagacacgtcaggcaggctggcagggagtaagggtgaggagggaacctgggaaccagagatgggtagatcacatgaggggacatgggtaattgtgggccctctggggctcacggaagctagtcccaagtgggaccttgtctcacgtgctttctcggcttcttctagacgctgcggccaggccggctgggctcagcctaccgagaagagactctgagcatcatccctgggttacccctgtctctgggggccacggataccatgaacgacgtagccattgtgaaggagggctggctgcacaaacgaggtaagtccgcactccacaggagaagcaggccggcctgggtctgcctagctcttcaatgtggaaccggggcgggggtggtggtggtggtggtggggtctttactgacccagcaggccctatcagaaagtgcttgctgtgtctaggcctagcagacagaaggggcacctccccatcatggggctctaggcctgcttcaggagtatgcaggcccagcttttcccatagtatggaggtcacggcctcctcctggggcctcttggccagaggctgaggccctgtgcggggcctgccatgagtggcttgggggtggggccagctgcagcagcctcacgcctggctttcctggaaggcagcaaggacgtggctgctgttccagggctggcagacgagtagcctgggcactgcccaagggctcctgagggcaggcagggcagggcagggcagggttgctcggctgggccctttgcccacctcaggcccggattcctgaagtcagggggctcagaactgaaaagctgactgagatggactcttcccaggcctggggcccctcacctccagccaacccgccattcttcctccagcctgccaggagtaagtttcaaagccagttcccccaggatagtcacttgctcttgccccagggcaggcatctcacccccttctgacttcctcttcctgtagacctgttccctccggaagccctagggtgatccttgccagtcccagcctctcctcccactctccttcctggctctctagagaggggattgtacttttgggtgtcaggagaaggactcagatagagaagatgggaggtggggaccgaagttggtgttaggacatggggctttattagagtatctacagctctggcagaactggggggtgggagggtggtgcacaggagctacgggaagttggggaggatggttgggacccaggagggctcacgcaggggtggaagatgtggtcagatgtgttgagaggtcccaatctggcggctgcagggcagattctgtgctgggctttgccaggaggctgtgacctttggctcctgcccccacctgacttcccatttgttctccagggcatccttccctggcccactaggagtcctgcctcctaagctcacattcctgggtcatgccctgctgtctgcctctttggctcctccttctccccaaccctaggccatacacagtctacacagtctatttcatgggcacgtgtgtattgtatggctgtcagagttagggccaacctcgagattgctgggcctctctccccaggtaggaacccttctgaggcctagggagtgtcatattgctccttatgactgagctttctcaaggggccaggtggcacaggacattaggtcctatggacacgctgaggctgtgcttgaacctgatttggcagtgctgtcattgtccctcttcaggagaagaaggtcattgagttctttaggccttgattttccccgtgcatgccctggaaatggtggtgggttaaagacgtgagagcatgcgttagctgtgggatggcaagggggcacaacgcctgcctgtctgccccgtggaactgacaggactgcctctctttggggtggggggtcttcccagcctcaggccagagagatgtgctgtcctcatggtccttcatcctcccccagccccagccccagcctaggtagtaggggctctgctgcgcgcaatggcatctatgccacattcctggactgggtcctcctattctgccttgctctggcccagccaagacccaggcttggcctgctgctgcttgcctaggtcttggtggtcctcgtttctcccttgaacacaacgagccctgtgtgcatcactagtttggggttccagccctctccctgtcttggattgccatgttagacttctaacctgaggccattatgacttggctggggtaggcagggagggaaggttattgcagttgacccttagtgacccatgatccttcagacacctgggtatcccttatgtccctccctctgttgcttttgtaggttatagccccgcagactgggaacagaacccatctttgctaggtctcccatgtccagccaggggcttggagcacattggttctcggctcctccccaagctcccgtgggccgaccgtgccttcagggctatttgggcaaagaagagaggatgttcctcactccatggctacagagaccccaggtccaggtttctcctcctccctgggagttaggtgcctacttctcaggaagtgttccccaagccacttcctaggagctctgtttgtgctctgggccagagggtgcccagtacaggagcagacattctagttgtgcattgatctgtggctgggcgttagcttccctatgcatccaacaacatagacccgtgggagactgggcttgagctcctagagatgagaggtggctggtctgatgaacctcagtgctggtctccagatgcagaggtttggggtcgatgaaccatgtcttcttaacagccagcctggggttaagttgcaggtgtggctgaacttgtccgtgacctctgatttcagcctgcaggttgcaaatgagctgtgtactgaggccacaggcccatctgtgctaatcttttgggttcttccctcaaatctctgacgtttgccgggctgtatgcgtgagagctgccctggtagagactggagccagggagccttctcaccttcttggccaggttagccattgtctgtgtctgtgtcttcccagctcccagcaggtggctagacctgagacatggaaaggtctgagaacgaagggctatgtgtttaagagtaggtggcacatgacaattgtagggccacctcgtgcagggccacctcgtgcagggccactttgtgcagggccacctcgtgcagggccaccttgtgtggggccacgtcatgggctcactcagcagacttagttgagagacccagcaggctaggagaaaccaagctattctcactgggttagtgcctggcaggtggacgcagtttggacaaggatggagggaaactggcatgtagtatggggctctctggctttgggtgtggatctgtttgtgctgagctcatggtctctgggcagagtcaagggtcccgaacccagtgggcaagtcaacatctagggaccggagtagtgccatgcttggggactgatcctgagggagaggtaagcatgtggcattcctggagacctggacagagatggcagctgaatgctctgggcccattcatggaggggacagtacactgcggtgtgtggctgccgctgagccttggctggtgctgggactgagtttcctgttttgtgagcgtgttgagttctcccttaaaaacaaacaacaaaagaggaagctgggcggccttccactggggtgtgggggtcagtccggcccggcctggtgactccccagagtgggcagcagtcctctcggcttcctgacgaccatcttctagacagagttgcccagtggggctgagccacttggaggtcaccaggaggtgaggaaaagtgtggggacataagactccactgaactgctgggtctggggcagcctcttggtcctgccagctctgcagggtagccaagtgcactgaaaccaggaagggggtggggtgctgtgtggatggccagaaccagggcctactgtcgctgctaggagtagcttgagggcttgcatcaggctgattcctagaagtgccatggggtagtggggagaactgttctgtcctctggcaatcctctctgcccagtcacacccgagccaggcccagagccagctccaacccttaggccctccctgtaacagtagctgtggctgtcccagccatcccaccatggctggtgatctacccacacccagcacttccccagaagagtctgcctagccaagacctagactctagcccacgctggtgggcagagcagccaggagccccgtagtaccggtggcctgtctgcaggtagctgcgtgcctcactatcttttgcctctgagtggcttttgtgtcggttccccctcccccagcccccgcccctcacccccatttagttgttttttgagatagggtcttactttgtagcccagattgtcctgaactcaagcgagttcccttcctcggccttttcagtgctggggatatacgtggtgccactatgcctggcctcctggtatgattttgctttgttggtttgtttgggctcttggcataggacttcggaggtggtagacattgttctagagaaggcttccctgcccttggcccagggtctggctggcccatgtaggctctggtatctgtagggtgaaggcacatcctttctgctctgtctgggcctcctttgaaaatgtagtgtatggggtgtgtgtgtgtgtgtgtgtgtacacatgtgtgcgcgtgtgtgtgcgtgtgtgtatggtgtgtgtgtgtgtgtacatgtgtacatgtgtgtgtgtgtacgcacgcacccaggggagggggaaacgctcatgtgctgtagccagcatgcatatgttccttggacaacctgtgagttggttttcttttaccatgtggatcccagggatcaaacatgggtcgtcaggcctgagggcagtgcctttaccctctaagccatctttcaggacgctctctgggccccctgggctgtgccacagtgaggtggagagggaggatgggtaaggggagggcacagcttttgggactcagcacaggaatgttgtggggtctgtgagctgccgtgtgtctggggaagtaggacggatgagaggggttgggctggtgtagggaggctaaaagccagcataggatggtggccctgtggcttgccccaaaactgtgggactaaggtgaacaggatgatctgaatggtacgggagacttgggggtgcgtggtgtgtatggcagagtggggctgtgggccggccttcctttctggtacggggagggtggggactgctgtggaggggtaggcaagtgtaagatgtgggtgggtagggtaaagtctggaccagtactccctgtggctcaggaagctggactggaggtggcagtggagaggtgtgccacccactgtgggttccaggaacctgagagaccttgggacgcattgcagtcgcgtggttgctatatcttggctcttctcagctgaggcctgcctgtgcagtttgtgtcctggctgtccctcagctctggttatttcctgcctctctgtgaccgctagggtccccttttctaagcctcggtttctccaggaagctggtggctccagtgcgtcctacttcttgctaggtgagattttttacatttgtgggttatggcaaaaaacacacccaggcccagtggagtgccactggccattggtaccccaccctgtgagacccacatgagcacccctctcagacgggctgcacctgggctgtaccctggaacaccagacctggggtttcacctgctatggacagcacacccctccactccctgcctttgcccagcgcttggtcattgagtcttttggggtcaagtgacatgggtcctaggatctgcaaaggggcctgggaggctggcctcagagatgaccttgccacctgctgaccacccactgcccagaaggcagccagagctgggctaatggccccaatgggctgccatcagcaaaccgcttgctcaatgtgctggagaaggtaaatggccgcccggcagctgtcggtgcgatggatgtgttggtggtaggggacgtttggtcgctgctgtcagctggcgcctgctccccaggcctgctggggctcactttgctgtggagaaacagctcggtgccgcctggcgccttgccagctgccgcctgccaccgccactgctactgcggcaaagtgtttatccagcagtttccccaagaatcggggacttggagagaatgttcacagtgatcaggacacaggccaggccagtgtgagaggacaccggtcgagcctgagtctcgagtgctaggattaaaggtgtgtcctgcctccctctttcctagtgtggtgacttaggtacagggggtcctggtacagggactcggaggctcacccacacagatgctggaaggcctagaccttgaggcaccagtgagtagcacctctgggtacctttcccctaggattggacagaatctggtcctggaggtggaggtgggcctgagggagccccgaagttgttggggagtccttgcctcttcctaggtgctggtcttggtgctagaaggtggaacaggtccttgggtggagtgggtcctggctgtcctctctgcatagcagctgtgacgcctcctgaatgggcttgcacatgtggatggtggagagctgggtttactgtggtgtgaggccgggcttagtcctgggtgtcttctgttctgctgttttttatttcttgtcgagaagctgttgtcaggcttctgccctcaagagccacgggaactgcattgtggaggtggcgcctggtcatttgtcatctgttcatgtgtttgttaacacgggcctggtaaggcacctgcaggtggaggagcctgcacatcttgtggaccgtgtgcacctgaatccccagggctgtgtagccaggtggagggccctggctgctgccatgctgcccagctggactcccctgagttcagggtatcaagcatccagatgggtcaagggagccaagaagatcccagatgggccagagcctagcacttctacagaggccagaatggctcaggctcagtcactccttgctggactatgaaggacttgagggagacctgccaatgtttgtattcccaaaagagacccccccccgccccccgcccctcccccccccccccccccgccagcagggtaggcaggagtactcctagataccatagagccccagaggaccaggacagccgcctcttgtatttgtctatcatattggcccgtttctgcagtagaatgaggtttggggtctgtctggtctgaacttattaacatgcaggccacagcccaggctgcagctggctcagccggtacccccagtgaccaattggctagaccttgaggcaggatttaaagaaagagatctgtgtgtgtctgtcagagctgtggccccccctttactgtgaaagggaaagtcctcatgaggccacttcactttacagttctccttggccatgtggcctttgtgtgctttgtgtggccagggaggggaagggcacctaggccctctgtgtgtatgtggggctgggtccttaccttgtcctctgcctggtgagtgccccctgtctgtaactccgggtctacattctggaatctgccaggcctgggggctggtcatgtaggcttagagcccataggagattcagggtcatgctggtggtttatgtgtcggggccagagctggggtctgcactgggcacagtgggatgggcagcagttggcaaatcaagatggatttctggggcgcgggtgcgctgctcatcagcctccgtattcagttagtgtcccggggagcagcagctggtgagatgggagggtactccatcaggggccgacagctccagactggtgctggcgggtgggcacacacggcgggtggcccgggaaggaacaggatggggggtgggctgtgtaccccccagtgctctgctgtattactcagagcccctgcctaccacggcaccctctaggccctgtgccaggggaggggctgtcacagggctgctgggtgtgtgaatacctgcaggtgtgtgccacctggtcagaagcagggctggtgcccaaaggggtggctgtgctggagagctgggcttctgggagctaaagatgggaggtgggttgggtttacaggtgctctagaggttgcatgcgggctgtaggcccttgaagagaatcagaattaacttgcctatgccctggaggagccccggccacatctgggcacttgccaagaatccggagggctttcttgctttgctttccattgtggggccagggtctgcatcggtttgtcagacctaggtggtctgcagcgatgacaagaagacgggatccctcgctcttggagctgctcgcccctggggtgggagtcttggcctggtagtggttctattcacgtcttcccccggcctcgccaacagcctccctccatcacttcagttccctctcatcccactttgtgcagggtgtagggtcatgcagagcaaggctgctgtttggaaaggactcccaggcattggaaggggctagatggtgggaggtagattgtgggtagagccctgcagcttgctgcccagagcccctgcaggtcctgagagcatggacaggtccaagcggatacactatcctgagcagactgtatctcacctgcgaaagtgttctctgggaatacctggatttggtacacaccaccgttagaggttaaagaaggaaagctggccagcccccctggggctatggactgagactggggcaccgccttatgcccaagatcacggtgcttgacctagtgactgggtctgtgcccaggagcacccagtggtagggggtctagacaagcagtcactcatcacacatccctcaggtgaccttgtttagggcccagtggcgcaggcaggctttatcctagacagagctaagggaccccagccctgtaggttgcccctcctattctcaacctagtgtcccctcagatgaagaagttgcctaattagttagttccctgttgttcagactccttgttcggcaaaatgtaaattaaacattttttccgggtgtcagtatgaaaaatgacagtcgctgggagatcacagaggacatctgctccgattcctgagtgtggtgcctgcgtatggctgatgttgcaaaactggagggaacagtgttcctgtgtacctgggtgaccggggtgggactcagctgggcgtagcgcccctgttccagcggtggcacctcctgggtctgctgtgcaggcagagccctagatgatgctcccagctgcaggcactgccagttgtgccctggcgctagtgcttgctgggaaggcggaagtgtcccaggtcccttcttccccacctcacactgtactctccctggatcttatgtgcctgggtcctcacagtggagttcccatgcagctccttatgtctcctatcccctgcaggggaatatattaaaacctggcggccacgctacttcctcctcaagaacgatggcacctttattggctacaaggaacggcctcaggatgtggatcagcgagagtccccactcaacaacttctcagtggcacgtaagtgtcttagccatgcgggttggatggggtggctaggcaggccagcagggaggctgaaactgcccactgagaaacccgaggagagcctcctgttagtcctagggtactgggcagtactggccctgagtcacctcctctaggactggtgagtggccagctctggcagggtcagggagtccttgctagatggcggacgggtccagcatgtagtgactgaacctggtctagggggtgggttgaccagggtccctgtggattaaacagccactcaagggcattccttgggaactctagggtagacagcgggaggagaggctcccggctctaggagtgaatgacatcccaaggaccgtctctgtgattctccctgggaaggtggccatcggaagccctttgccctatgggtcttgtggttcctgttgccggagggtcagtgggagtcagccctgtccaggactggtgagggtgacagactgagagcttggggctgagatgcagtatctttgatctctgtgccacattgtcacagcccagttttatttggagctggacaagaataggtttgacagtgttaagcgacagcagtaagcccgggcggttactaactgtggactctggggtcctccttgggctgcagtctggagtgtagagtatgtgcctagcatagctgggtctccatttatcctcacagccttcttgagatgctcctgccctgcaggtagctctgtctgacctgcctcagatcctagggccttccatctctgggcacttggccagtccccaggtcttagggcttaacacaggttgctgcctctacagatggataggaaaggactcccagcttacttatgcaggaggaaggaaaggggcctctctagagcagacacataggtatatgcactggccaagggccgctgggcagtgggcagggcttggccttcaagcaggtcttgggcctcaggaggtagacagtttacgcctagctggggacaaagcagggtggggctgtgttcaggctttttatctgaggtgggttctggagggaggggttaagacccccatttggtgctagttttcatctgcttgcctgacaggctgtctcagatgtgctggagacaaggctcagggtgattttccacccctcccccaccccatgttgacataggcctttcccaaggctgggcctcaagcccctcttggccccttgcttggcaggctgccccttgctcattcattggagcctggaggcccctcacattgccaggacccagacgatggaatgtgggaggcccctcagtccctcctgcctgctttgccgtgaagccctcttgctgcatacatatcctcagggcctgggctgctcccatgatccacccttaaaggtgtgcatattctaggtgtggccaccaggtgttcatgctctgggcatccttgttctgtgtgtgctcccagtgtgaggcttgggtgctgagtacatgtgtgacttttccagagactctgtatgttgttgggaaaacagcaagatacttctgtaccggaagggggtgtgggctggatccctgaggcccccacatgaggtagggatcagcagttgaaggacagaggaacttcaggatagttatggtgtagggctaactgatctagcctgactggttccttcaccttcagagcagagcatctcagctgtggcaggtcttgggtctcagttctttgagaggaactagggcaaggagaggggatggagcagggtgtggtggctcatgctgtattcctggcactcaggaggctgaggcatgattacctcaagttcaagaccagtgtagactacatagtgagttctaggtcagtctgaattacataggaagaaaacagaaatgctagcggtggtggctagaacctgtaaaatcagcacttgagaggcagaggcaggaggatcgccatagtttgagacttccagtctacgtggagttttccagagctgcacagcaaaagaccctatatcaaacaaacaaaaagctttaaaactttaaaactttttacattttattgttttgtgtgtaaagaagggtgtttgtttattttatgtgtggatctggtgctcttagagacaggaagagggcatcagatctctggagttacagatggttgtgagttgccatatgggtgctaggaattgaacctctagtcttctggaagagcagttgtacttctaatcaatgagccatccatcgctccagcccctgaaatcaatgtgtgtgtttgcttgcttttcgagacagggtttctctgtgtagccctggctgtcctggaactcactctgtagaccaggctggcctcaaagtcacagagatccacctgtgctaggattaaaggtgttcaccaccacacctggcaaatacacttttaaagtgaggatgagattcaccttcctgggacagggttgaggtctgtctggtgaggactacgagggggagtttcacggagaaacagatagatgcttccccgacttctttagaatgccagctgatgaagacagagcggccaaggcccaacacctttatcatccgctgcctgcagtggaccacagtcattgagcgcaccttccatgtggaaacgcctgaggagcggtgagtgggcagggtatggttgctcgagagcctgaggcctctgctgagtccattctggagaactagactggagcacttgtgggatgagtggggcataatgggagaaatatcagcatcccaggtaccttgatgctcctgatactcttgagtgtatggaggcccaggatctgagtggtggcctgcagcttcaggaccagggagccaggcagctggttggtggaagccatgcaacagcgcccccaggtgcctgaggcctcacttgacccgctgcagggaagaatgggccaccgccattcagactgtggcagatggactcaagaggcaggaagaagagacgatggacttccgatcaggctcacccagtgacaactcaggggctgaagagatggaggtgtccctggccaagcccaagcaccgtgtggtgagtctgggctctgcttctgctggggctgccaggggttgtggagggacctggtaggtcctggtattcctgcctggcttcctgtatgggtctgggtacccctggctcctctggacatgggctgaggacacctcagttggcagagtgcttgtccagcgtgcatgagacatgagaccccagtacttaaaagtaagtaatatgaagatgcccgctgactcccaaggcccagcgctctgactagactgtgcagagcccttcactgactgcacaggccagcacatgtgagaatgggcctggcttgtggccagctctcttgctgttggctaacttggaggaagcttgctcactctggacactgtcaagccgaaggcggtggcatatggtttattaccataggctagttgtggtgagcaaaggctctctctaaccgggctctgtctactgcccacagaccatgaacgagtttgagtacctgaagctactgggcaagggcacctttgggaaggtgattctggtgaaagagaaggccacaggccgctactatgccatgaagatcctcaagaaggaggtcatcgtcgccaaggtgcagggagggcaggcttggagggaggctgagaggagtgggatgcaggggagataggtgctcacttggttctgcattccaggatgaggttgcccacacgcttactgagaaccgtgtcctgcagaactctaggcatcccttccttacggtaagcagtggccatcagtctggcccctgtgggatagggaagagtgggccagagtgggtcactcccacactgttgcctttgcacccatacacggacgggcaagggcttcatgggcatcaggtaggctgatggagggcggggctgcagtcatgccccagctgtagtgtgcaggaggcaggagtgagactcgtcttctcactctgctgagaccttgagttgccccagctctccatccctgcagtcctctcagacccgtcttctaggctggtccctcagggttgattgttagtgaagctcagttacagtagcttgattgagttccagagtcagcatcttgggcttattccacccgtggtccatgatggaaaggtgccggggtggctcagtgcaccagttcataagctgttgtgtcaacctccccatctggaggctcttgggaaccccagaacttggtatagttaacttctaagccatcttgccctgcagttgaacctagacctcgtgtctctcatcttaaaatctaccagttggcatgtggcctgcatctgtagcccctgctgagttctaggccagcctgggctacggtgatacccaagatgtgccctgatccatcttggggtggcagtgtcactgtgcttaggcttgccctgcttccattccaggccctcaagtactcattccagacccacgaccgcctctgctttgtcatggagtatgccaacgggggcgaggtagggccacaggcagcttcagacctgggcacttgatgggtgaacttgtccctctgagagctttgaaccctctctgtagtacagatcactggtgctgccagccctggccatgtgagcctgtagctgctcgtttggggatgtcttatttctgctgagttggagtctcgcagtctccagttctctttgggggctagttcctaaccttccctctgcctgtgggtaagggttggcgggccctcacacaggccttcctcagcgcgctccaccccacagctcttcttccacctgtctcgagagcgtgtgttctccgaggaccgggcccgcttctatggtgcggagattgtgtctgccctggactacttgcactccgagaagaacgtggtgtaccgggacctgaaggtgtgcttatggagcagggcgggtgggggctggggggtctggcctcactgactgagcgccttcccacacagctggagaacctcatgctggacaaggacgggcacatcaagataacggacttcgggctgtgcaaggaggggatcaaggacggtgccactatgaagacattctgcggaacgccggagtacctggcccctgaggtgctctgccacttcctgtgtgttcccttacatcctcccacgccccgacacaacgctgacagagtcccccatctaggtgctggaggacaacgactacggccgtgcagtggactggtgggggctgggcgtggtcatgtacgagatgatgtgtggccgcctgcccttctacaaccaggaccacgagaagctgttcgagctgatcctcatggaggagatccgcttcccgcgcacactcggccctgaggccaagtccctgctctccgggctgctcaagaaggaccctacacagaggtaagggctgccggggcttcaggctcagcctctagacagtgctgctgcccactgtacccgccacagtctcagtcacatgtcgggtggggtggtcaggcagctaggggtatccctaccctgcgagtatccccgtgacctgtcaccttgcacgcagtgtctgagccctggacctgtctcctacccacaggctcggtgggggctccgaggatgccaaggagatcatgcagcaccggttctttgccaacatcgtgtggcaggatgtgtatgagaagaaggtgtgcatctggccactgtgcccatctctggatcacatacgtgtgtgcatacatataaacactctcactctggccactgtgcccatctctggatcacatgtgtgcacacatgcaaacactcctgtttttgctggctcagacacgcatgctgggcccacagccttgtgtagtcacatgcccccacagagccacagggttgtgcacagccttctcgctcgcacagaagagggtagtatgctgccctgcatacctcgcacagtcacctggcctctccaggccctcaattgtgcccctgttgcctacacctgttgcttgctcctgtcctttgcctggagatcgcctcatgtgccctatgatgaaagctagccgagggtggggggtaatgtctaggtgtctccaactctagggcgagcctaatcccattctgggacggcccctgcccgtctggcacagtgtaggccactgcagagagcagagccccttgtactcacccctaagtgtgattctcttcagctcctaagtacccctggcccaggctgatgagggacacagcaggtggtctcaacactctaccttgatgtgttgggtgccctgttaccccctgccttgagtgtaccttctagataacacggggccagcagcatgtgggggtgtggatggcatgcctttcctgcccacactcaactagagatcccatgaagtccgcattgccctcacaccagatttgggagggatggcaattgagggtccttgcctgtgagacccaaaaggatgttagcagcctccagtgcatacaccactctgcagcttatcttcttcatgggctgtcagtgaggcaggcgagctcacctgaagactgctttgagtcctgccacagctgtggtggtgccactgtgtgcctttagtcccagcacctgggaggcaggagcaggtggatctctgagtttgaggccagcctggtttacagaggtagttcctagggctacacagaaccccagtttcaaaaaatggaaagggaagaaaaaaaaaaaaactcagaagggaaatgacaaccagagaacggagttcccactgcctggaggtgggcagtcactaccctctcgtcactttgggcatctctgggcttgctctcccctgcctacactgccctacccagttccatctcctagagctgttccctagtgctagtgcccacccgataaggtcagtattgcccagagaggatggagggattggaacccagtagtaaccaggccttctgttgctcctcagctgagcccacctttcaagccccaggtcacctctgagactgacaccaggtatttcgatgaggagttcacagctcagatgatcaccatcacgccgcctgatcaaggtgaggccaccccactccatggcccctcagtgtctggcttgcactcctgctttttttgggggggaactggagttaacaggtggttgtgagtagccacgtgggcactggaactgaacccgggtcctctaccagagcagccagtgctcttaaccactaagctctctctcagccccaaaactaaaagaatcaaacaaaccctttggagggtggtagcagcttggcggggagggagggagtgttctgagggccagagtcactgccccctcacagggcccccttgtatcctctggcatgtgtcaggtgggcgggctgtttctagagatggtctgagccctcctgtggcccacagatgacagcatggagtgtgtggacagtgagcggaggccgcacttcccccagttctcctactcagccagtggcacagcctgaggcctggggcagcggctggcagctccacgctcctctgcattgccgagtccagaagccccgcatggatcatctgaacctgatgttttgtttctcggatgcgctggggaggaaccttgccagcctccaggaccaggggaggatgtttctactgtgggcagcagcctacctcccagccaggtcaggaggaaaactatcctggggtttttcttaatttatttcatccagtttgagaccacacatgtggcctcagtgcccagaacaattagattcatgtagaaaactattaaggactgacgcgaccatgtgcaatgtgggctcatgggtctgggtgggtcccgtcactgcccccattggcctgtccaccctggccgccacctgtctctagggtccagggccaaagtccagcaagaaggcaccagaagcacccccctgtggtatgctaactggccctctccctctgggcggggagaggtcacagctgcttcagccctagggctggatgggatggccagggctcaagtgaggttgacagaggaacaagaatccagtttgttgctgtgtcccatgctgttcagagacatttaggggattttaatcttggtgacaggagagcccctgccctcccgcacccgctcccgcgtggtggctcttagcgggtaccctgggagcgcctgcctcacgtgagcccttctcctagcacttgtccttttagatgctttccctctcccgctgtccgtcaccctggcctgtcccctcccggccagacgctggccattgctgcaccatgtcgttttttacaacattcagcttcagcatttttactattataataagaaactgtccctccaaattcaataaaaattgcttttcaagcttg

SEQ ID NO: 62 - DNA, 1754 bp, Homo sapiens
atgcataaatgtacacagaaacaggtggggtcaagcagggagagagaactggccagggtataaaaagggcccacaagagaccggctctaggatcccaaggcccaactccccgaaccactcagggtcctgtggacagctcacctagtggcaatggctccaggtaagcgcccctaaaatccctttgggcacaacgtgtcctgaggggagaggcagcgccctgtagatgggacgggggcactaaccctcaggtttggggcttatgaatgtgagtatcgccatctaaggccagatatttggccaatctctgaatgttcctggtctctggagggatggagagagagaaaaaaaacaaacagctcctggagcagggagagcgctggcctcttcctctccggctccctccattgccctccggtttctccccaggctcccggacgtccctgctcctggcttttgccctgctctgcctgccctggcttcaagaggctggtgccgtccaaaccgttcccttatccaggctttttgaccacgctatgctccaagcccatcgcgcgcaccagctggccattgacacctaccaggagtttgtaagttcttggggaatgggtgcgggtcaggggtggcaagaaggggtgactttcccccactggggaagtaatgggaggagactaaggagctcagggttgttttctgaagcgaaaatgcaggcagatgagcataggctgagccaggttcccagaaaagcaacaatgggagctggtctccagcatagaaaccagcagtccttcttggtggggggtccttctcctaggaagaaacctatatcccaaaggaccagaagtattcattcctgcatgactcccagacctccttctgcttctcagactctattccgacaccctccaacatggaggaaacgcaacagaaatccgtgagtggatgccgtctcccctaggcggggatgggggagacctgtggtcagggctcccgggcagcacagccactgccggtccttcccctgcagaatctagagctgctccgcatctccctgctgctcatcgagtcgtggctggagcccgtgcggttcctcaggagtatgttcgccaacaacctggtgtatgacacctcggacagcgatgactatcacctcctaaaggacctagaggaaggcatccaaacgctgatgggggtgagggtggcgccaggggtcaccaatcctggaaccccactggcttcgagggctgggggagagaaatactgctgccctctttttagcagtaaggcgctgacccaagagaactcaccttattcttcatttcgcctggtgaatcctccaggcctttctctacaccctgaaggggagggaggaaaatggataaatgagagagggagggaacagtgcccaagcgcttggcctctccttctcttccttcactttgcagaggctggaagacggcagccgccggactgggcagatcctcaagcagacctacagcaagtttgacacaaactcgcacaaccatgacgcactgctcaagaactacgggctgctctactgcttcaggaaggacatggacaaggtcgagacattcctgcgcatggtgcagtgccgctctgtggagggcagctgtggcttctaggtgcccgagtagcatcctgtgacccctccccagtgcctctcctggccctgaaggtgccactccagtgcccaccagccttgtcctaataaaattaagttgtatcatttcatctga

SEQ ID NO: 63 - DNA, 1600 bp, Pan troglodytes
atggctccaggtaagtgcccctaaaatccctttgggcacaacgtgtcctgaggggagaggcggcgccctgtagatgggacgggggcactaaccctcaggtttggggcttatgaatgtgaatatcgccatctaaggccagatatttggccaatctctgaatgttcctggtctctggagggatggagagagagaaaaaaacaaacagctcctggagcagggagagcgctggcctcttcctctctggctccctccattgccctccggtttctccccaggctcccggacatccctgctcctggcctttgccctgctctgcctgccctggcttcaagaggctggtgccgtccaaaccgttccgttatccaggctttttgaccacgctatgctccaagcccatcgcgcgcaccagctggccattgacacctaccaggagtttgtaagttcttggggaatgggtgggggtcaggggtggcaagaaggggtgactttcccccactggggaagtaatgggaggagactaaggagctcagggttgttttctgaagcgaaaatgcaggcagatgagcataggctgagccagattcccagaaaagtaacaatgggagctggtctccagcatagaaagcagccgtccttcttggtggggggtccttctcctaggaagaagcctatatcccaaaggaccagaagtattcattcctgcatgactcccagacctccttctgcttctcagactctattccgacaccctccaacatggaggaaacgcagcagaaatccgtgagtggatgccgtctcccctaggcggggatgggggagacctgtggtcagagctcccgggcagcacagccactgccggtccttcccctgcagaatctagagctgctccgcatctccctgctgctcatcgagtcgtggctggagcccgtgcggttcctcaggagtatgttcgccaacaacttggtgtatgacacctcggacagcgatgactatcacctcctaaaggacctagaggaaggcatccaaatgctgatgggggtgagggtggcgccaggggtcaccaatcctgcaaccccctggcttcgagggctgggggagagaaatactgctgccctctttttagcagtaaggcgctgacccaagagaactcaccttattcttcatttcccctggtgaatcctccaggcctttctctacaccctgaaggggagggaggaaaatggataaatgagagagggagggaacagtgcccaagcgcttggcctctccttctcttccttcactttgcagaggctggaagacggcagccgccggactgggcagatcctcaagcagacctacagcaagtttgacacaaactcgcacaaccatgacgcactgctcaagaactacgggctgctccactgcttcaggaaggacatggacaaggtcgagacattcctgcgcatggtgcagtgccgctctgtggagggcagctgtggcttctaggtgcccgcgtggcatcctgtgaccgacccctccccagtgcctctcctggccccggaaggtgccactccagtgcccaccagccttgtcctaataaaattaagttgtatcattt

SEQ ID NO: 64 - DNA, 15640 bp, Homo sapiens
ctcccctgaagcaggccataaaagaatcctctgacgtttctataaagtaggtcataagaaccttcattccagaagtaccctcaaagacagagacaccaagaagaatcggaacatacaggctttggtaagttccctacagtttattaatgttcagtcatttcagatcatactcctttttggacaattgtatttctacatgactgtccactttttatcaaccttaagcataaaaatacacatttctctgtttctttggttcttcatttctgaaggctctttttcatgtaaatttatattgaataaatctgtacgtttttcttttgttactctgtcttttgttataggactgtcaggcataaacctatctatgggcaagaaacggaatctcttctcccctacaagatatgtcacttgtacataagcatttaattgggatttgccatttttagagaaactgagtcttttttatttcaataagtagatttatctcaatatacttgattttattctgcctcctaattgcatatttttgttgcctacatatcctttttttttttctattttctgttaaatggaatgtcttgtgttctgggtgtgtgagtgtgtgtgcgtatgtgtattttctttttctgacaacttaaaaggtttacgatctgttttccattttttgaagggttatagtcagaactttgcatcatttgttgaaatcgtaactgataaaaaatcagcttgactatatctattgattctcagatataaaccattttttaaaatgaacatgttcatacttccttccactgttgataacaagtgtattttttagtttctttttaatcttattttccatttattttattagcattagtgagatccatgattctgtgatctgcctttcccataaggcttcttcaacagcttgaacttttacattcccatatatcatttaaaagcctagtattatacttgtttgaattactgttggacatcagagcattccatcaaagaattaattcttatttatatgtccattttcttctaggtcaaccccaatggtaaaaagctttcctaaaaaaatcatccctttggttatactgataagacatgaatgaataaataagaaaaaaaaactaagcagatatgtcacagctaagatattttagacaaattctaacaaaaatgtattggaggataaagggtacgtaggctggatttgaagggtagcattttctctgaagagcctgctctacttttcagtctgaatcttttcaatacaggcaaaaaaattggcagtgggggaagttaggggtaatagtgtgtcagcacatgcatggccctaagagttgttacaatatcaaaatacttagtacagactcacttccctgactttccaagtgccctgattcctctagactcccccagcccctcacataggtcaacccctacagtctcaccactatgaaacaataaaaacatcaatgcctatcatttcagggggcctcaggcaccctgatctatcgctatagctttctgttctatttgatggtgcctgtgctaattagaattttaaattataaaatttaaaattatcccgggaagtaagcatggctgagagtcccatttcctattagataacaataagagatgattaacagataggtaatagataagtagatagatagaccaattgatccctagctagaagtaggcatgcttcagctctactttccatcagataagaaatgtgtgtgcctgtgcacatggacagaatattgaagtgtgaggaacctttcacaaggaaagttatcatccatctcacttctgattagcatacagctaaatatttaattcttttgcctaaagaaaacataactctcaaagagtgagatttacgtttgtggagactctggacatgtcatccttaaatctggcattattttatatcaggcattaaaatgtgtacaaaggcacacatgattcagaacaagcacgtgacatacaattcatagagacttcatagaactagaccagaggatatgaatagtatagcagtaattaaaagaaaaaaataagaattacaggggaaatttccaaatgcttccactatggttttcttatttaaggagtaaatgccctcaaggcactgacaacagattaagaacttgcattcactgagggaaactgatgacctccaaagccctagcaaaaacaaacactgaacatgaacacttccaaaaaaacaaaagcatgtcttattattgttaaaagaaaaaactttagataaattaattttagcagagtttaaacgagcaaagagacaattaatgaatgaggcagcaccctaaacgagtaatggtttagagagctccactctgcaaagtgggcaggcagtatttacagacagaaaaataaaatgacaaacagaaatagtgtcattgattacagctccttctttgccttatttggacatctgagcagtttgtagcctgtaactggctgaaagctcagctgctaagattggccaagactcagctacttgttacaagaatatattcttaatttaggttgcagtttgtttacatactaagttagattgcagtttactgaaaatggggcagcattaggccaaattcaattcaacaatatgtatgaagttaatctaaatagtaggatgtaattaagtcattgcattttgcttattctaaaaatagtgccattcaaaaaaaaccactattgatctcttctccaatgtgccctttacattgtctaatattttatattgaaaacagcacacgtcctatttaattttttagtcattagaagacgactattcagaatttttcaattcatagacaatactcctttaatcatttcatatttcattttatttaagacaattcactactaatataaattgaaatatctttgtgatacattcattctgaggatttttttaactcttaatttctttcactctttaatatcccttagcatattttgcagtagacacctcctaggttatgtgaagaaatttttttttgtttttttgagatggagtctccctctgtcacccaggctggagtgcagtggcgtgaacttggctcactgcaacctctgcctcctgggttcaagcgattctcctgcctcagcctcctgagtagctgggactacaggcgcctgccaccacgcctagctaatttttgtatttttagtagatacagggtttcaccatattgatcagactggtgtcgaactcctgatctcttgatcctcctgcctcagcctcccaaagtgctgggattacaggcgtgagccactgcgcccgccctgtgaaggattttaaatatactttgcttcatacgtgacagaagaaaaaacaaaattattccaaacttaaaaacagataaacaaaagaaaatacaaactttgttctaaattaggaataaaaaccaacctgatgttacttaatgttaaaaactagcgttctttagaaaagatggcaaccttgtttattagtttcaggtactaaacatagcatgggaactttagcatcatttgagctatttattcagctacttgacataaatcaatcatcacccctcagttgcatcacaagctctcagaccaaaaatggcaaacaaatgaagttttgtaaagttttaaaatgtacaaccctattcttactgaacttctttattgttttaaattaagggcacagtttgataaagagaaagcctggcaagaaagcacatataaaaattaaggtgaaagggggtaacatgcatagcagttagaagaattaggacaactatgatttttgcataatatatgtctttgcattatttatatatttcaatattccattcacaggaaatgtggggctatggagcagcaaggagacacacaataaattttacagagaaacctgtacctctttgcagtcaaataaatcgactgacagaccctgaataaacacagcttaggttttcttagattgctcttatcctggctatccaagaatgttgcaacacctttaaattttaagattaagttgtcattgtcagttcttataacagattttcttactcttaagtttatgggagaggaggagaatataggataatgttaatttctctgccacacagctctgctttcttaataattcagactctctccatccagggaaaaaatgaatacctaatgtgagtatatggaatcctgacccagctttcagattgagagagtctatgaatcatcacatttgatgtttatgattcaaaatgtaggattgccttaaactaaggcaattaggaagatagtttttcagagacgttagtctttgttaagatttctaggtccccataagagcacttagtcagataattgctaaagcacatatgtggctctaggaactaaggaaaaagtaaatgccataggaagactattttttaaattacctcattcatcagtctattgtaagagacagcaaatttgaaactaaaggtcacaggctgctttagatgcatggacttaaaaattagagaaagtcatcaataaaacttagttcttattcattatagtcatttcatttaggaaatttccaaaaggtgaatggaatttttaagcccatgaaagatgaatttttgtcaccttggcctcagagtggctcagggtcagagaaggtagagagatcataagttaataacagtttacacactgctatccttgaaaagagtggaaattactggctagaatttcagtttattacatggtataccagaatgatgggtgtaagtgtgtctgtgtgtgtgcacacacatgtgtgtttgccctggaaaactactgcatcacttccccaaaataaactcttaaatcaggggttatagcttgtttgtcttagaagtgggtccacaggatgtttacaagagaattcatttcccagccttcctcatatgactcctgattttccgtgaagtaataattgttccttcatttaactcaactatagaattattaggctggtgcgcaagtgactgcagtttttaccatttaaaagtaaagcccaaaacctcaattacttttgcactgaactacttctttcatattctttacctttagtctctccaagcttctgtttcttcatctgtaaactggagagaataataccacttaacacatatgttaaaatcaaaagaaataaacagatgaagatgtacattcaaagtaccatacagatacgctatttttaaaaagacaaaacacatgtatttttaaaaagacaaaacaaaatgtgtatttcaaaaagataaaacaaaatgtaaaaagcaacaaaatgaaggaaatttaatgacagtgtaacaggggactgaaaatcctgatttctcaatccttattctatatctcttggtatttagtgtaaaaattttaaaatctttacctagcaatcttgaggaagaaacttgataactgataatacatgagattgttacctaagtgaaatataatcctatatattcaacaaactttagagaaataagataaattttaaagtaaatgacttctgtagttttatagatcctccaaaccaatctagtctcagatctcaccttcatcatttctctcatttccttttggcctaattaatcaaaatccttcctagaatgttcatttctggccagtatgtcttcctgaatatgaataagaaataaaataccatttgatgtttgaaattatgggggtaatctcaatgacggaaatagatgaccaggaaaagggaaacgaatgcctgattcattatattcatgaagatatcaaaggtttataaagccaatatctgggaaagagaaaaccgtgagacttccagatcttctctggtgaagtgtgtttcctgcaacgatcacgaacatgaacatcaaaggatcgccatggaaaggtatgtgtgacaactcactgcgttgttggttgtatcaacactcctgtggggggattaatgtgaaattttaactaataacaagagcttgcaggtttacaaggtttagaagcacaatcttatgtttcctctagaaagcaattttacaagggcaccatagaacagaacaatggttctcaaacaggggaatcctctctcagaggcatttggcaatgtcgggagatgttttgggttgtcttaactgaggtggggaagtgagggaaaagtgctattggtatctaatggatagtgatgagagatgctactgaacatccttcaatgcacgggacagcccccagaacaaggaattattcaactcaaaatgccaataatatcaagattgagaaactctggactagaataagactcaaagagtctgtgggtccaatttgccacaactctcaaagggacaaagtaacattttctggttatcaggcctctaatgtggattggccaacttgaatcaacctgatgaaactttcaattgtgaagccataaaatagacactaacaacagaattgtctttcctattctttgtcaatttggttcaagccaaatgacatttcaaaaggaaaaacagactgcctagtaataactaatcacctttactttcttggttgacatttgcaaggaaaataaattagtaacaaccataaaatgtgtttctaattaaatgaagaacaaaaacatgtgtctattttatctcgttttgggctttaaaaatcctttccatgctaaatgtgcagataaatgtactcagagttacagaacatctatccagttgtgaatttcctagacctgctattccaattcctctatctacaaagcacattttatttacacatacagataaaatatacatttggtttcgtcatatgattatagtatgcataaaataaactttttggaagaatcatgtttttgaaaaattaaaagtctataataggaatcatctcaaacaaaaattttattttacaactaacagatttagtcacttcctacactaagcaattttttaggtatttttaagtgtttaggtttaggtactttttcacaaactaaactttagcatttgcctagttttatcttgggcatttctgattgcatttcttaaaggttttgaaggacttaagttttgtgataaacacagttttatattgggcattcttttggggtaatgccactgaagttaacaagtgattttaatttggtagctatctatcgtttctttccttttgaaagtataaattattgatatatataggactgtaactgtccatttgctgagatagcaaattgatgacaaagctttgaaaaccttcagcaaagatcagagtgttttgtaattagagcaggaaaagtggagaaaatcaagctttctggggcctctgttgtgatgtaatcaatcaaaggcaaagaacttgttattctttaaaagtgacagcaacaacctatgtaaacactgagccatcacggctactcatgcggcccccattacacagatgcagattgacagcccacaggtgtacgcgatgtgacaagacgacgtgcaaagaccacagtattggcatcatgcctctctcacccactaatgatacgacttggggaaaatcacttaacctccctaagccatctgtttcatcagtataatttgatgataattacaaaggcccagtgtatctcacaaggttattatgaagctcaaatataaaaaaaatttaatgtttttggcgaagtgtcaaacacatgcatgggactattacgagttagcagatctaaactacagcattatttttatgttagaattcttttcaaactcagtattagcaatcaaacaatcgtgtgtttattcttatcaggcaggatgataaatcgaaaggatcgactgtactgtttttgttatatcagtgtctacaatgtaaattatcagacacacctagttaaaaaaaaaattacaaagtgctgggcagcctgactgctgaaaatctgcagaaactcccaagacattaaactatcttaagagaatgatccaaacaccctagctcagaattaatttaagctccaaatgtttggaaagtacagaagcacttctgggaaacgtacaaaaatgcaggaggtaacccacttctcaaactatatatctgtgcaaacataattatatatctacatttacacagtggaaggcgtttgttcttcccccatcccagccattacagtagcaaatcaggcagctgagggcagtggggagcaataaggctttcctcggcaggattacttctgaaaacctccgtggaataaatcatctcagagtggctcgcgttcttatttaagcagggtccctcctgctgctgctggtgtcaaacctgctcctgtgccagagcgtggcccccttgcccatctgtcccggcggggctgcccgatgccaggtgacccttcgagacctgtttgaccgcgccgtcgtcctgtcccactacatccataacctctcctcagaaatgttcagcgaattcgtaagtaccatgcttctggcttcctccctgaaggagccttcacatgaactactgggctctgctacatgttaacctagaaaacctcccgagccaaatttcaaacgatacattttaacatgtgaaagaagacaccagctcataagatgtggaacaagaagaaagggacagtgccatgaaatctcaaagattctcaaagaatgtaatgacttaaattttttctttaattcactttattttttaaaaataaaaaaatttaaacacctgacctaaagcatgtttaggtggggctgaggagaaggaagagtgttgatttcttgttcttgaatgtagaggtcagactccacaggcattctttacttagcacggaatagatatccaataatgaagaactgcactgcagcaaattgggtggattgaatagaattaaactgagctgaatccatggtggggaaaatatacaaataataacttttcaaaaaccccaaaatgctagaaatcatttctctgagatttcagtatatgggtttataattacaataaagggctagtttagaattggaaaccagtgcttttttctttcttttcctcccttccttccttccttccttccctccttccttccttcttcccttcccttccattccccttccttccttccttgcttcccctccctccctcccttgttccctccttccttccttctttccttccttccttccttttttccttccttccctccttccttccttccttccttccttccttccttccttccttccttccctccttccctcctcccttccttcctcccctccttccttccttcctccctttcttttctttttcagaaatatgtactctatttctgaataacctattttggaaatcataggttaactcttctaggtcaatcaaggagcagacaatagattagtgctttaataaatcaagggcctccacagagaataaacatacatttataaaattatttttactctctgatttcgctttcatcctccatttttgactggccatcttttgtcttccaaatcttcctagtaatttctttagacttttataagttttgctgaagactagtctttcctgtcaatgtgtcagctcattttttattctgttcttatcctcagtccattgtttatatttcctaaaattgtgtgccctgtgtttctgaattattttgtcataatttaaaaaaaagttgtgttccgtttctatcatgaacttggtaaggtataggtgtgtggactcagagaaactttttagagaaaagttatgattttataatgcctattaagagaagtctatcagtttgggcacacagtaaataagagattaaatgaatacatgtaaatacatttgcactgtggcatttggctcaaatgctgaagaaagatgattctcaatacaacatttaatgttgcatatttttgctatttttagcatttgctttccaaatagcaactcgtgtgacttgtgtgaatggtaaaagtaaacaacaagggaattgcaaagaaggaaaaacattgatatttatgaaaactagatgaaaaaatgagtttacagagataatgggggggaagtaggcgaaagggttactttcttaattctttagttttcatttttatgtagctctaattttttaaaattacacatctgccaaaggtattagtattctgctaatggattcatttattcaatgcccaaacaaccccaactaattgaatttgtctcatcatttccaggataaacggtatacccatggccgggggttcattaccaaggccatcaacagctgccacacttcttcccttgccacccccgaagacaaggagcaagcccaacagatgaatgtgagtccttcatccaggctttgcaccaaaacaaccaaggcagtatatgggtattatcatggtgataggtgctgtaatagctagtggtaattgtacatgcagagaaaaatataggaagaataagcagtcaaaaaattacattatgtagttgatgaaatatgagtcaaatcaaatgctaagtaaagatggtggcagcaatctaaatagcagatccgtacattgtccttgcagataacattattttaaccaatgccttgtcgctaggattgtatatacagtttatgaaagtttgaactgaattggacttctgtgagtaaatatacatttatgcatctgtaagaaaaagaaatgcagttttatttattacatattactcgtgactcctacatcaacagcatgttacatgactgacccctgcactattggagccatctgttctggactttcaagactctactctggttctatttctgctactctgacacccactttttcattcttcactgactcttctgccctctcttacttcttagttaaaagtcaccactcccctcacaaaaaatacagatcctgtaaaacataatattttgcttttcacagctacagttgccactgttctgatgactacaaagtctgtatatcaagcctcaatcatgtatctcagcttcaatcttctattgctatgatctcttccttttggttgtctaccataatcacagccttaacatgatttaaaacaaacatctttatatgcatgccacctacaaattcaatgtattctccatttacaagtttaggaatggcaccaacatttctgtctgctatgttcattaataataattatgataataagagaaggaggagaaagagaaaggggagaaggaggaggaagaggaaatatttattgagatctacaggttatcactaaccagaaatcccaaatactgaagaatcctaagttttttgagcacctacatgatgctaaaaaaaaaatgctcattggagtatttcagatttcagattttctaattaggaatgctcaacttgtactacattgtcagacactttgtgggcattactatatttaatcctcataaaaatcctataacacaaggtactgtcattacactcactgagataaggaaactgaggctcagaaaggttatggaatttgcaccagtcacatggcaagtaagcagcgagcctgggcttcattctattcaaaacccttactcttaatcgttgtgttgcaatgctcccagaaaaactacactgacactcactttatgacctgtacctctttatagctcatttctttcatatcctcttacatgtttccattgcaatgtccatttatttcttctttattcttcattttgttaccactagactagttcacggacatctacaaagtaagcattttaaatcagagataatcagctacttggagtctcctacacgatcgtggtagtaagcaaaacctaggcaggcagaactccattgtgaattccatggttattcaagataacattggttccattttatttacctgcataggccaagagaacagactgctctgccagcagcatggggcaggcggttgtgtagatcaaggaaagcatgttgatgaattccatgtcatcttcattgtctcttcgttctaggatcccaaaataaaactacaaatcaaaaatgaatagttcgatgaacaatttgattcattagtatgaacgaatgcttggatgagagtgatttgggccccttggcatggaccccagtggaatctatttctcatgagtcagatactctgggcacctactgagtttcggcaaaactttagtttctccccagggacaagcaaatcaatcaaatacgaaagatcttactaagtggacagatggtagaatttcagaggaaaaacaaaattcttcattttatcaattagaactctcattagaaaaagtggttactgaaataagccggatttttttttaattttagcaaagtttaggccaatagtttcaattttacatttctacaaattctctcacctaaagaaaaatgtacctacacataggaataaaaaaagatatttcagtacagcctctctaagcaaaaatcacaagtaactaaccccattgtattttacctattttaatgcaattgttctatatggtttcgtagcaaaaagactttctgagcctgatagtcagcatattgcgatcctggaatgagcctctgtatcatctggtcacggaagtacgtggtatgcaagaagccccggaggctatcctatccaaagctgtagagattgaggagcaaaccaaacggcttctagagggcatggagctgatagtcagccaggtgagcagcctcctggtgcttctttgtttttctcattaatataagcggtgacctctgtgatgataaatatttccctttgaaagaaggaaatttaggcattccatattatagaccgctattaaataaagcaagagcctagtcattcatagtcataaatttacatacatgtaaatgaatcttagaatgctgtttgacaggtgtcattttccctacacctacacgcaaaactacaaaagacttgccccttcctgaggacaagaagttaagtgttttcaagggagtgaaaactagagaatagaatctgcaagatacatgctttctgcagggtatcccaggacacccactattgaaaattctttctcttttctcccctcgccagaggatgagagtgggaagggagaaagaagaaaaccaaaatcagattggatgggccctcagccactcaccccgatctgctgcacagacttgtcagggaggagcagatattaacatgacaagacaatgacatcagtgcacacaggttgcattgatttcaggaggtcccacaagcacgagattgcagggagtcacaaaagaaggagatataccttttctggaatgtcttcattttgtaatttatagaaagttgtctcattctaaattttgttttttcttgggactccaaagtcaaaactcatgtcattgtacttaatctcccccaaataatctgtcatatttagattgtgttagtatttgcaatagatatctccattcagatgggataatttcaacattagtgagataatacctaaacagcttctgaggttttcagggataatgtaccatctaaagaaaaatatatgattataggaataataacaggaacaattttgtatttctctttttgtgtactaagtacatgttatcatgtatcattttggttattttcatgcgagaaaaatatgtccaaaacaaacacaaagcacattttaaccttggaatgtgtgaaataaataccttgattttccagttattttcttcattactgtaaacctcatttctgaggtcactaatttgttctatagtacttcattttctgttcttttttctctaccacttatttaagtattcttgttcatatcattatcccttacacagtaaattttgtcttagggctcaagtaccaaaaattaaaaataaaaacataaagccagtcaatgaatacacacacgcacacacacgcgcacgcacacacacatgcacacacacgcgcacgcacacacacgcgcgcgcacacacgcacacacacgcgcacgcgcatacacacacacacactttaaattccaatagggaatcccagatttgaaaaatattctcactttgtaggaaaaggtttagcagatcggcgtctacatccagatatatacctaataactctccaaactagctgacatccctaaagttgctaaaatggttacttggtctctaagacctctgggctttcctggtttgcaaaggcttatagagtgtgaagaaacatagcatgccctctgttgtgctgttcagcctccttttgttatcacagccatgcccccaaccctaccacacagccctcaccactgaagggttgctgccagcaaccccctgacctttttttttttagacaagttctcactgtgtcacctatgctggagtgtagtggtgtcatctcggctcaccacaatctctgcctcctgggttcaagcgatcctcatgcctcagcctcccaagtagctgggacaacaggcgtgcaccaataggcacggctgatttttgtatgtttttgtagagatgggatttcaccatgttggccaggctggtcttgaactcctgacctcaagtgatccacctgcctctgcctcccaaaatgcgtgaaccagtgtaagccaccacacccggcctgtaccctttccttgtaggtgcttttcccggcacctcccagcccagggacctcaaaagaaagcaattgtttcccctagaaatttgaggaaatgaaaatctcctgactatgtaagcagcttttcttagtcatggtcatcactaaattatctgtaccccaaagcatcaagtgtgagtacaatcttcatcttttttaaagtttttggaacatacactagataggcaatagattgagttcaaagcaggaagaaaataaatgatgtcaggaagaataaagcacaagggatacatcagggacaagactggagaaatgaaatagttcctcaagtgagagcaccgaagctagctactccattgtctcttcgtcaaatctatgtcaatatttacatagtacctttccagttcttcatctgtctactcctgcaaaaacatacttcatctgtgatcccatagatgtcagagaacctaaacaggtattctgcttctagtttttagattaataggtttctgatacactggcccagatatacaaaaatcattgcctttgtctaaaactttgcattcatatctcattctcaattcttaattcaacagttagaaagaacaaggacatacaaatactaataatatgaagaataagtcactctttttttgtgtgattaggttcatcctgaaaccaaagaaaatgagatctaccctgtctggtcgggacttccatccctgcagatggctgatgaagagtctcgcctttctgcttattataacctgctccactgcctacgcagggattcacataaaatcgacaattatctcaagctcctgaagtgccgaatcatccacaacaacaactgctaagcccacatccatttcatctatttctgagaaggtccttaatgatccgttccattgcaagcttcttttagttgtatctcttttgaatccatgcttgggtgtaacaggtctcctcttaaaaaataaaaactgactccttagagacatcaaaatctaaaatg

SEQ ID NO: 65 - DNA, 15479 bp, Pan troglodytes
ctgacgtttctataaagtaggtcataagaaccttcattccagaagtaccctcaaagacagagacaccaagaagaatcggaacatacaggctttggtaagttccctacagtttattaatgttcagtcatttcagatcatactcctttttgtacaattgtatttctacatgactgtccactttttatcaaccttaagcataaaaatacacatttctctgtttctttggttcttcatttctgaaggctctttttcatgtaaatttatattgaataaatctgttcgtttttcttttgttactctgtcttttgttataggactgtcaggcatgaacctatctatgggcaagaaatggaatctcttctcccctacaagatatgtcacttgtatataagcatttaattgggatttgccatttttagagaaactgagtctttttttatttcaataagtagatttatctcaatatacttgattttattctgcctcctaattgcatatttttgttgcctacatatcctttttttttctattttctgttaaacggaatgtcttgtgttctgggtgtgtgagtgtgtgtgcgtatgtgtattttctttttctgacaacttaaaaggtttacgatctgttttccatttttctaagggttatagtcagaactttgcatcatttgttgaaatcgtaactgataaaaaatcagcttgactatatctattgagtctcagatataaaccattttttaaaatgaacatgttcatacttccttccactgttgataacaagtgtattttttagtttcttttaaatcttattttccatttattttattagcattagtgagatccatgattctgtgatctgcctttcccataagacttcttcaacagcttgaacttttacattcccatatatcatttaaaagcctagtattatacttgtttgaattactgttggacattagagcattccatcaaagaattaattcttatttatatgtccattttcttctaggtcaaccccaatggtaaaaagctttcctaaaaaaatcatccctttggttatactgataagacatgaatgaataaataagaaaaaaaaactaagcagatatgtcacagctaagatattttagacaaattctaaccaaaatgtattggaggataaagggtatgtaggctggatttgaagggtagcattttctctgaagagcctgctctacttttcaatctgaatcttttcaatacaggcaaaaaaattggcagtgggggaagttaggggtaatagtgtgtcagcacatgcatggccctaagagttgttacaatatcaaaatacttagtacagactcacttccctgactttccaagtgccctgattcctctagactcccccagcccctcacataggtcaacccctacagtctcaccactatgaaacaataaaaacatcaatgcctatcatttcagggggcctcaggaaccctgatctatcactatagctttctgttctatttgatggtgcctgtgctaattagaattttaaattataaaatttaaaattatcccgggaagtaagcatggctgagagtcccatttcctattagacaacaataagagatgattaacagataggtaatagataagtagatagatagaccaattgatccctagctagaagtaggcatgcttcagctctactttccatcagataagaaatgtgtgtgcctgtgcacatggacagaatattgaagtgtgaggaacctttcacaaggaaagttatcatccacctcacttctgattagcatacagctaaatatttaattcttttgcctaaagaaaacataactctcaaagagtgagatttacgtttgtggagactctggacatgtcatccttaaatctggcattattttatatcaggcattaaaatgtgtacaaaggcacacatgattcagaacaagcacgtgacatacaattcatagagacttcatagaactagaccagaggatatgaatagtatagcagtaattaaaagaaaaaaataagaattacaggggaaatttccaaatgcttccactagggttttcttatttaaggaataaatgcccttaaggcgctgacaacagattaagaacttgcattcgctaagggaaactgatgatctccaaagccctagcaaaaacaaacactgaacatgaacacttccaaaaaaacaaaagcatgtcttattattattaaaagaaaaaactttagataaattaattttagcagagtttaaacgagcaaagagacaattaatgaatgaggcagcaccctaaacgagtaatggtttagagagctccactctgcaaagtgggcaggcagtatttacagacagaaaaataaaatgacaaacagaaacagtgtcattgattacagctccttctttgccttatttggacatctgagcagtttgtagcctgtaattggctgaaagctcagctgctaagattggccaagactcagctacttgttacaagagtatattcttaatttaggttgcagtttgtttacatactaagttagattgcagtttactgaaaatggggcagcattaggccaaattcaattcaacaatatgtatgaagttaatctaaatagtaggatgtaattaagtcattgcattttgcttattctaaaaatagtgccattcaaaaaaaaccactattgatcttttctccaatgtgccctttacattgtctaatattttatattgaaaacagcatacgtcctatttaattttttagtcattagaagacgactattcagaatttttcaattcatagacaatactcctttaatcatttcatatttcattttatttaagacaattcactactaatatgaattgaaatatctttgtgatacattcattctgaggatttttttaactcttaatttctttcactctttaatatcccttagcatatcttgcagtagacacctcctaggttatgtgaagaaatttttttttgtttttttgaaatggagtctccctccgtcgcccaggctggagtgcagtggcatgatcttggctcactgcaacctccgcctcctgggttcaagcgattctcctgcctcagcctcctgagtagctgggactacaggtgcccgccaccacgcctagctgatttttgtatttttagtagatacagggtttcaccatattgatcagactggtgtcgaactcctgatctcttgatccgcctgcctcagcctcccaaagtgctgggattacaggcgtgagccaccgcgcccggcctgtgaaggattttaaatatactttgcttcatacgtgacagaagaaaaaacaaaattatcccaaacttaaaaacagataaacaaaagaaaatacaaactttgttctaaattaggaataaaaaccaacctgatgttacttaatgttaaaaattagagttctttagaaaagatggcaaccttgtttattagtttcaggtactaaacatagcatgggaactttagcatcctttgagctatttattcagctacttgacataaatcaatcatcacccctcagttgcatcacaagctctcagaccaaaaatggcaaacaaatgaagttttgtaaagttttaaaatgtacaaccctattcttactgaacttctttattgttttaaattaagggcacagtttgataaagagaaagcctggcaagaaagcacatataaaaattaaggtgaaagggggtaacatgcatagcagttagaagaattaggacaactatgatttttgcataatatatgtctttgcattatttatatatttcaatattccattcacaggaaatgtggggctatggagcagcaaggagacacacaataaattttacagagaaacatgtacctctttgcagtcaaataaatcgactgaccgccactgaataaacacagcttaggttttcttagattgctcttatcctggctatccaagaatgttgcaacacctttaaattttaagattaagttgtcattgtcagttcttataacagattttcttactcttaagtttatgggagaggaggagaatataggataatgttaatttctctgccacacagctctgctttcttaataattcagactctctccatccagggaaaaaatgaatacctaatgtgagtatatggaatcctgacccagctttcaaactgagagagtctatgaatcatcacatttgatgtttatgattcaaaatgtaggattgccttaaactaaggcaattaggaagatagtttttcagagacgttagtctttgttaagatttctaggtccccataagagcacttagtcagataattgctaaagcacatatgtggctctaggaactaaggaaaaagtaaatgccataggaagactattttttaaattacctcattcatcagtctattgtaagagacagcaaatttgaaactaaaggtcacaggctgctttagatgcatggacttaaaaattagagaaagtcatcaataaaacttagttcttattcattatagtcatttcatttaggaaatttccaaaaggtgaatggaattcatctttccatgaaagatgaatttttgtcaccttggcctcagagtggctcagggtcagagaaggtagagagatcataagttaataacagtttacacactgctatccttgaaaagagtggaaattactggctagaatttcagtttattacatggtataccagaatgatgggtgtaagtgtgtctgtgtgtgtgcacacacgtgtgtgtgcacacacgtgtgtgtttgcgctggaaaactactgtatcacttccccaaactaaactcttaaatcaggggttatagcttgtttgtcttagaagtgggtccacaggatgtttacaagagaattcatttcccagccttcctcacatgactcctgattttccgtgaagtaataattgttccttcatttaactcaactatagaattattaggctggtgcgcaagtgactgcagtttttaccatttaaaagtaaagcccaaaacctcaattacttttgcactgaactacttctttcatattctttacctttagtctctccaagcttctgtttcttcatctgtaaactggagagaataataccacttaacacatatgttaaaatcaaaagaaataaacagatgaagatgtacattcaaagcaccattcagatatgctatttttaaaaagacaaacacatgtatttttaaaaagacaaaacaaaatgtgtattttaaaaagataaaacacaatgtaaaaagcaacaaaatgagggaaatttaatgacagtgtaacaggggactgaaaatcctgatttctcaatccttattctatatctcttggtatttagtgtaaaaattttaaaatctttacctagcaatcttgaggaagaaacttgataactgataatacatgagattgttacctaagtgaaatataatcctatatattcaacaaactttagagaaataagataaattttaaagtaaatgacttctgtagttttatagatcctccaaaccaaactagtctcagatctcaccttcatcatttctctcatttccttttggcctaattaatcaaaatccttcctagaatgttcatttctggccagtatgtcttcctgaatatgaataagaaataaaataccatttgatgtttgaaattatgggggtaatctcaatgacggaaatagatgaacaggaaaagggaaacgaatgcctgattcattatattcatgaagatatcaaaggtttataaagccaatatctgggaaagagaaaaccgtgagacttccagatcttctctggtgaagtgtgtttcctgcaacgatcacgaacatgaacatcaaaggatcgccatggaaaggtatgtgtgacaactcactgcgttgttggttgtatcaacactcctgtggggggattaatgtgaaattttaactaataacaagagcttgcaggtttacaaggtttagaagcacaatcttatgtttcctctaggaagcaattttacaagggcaccatagaacagaacaatggttctcaaacaggggaatcctctcccagaggcatttggcaatgtcgggagatgttttgggttgtcttaactgaggtggggaagtgagggaaaagtgctattggtatctaatggatagtgatcagagatgctactgaacatccttcaatgcacgggacagcccccagaacaaggaattattcaactcaaaatgccaataatatcaagattgagaaactctggactagaataagactcaaagagtctgtgggtccaatttgccacaactctcaaagggacaaagtaacattttctggttatcaggcctctaatgtggattggccaacttgaatcaacctgatgaaattttcaattgtgaagccgtaaaatagacactaacaacagaattgtcttttctattctttgtcaatttggttcaagccaaatgacatttcaaaaggaaaaacagactgcctagtaataactaatcacctttactttcttggttgacatttgcaaggaaaataaattagtaacaaccataaaatgtgtttctaatgaaatgaagaacaaaaacatgtgtctattttatctcatcttgggctttaaaaatgctttccatgctaaatgtgcagataaatgtactcagagttacagaacatctatccagttgtgaatttcctagacctgctattccaattcctctatctacaaagcacattttatttacacatacagataaaatatacatttggtttcgtcatatgattatagtatgcataaaataaacttcttggaagagtcatgtttttgaaaaattaaaagtctataataggaatcatctcaaacaaaaattttatattacaactaacaggtttagtcacttcctacactaagcaattttttaggtatttttaagtgtttaggtttaggtactttttcacaaactaaactttagcatttgcctagttttatcttgggcatttctgattgcatttcttaaaggttttgaaggacttaagttttgtgataaacacagttttatattgggcattcttttggggtaatgccactgaagttaacaagtgattttaatttggtagctatctatcgtttctttccttttgaaagtataaattattgatatatacaggactgtaactgtccatttgctgagatagcaaattgatgacaaagctttgaaaaccttcaacaatgatcagagtgttttgtaattagagcaggaaaagtggagaaaatcaagctttcggggcctctgttgtgatgtaatcaatcaaaggcaaagaacttgttattctttaaaagtgacggcaacaacctatgtaaacactgagccatcacggctactcatgcggcccccattacacagatgcagcttgacagcccacaggtgtacgcaatgtgacaagacgatgtgcaaagaccacagtattggcatcatgcctctctcacccactaatgatacgacttggggaaaatcacttaacctccctaagccatctgtttcatcaatataatttgatgataattacaaaggcccagtgtatctcacaaggttattatgaagctcaaatatagaaaaaaaatttaatgcttttggcgaagtgtcaaacacatgcatgggactattacgagttagcagatctaagctaccgcattatttttatgttaggattcttttcatactcagtattagcaatcaaacaaccgtgtgtttattcttatcaggcaggatgataaatcgaaaggatccactgtactgtttttgttatatcagtgtctacaatgtaaattatcagacacacctagttaaaaaaaaaaaaattacaaagtcctgggcagcctgactgctgaaaatctgcagaaactcccaagacattaaactatcttaagagaatgatccaaacaccctagctcagaattaatttaagctccaaatgtttgcaaagtacagaagcacttctgggaaacgtacaaaaatgcaggaggtaacccacttctcaaactatatatctgtgcaaacataattatatatctacatttacacagtggaaggcgtttgttcttccccgatcccagccattacaggagcaaatcaggcagctgagggcagtggggagcaataaggctttcctcggtaggattacctttgaaaacctccgtggaatagatcatctcagagtggctcgcgttcttatttaagcagggtccctcctgctgctgctggtgtcaaacctgcttctgtgccacagcgtggcccccttgcccatctgtcccggcggggctgccagatgccaggtgacccttggagacctgtttgaccgcgccgtcgtcctgtcccactacatccataacctctcctcagaaatgttcagcgaattcgtaagtaccatgcttctggcttcctgcctgaaggagccttcacatgaactactgggctctgctacatgttaaccgagaaaacctcccgagccaaatttcaaacgatacattttaacatgtgaaagaagacaccagctcataagatgtggaacaagaagagaggaacagtgccatgaaatctcaaagattctcaaagaatgtaatgacttaaattttttctttaattcactttattttttaaaaataaaaaaatttaaacacctgacctaaagcatgcttaggtggggctgaggagaaggaagagtgttgatttcttgttcttgaatgtagaggtcagactccacaggcattctttacttagcacggaagagatatccaataatgaagaactgcactgcagcgaattgggtggattgaatagaattaaactgagctgaatccatggtggggaaaatatacaaataataacttttcaaaaaccccaaaatgctagaaatcatttctctgagatttcagtatatgggtttataattacaataaagggctagtttagaattggaaaccagtgcttttttctttctttgcctcccttccttccttccttccctccttccttccttcttcccttcccttcccttcccctccctccctccctcattccctccctccttccttctttccttccttccttccttttttccttctttccttccttccttccttccctccttcattccttcctccctttcttttctttttcagaaatatgtactctatttctgaataacctattttggaaatcataagttaactcttccaggtcaatcaaggagcagacaatagattagtgctttaataaatcaagggcctccatagagaataaatatacatttataaaattatttttactctctggtttcgctttcatcctccatttttgactggccatcttttgtcttccaaatcttcctagtaattcctttagacttttataagttttgctaaagactagtctttcctgtcaatgtgtcagctcattttttattctgttcttatcctcagtccattgtttatatttcctaaaattgtgtgccctgtgtttctgacttattttgtcataattttaaaaaaagttgtattccgtttctatcatgaacttggtaaggtataggtgtgtggactcagagaaactttttagagaaaagttataattttataatgcctattaagagaagtctatcagtttgggcccacagtaaataagagattaaatgaatacatgtgaatacatttgcactgtggcatttggctcaaatgctgaagaaagatgattctcaatacaacatttaatgttgcatatttttgctatttttagcacttgctttccaaatagcaacttgtgtgacttgtgtgaatggtaaaagtaaacaacaagggaattgcaaagaaggaaaaacattgatatttatgaaaactagatgaaaaaaatgagtttacagagataatgggggggggggaagtagccaaaagggttacttccttaattctttagttttcatttttatatagctctaatttttaaaaattacacatctgccaaaggtattagtattctgctaatggattcatttattcaatgcccaaacaaccccaactaattgaatttgtctcatcatttccaggataaacggtatacccatggccgggggttcattaccaaggccatcaacagctgccacacttcttcccttgccacccccgaagacaaggagcaagcccaacagatcaatgtgagtccttcatccaggctttgcaccaaaacaaccaaggcagtatatgggtattatcatggtgataggtgctgtaatagctagtggtaattgtacatgcagagaaaaatacaggaagaataagcagtcaaaaaattacattatgtagttgatgaaatatgagtcaaatcaagtgctaagtaaagatggtagcagcaatctaaatagcagatctgtacattgtccttgcagataacattattttaaccaatgccttgtcgctaggattgtacatacagtatatgaaagtttgaactgaattggacttctgtgggtaaatatacatttatgcatctgtaagaaaaagaaatgcagttttatttattacatattactcgtggctcctacttcaacagcatgttacatgactgacccctgcactattggagccatctcttctggactttcaagactctactctggttctatttctgctactctgacacccactttttcattcttcactgactcttctgccctctcttacttcttagttaaaagccaccactcccctcacaaaaaatacagatcctgtaaaacataatattttgcttttcacagctacagttgccactgttctgatgactacaaagtctgtatatcaagccccaatcatgtatctcagcttcaatcttctattgctatgatctcttccttttggttgtctaccataatcacagccttaacatgatttaaaacaaatgtctttacatacatgccacctacaaattcaatgtattctccatttacaagtttaggaatggcaccaacatttctgtctgctatgttcattaataataatttgataataagagaaggaggagaaaaagaaaggggagaaggaggaggaagacgaaatatttattgagatctacaggttatcactaaccagaaatcccaaatactgaagaatccttagttttttgagcacctacatgatgctaaaaaaaaatgctcattggagtatttcagatttcagattttttaattaggaatactcaacttgtactacattgtcagacactttgtgggcattactatatttaatcctcataaaatatcctataacacaaggtactgtcattacactcactgagataaggaaactgaggctcagaaaggttatggaatttgtaccagtcacatggcaagtaagcagcgagcctgggcttcattctattcaaaacccttactcttaatcattgtgttgcaatgctcccagaaaaactacactgacactcactctatgacctgtacctctttatagctcatttctttcatatcctcttacatgtttccatcgcaatgtccatttatttcttctttattcttcattttgttaccactagactagttcacggacatctacaaagtaagcattttaaatcagagataatcagctacttggagtctcctacacgattgtggtagtaagcaaaacactaggcagccagaactccattgtgaattccatggttattcaagataacattggttccattttattcacctgcataggccaagagaacagactgctctgccagcagcatggcgcaggcggttgtatagatcaaggaaagcatgttgatgaattccatgtcatcttcattgtctcttcgttctaggatcccaaaataaaactacaaatcaaaaatgaatagttcaatgaacaatttgattcattagtatgaacgaatgcttggatgagagtgatttgggccccttggcatggaccccagtggaatctgtttctcatgagtcagatactctgggcacctactgagtttcagcaaaactttagtttctccccagggacaagcaaatcaatcaaatacgaaagatcttactaagtggacagatggtagaatttcagaggaaaaacaaaattcttcattttatcaattagaactctcattagaaaaagtggttactgaaataagccggatttttttttaattttagcaaagtttaggccaatagtttaaattttacatttctacaaattctctcacctaaagaaaaatgtacctacacataggaataaaaaaagatattttagtacagcctctctaagcaaaaatcacaagtaactaaccccattgtattttacctatcttaatgcaattgttctatatggtttcgtagcaaaaagactttctgagcctgatagtcagcatattgcgatcctggaatgagcctctgtatcatctggtcacggaagtacgtggtatgcaagaagccccggaggctatcctatccaaagctgtagagattgaggagcaaaccaaacggcttctagagggcatggagctgatagtcagccaggtgagcagcctcctggtgcttctttgtttttctcattaatataagcggtgacctctgtgatgataaatatttccctttgaaagaaggaaatttaggcattccatattatagaccgctattaaataaagcaagagcctagtcattcatagtcataaatttacatacatgtaaatgaatcttagaatgctgtttgacaggtgtcattttccctacacctacacgcaaaactacaaaagacttgccccttcctgaggacaagaagttaagtgttttcaagggagaggaaactagagaatagaatctgcaagatacatgttttctgcagagtatcccaggacacccactattgaaaattctttctcttttctcccctcgccagaggatgagagtgggaagggagaaagaagaaaaccaaaatcagattggttgggccctcagccactcaccccgatctgctgcacagacttgtcagggaggagcagatattaacatgacaagacgatgacatcagtgcacacaggttgcattgatttcaggaggtctcacaagcgcgagatcgcagggagtcacaaaagaaggagatagaccttttctggaatgtcttcattttgtaatttatagaaagttgtctcattctaaattttgttttttcttgggactccaaaatcaaaactcatgtcattgtacttaatctcccccaaataatctgtcatatttagattgtgttagtatttgcaatagatatctccattcagatgggataatttcaacattagtgagataatacctaaacagcttctgaggttttcagggataatgtaccatctaaagaaaaatatatgattataggaataataacaggaacaattttgtatttctctttttgtgtactaagtacacgttatcatgtatcattttggttattttcatgtgagaaaaatatgtccaaaacaaacacaaagcacattttaaccttggaatgtgtgaaataaataccttgattttccagttattttcttcattactgtaaacctcatttctgaggtcactaatttgttctatagtacttcattttctgttcttttttctctaccacttacttatttattcttgttcatatcattatcccttacacagtaaattttgtcttagggctcaagtaccaaaaattaaaaataaaaacataaagccagtcaatgaatacacacatgcacacacacacacgcacgcacacacacacgcacacactttaaattccaatagggaatcccagatttgaaaaatattctcactttgtaggaaaaggtttagcagatcggtgtctacatccagatatatacctaataactctccaaactagctgacatccctaaagttgctaaaatggttacttggtctctaagacctctgggctttcctggtttgcaaaggcttatagagtgtgaagaaacatagcatgccctctgttgtgctgttcagcctccttttgttatcacagccatgcccccaaccctaccacacagccctcaccactgaagggttgctgccagcaaccccctgacctttttttttttagacaaggtctcactgtgtcacctatgctggagtgtagtggtgtcatctcggctcaccacaatctctgcctcccaggttcaagcgatcctcatgcctcagcctcccaagtagctgggacaacaggcatgcaccaataggcacggctgatttttgtatgtttttgtagagatgggatttcaccatgttggccaggctggtcttgaactcctgacctcaagtgatccacctgcctctgcctcccaaagtgcgtgaaccagtgtaagccaccacacccggcctgtacccttttcttgtaggtgcttttcccggcacctcccaggccagggacctcaaaagaaagcaattgtttcccctagaaatttgaggaaatgaaaatctcctgactacgtaagcagcttttcttagtcatggtcatcactaaattatctgtaccccaaagcatcaagtatgagtacaatcttcatctttttttaagtttttggaacatacactagataggcaatagattgagttcaaagcaggaagaaaataaatgatgtcaggaagaataaagcacaagggatacatcagggacaagactggagaaatgaaatagttcctcgagtgagagcaccgaagctagctactccattgtctcttcgtcaaatctatgtcaatatttacatagtacctttccggttcttcatctgtctactcctgctaaaacatacttcatctgtgatcccatagatgtcagagaacctaaacaggtattctgcttctagtttttagattaataggtttctgatacactggcccagatatacaaaaatcattgcctttgtctaaaactttacattcatatctcattctcaattcttaattcaacagttagaaagaacaaggacatacaaatactaataatatgaagaataagtcactctttttttgtgtgattaggttcatcctgaaaccaaagaaaatgagatctaccctgtctggtcgggacttccatccctgcagatggctgatgaagagtctcgcctttctgcttattataacctgctccactgcctacgcagggattcacataaaatcgacaattatctcaagctcctgaagtgccgaatcatccacaacaacaactgctaagcccacatccatttcatctatttctgagaaggtccttaatgatccattccattgcaagcttcttttagttttatctcttttgaatccatgcttgggtgtaacaggtctcctcttaaaaaataaaaactgactccttagagacatcaaaatctaaaa

SEQ ID NO: 66 - DNA, 7635 bp, Mus musculus
gaaagctgtggttctctcaggccatcttggagaagtgtgttcccagcagtcaccatgaccatgaacagccaggggtcagcccagaaaggtatgttctgtagcttagtgactatgtggctttctcagtattcctgatatggcataggggcatctactatgacattttacctaatacaggcttcaattttataggggtatggaaaataactgtctttctccagacatggaatgaccagaaccacccacacagacccaagacaactgtgacgttgtccaaaataactttgttccttattcatatctgcaaataaggaaaatacaaagataactggtttagagcaagagtggtggggttgttgatattccacagaaggagatgagaacatcatgggacacttaccttgtactccagctaagagtgactacccatgctgaggtcagtctcagagattcagttgtctgtgagttaacaatggagtttaaagtaatagcctattcattgatgtagaaattattcatacttaagcataacagactatgagatcagtggctctctagctggggagacacccttctacagagatgtgacacatctagagatatccagaagtgaatagtgatggcatagtggaagtaaggaagaaaaaaggaagctgctacttgtagctaatgggtagaaatcatggacacactgaatcccccactactgcaaactgatcctggaaacaagtagcaacccaggtcacaaagttggtgttgcagagactgggaacatggactgacacagacaagaagaccctagggtctaacagtcacaattctagaaggaagcaagaaagattttcttgctgccaggtctcactgagagttggttagtgagttctaataaatgtgacaaaatcttcagcaaggcaggaataatgcacatagtgatagcagggatctggtttatactgttctgaaattttgtttgaatagaagtggcatttcaatagaaggggaaaataaagaggctagtattaactaattgtctttgctttcttggtgacatttgaaaaaaaacaaaagaattaatagcaacataaaaagttttgtgacatatatgagaaatcccttctttaatttttatttcattttaaactcaaaacctctcagacaataaatgttcagattaatgtactctgttagagttagaaaacatctatacacttattaattgtaaaatctactgctgcagtaccattatcccgaaagcatattttttcacacatgtagataaactctgaagccttgaaagtataaacatatattcatatatattgtgttgtgtaaatatatttgaagtgagatttgggaaaattagaagtatttttcaagaaatatatcccaataacattgaaaatcttcagctagtgagctatttaacagtgctgtatagtaattttgtggttaacattgaattaaatattaaaaattcttagagaatgtgactactcaagaccagaagaaacttccacgatatgaaattgtcttaagacaataacttagtacactagcttagattaatttatactcagaatgtttgcaaagtgaacaagtacttctgagacaagtgcaaagatgacaaaagctacactccccacagcacatagctcggaaaatgttaatattgggtaaacataatgtgtagagtgttgactctcccttcactacaaatgcaagcacacatgtacggtgctgggggcagataaggttctcttcagctgagtagattattacacacccgttcctgtatttttttttttttttaagcagggacactcctcctgttgctgatatcaaacctgctgttctgccaaaatgttcagcctctgccaatctgttccgctggtgactgccagacttctctccgagagctgtttgaccgtgtggtcatactttctcactacatccataccctgtatacagatatgttcattgaattcgtaagtacttcactcatttctggtatcttttgaaaaggatctcttcaaaacaattctgttgtatttcagttaaaacaatgatctgcgacctatatcttcaagggaaaaagaaacaccggcttatagaagctggaacaaagagaacgggacaatttcatagtcttacagatttgcaaaagtgaagcgaccttcaatattttataatttgtgttttttcaatgtagacttgaggtgtgcagccctcgatgtagtggcagaagtcttcacagtctcgtatgtgtgagtccacgatctaggagactttttcatgtagtgctctgcaaacgccgatcgagcgaaggggagcagcatggcaggagtgaactctgtggatgggctagaattaacctaaactgaagccacgcagtaatgggaataaaaaaataatcagtcctcagacccaaacgttcagagccatttgttaaaactttcatagccggtctctctctctctctctttctaccttctctcctttctccctgcctttctacaataaagctctaaaaccatagacaaaccaacaaacaagcaaagctttcatggcatggtttcaattaaagtaggaagcctagttcagaggcagagaaaagtactctgttgttgattcaggccttttagaggccttacttgatttctttcagtcaattcacaaggcacttgtcagagataacttcagtacatcagtgggtattcagaaagtggtttatcacttacactaaatatgaattcataatgttctctttattaactaacatctctttcaattattgactgctcataattcacttctgaaatcttcctagaaattcttctaaatattcagatttttttactaaattttagtttataataatactttatacaagtaccaaccggggaacatatatgagacagatctaagtcctttaaacttatgtaacagttgtgtagtttggtaatcatggatgcctaactagaggaacccaggttgtctgattctgctgcctgcttttgagaccctttcccctaactgggctgcctcttctagcttcacctgttcttctgttgagaacttcacctggctttactgcaacttgatatgccaaggcctccttatatccatgagaagcctttcatcaagtaaaagaatggaggcgtgaatgggtcgggacattgggggaaggacttagaggatagaaaagaagataaactacagtcaggaagaaaagtaaataaataaattagctaattgaataaaaccaaacaaaacgaaaaatgatattatcaagaaagtaaaattcaatacaataaactagtaatggaagaaacataaattaaaattttagaacattattcaaatgagttaacatgaattataacttatatattaaataacttttctaattgaatttttcactgtttaatatttttcaaatatgtatgcctggtgttctatagttaacttagtcacaatccacgtccttatattcagcatttatgaagaatttagtcctgtgcaagttcatagattcagaagtatttgaatgaaaaactgtgttcaataatgcttaaatgaaagaatcatatcaatccaaaactacaggcacaataaataagtaaacaaaaataatacatgatatggcatttacctttaacatgagaaatgacatgtaaaggacatttttacatttaaggtatttttagtgtttactttctaaatagtaatttattaaaaaaagagaaaacagagaagtaaaaaattacagactaggctgggaaataagtagaaaagggttacttaattccttaattgtaagtgttttgctaaatttaaattaaatatctattaggtgcatggacattctggttatatatgttttaaatacccagactttgctaatggaatttctattacaatttctaggataaacagtatgtgcaagaccgtgagtttatggtcaaggtcatcaatgactgccccacttcttccctggctacacctgaagacaaggaacaagccctgaaagtccctgtgagtcctcagcccatgttcttcccgatatcagtgaggcagtacactggttttggtgtattccaggttatcagagcactgagatagctatagtaaagataaaagggaggggagacagtgattggccaaagcaaatacacattgcagggtgggggaaaaaaggggaatatttaacaacattgtagctgagccataaactgtccatgaagatgacattgcatatgtgatactgtagaaaactttgaactggacttcatgattatgagtaaattgacattcctatatataggaaatatgtaagaaatgcataagtaagaaatatcaatttagttgtgtttgtgctacattctgggaactcgtccattggcagtctccattactaactactgcacatcactcccgagcttgcaagttctcctggttgtgctcttccttacttaactacatctgcatttgtcccagacttctttgccttattctgtatcttatattgaaagtcccctcaccaagaagtatttgaaattttgcttttttgtgccttcacaggtataactggattctcatcggataataatgtcttaatgttatcgcaggcctagttattatttttatataccatgccataaccaatctcaacataactaaataaaaatatatacacaagagaattatgttatgggaaattcaaagagagactttgtctcaaaatggtttggtccacttgactgacaccagtgatatttatctttaatcaatcaatcaatcagctaatatatatatatatatatatatatatatatatatatatataaaatgtgtttgcatactatataatatatagagatttatatattttatttttattatatttacatgatatacatatatgcatgtctccaaaatgtgtatatctccattatgttctgcttaatttatcacatctcagttctacattcctgctattttcattaatattatagtgtaatagaagaaaaaatgaaataacaggctaaggaccaagagacaatactcagttaaaagtactctaatgataggaaatccacaacacccactaatgatgttcctgcaattcatcctctcaaaaattccatgttgcaatgtattattatttcacttgttgagataaagaacatgggatctagaaggtgatcctaaagttttatgagtttcgatactagtcggcctgcagtggtggcttcgtataactaaagatctcacttttctgcatatgttattatgctcccaggaagctatgttgtcattaccatttgccccttactttcccacctcaaaccttttatacttttccattttaatatctcttgaaatgctctctactcattattttcatttcatttgactaaataagtgatatctgtacagtaagtatttcaaatcagagataggttttatgtatattttgagagtgagcagacagctacttgtaggttaaaactgcgttgtggtttatagtaatgcttgtatttaagcacaatgctgtgttatttttcttcagttgtacatacaaccaatgagccattcttctagaggtgatggaaatcaagtcatgtacactgctgaaagcacattctacatcctctttttatagtttctctcttttaacattctaaaagaagaggaaaataatatattcatataatgataaatcttattctctagtgtgaaaatgatttgggttactagtcactgatgatggtggtatttatatttcccaagggcctcttgtaacccactaagttataatacccactgagtgccaccaatgctttgctttgttatgagcattcaaagtaatagaaaaagtagagcagaccatgaaggctgatggtagaattctagaggttaaccaaaacacaaagaatttgatactttagagaaaaaaaaatagtcatttaaaggctatgaggatttaagtcaattaagtatttctaagtaagtatgaaaatctgaatttgatgccaaaaccttactttaaaaaactaagcatgaatgtagccagacatggtgatgcatgccttgtatcctagcattcagtaggcacaagcaggtggacctcttgctctgcacttgatcttagcaaaaggctgagaaataataagtatctctgttctagatcataaaaacaaataaaatcacaacaaaaacaaaaacaacagaaaatcaacccatgtgatacttataatctcagcacaggaaatgtgaacacagtttagccagtcatcctaggctactgggaaagttccaggccagggagataccatatttcataatccaagatggactgcttctgagcaatgacaccaaaggttgttttctagtctccaaaaaaagcatgcatacccataaatatatacacacaggtacatacacagagagcagcacatatacacaaatacagaaatgaaagtagtcatataaacaagatattttttgttttactctttcaaagtatatgctaatagttgtttgactcctctataatattgtgatctaatcctatattaacacacatagttatgaaaatgaatattttcttcagcctctatgaacaaaacccacgtctaactaactctgttgtattttttacttgctttaattattgttcaacatggtggattagccggaagttcttctgaacctgatcctcagtttggtgcagtcctcgagtgaccctctgtttcaactaataactggagtaggtggtattcaagaagcccccgaatacatcctatcaagagccaaagagattgaggaacaaaacaagcagcttcttgagggagttgagaagataattagccaggtgagcagttccttgaaagttcagtgcttttccgactcatggaaaagctgatttctacaatgagcaacaaatcttgtaatactcttctttgtgacaagataaacaccttaaggaaaaaagcaagcacccgatctcctgtgataccttggtaaaagcccaggatctggttagccatctgtttacaaggacgagaataaatgtcaactcagaaacatagctatatatgttagtttaaacttttagatggctaattgacttgttggaccctactgatatatacctctatccatgagtttggctgaaatattacataggtctttccccaaaatatgaattctgtaattataagaactaaggatgcaaaaatgctcatatatgaattgaaattattattatttttttttctaattaggcctatcctgaagccaaaggaaatgggatctactttgtttggtcacaacttccatccctacagggagttgatgaagaatccaaaatcttgtctttgcgcaacaccattcgctgcctgcgcagggattcccacaaggttgacaattttctcaaggtcctgaggtgccaaattgcccatcaaaacaactgctaaacccacattcagtccatctctttctgagatgatccttaaaagtccacttcttcaaaagttttatttgctttatagttttcagtgcatgcttgggtgcaattggtctcctcttaaataataaaaacaaactttaaaaaaatgtcaaagtctgaaa

(The sequence listing continues in the following parts.)

What is claimed is:

1. A modified stem cell comprising (i) a reporter gene in operable combination with a potency factor promoter and/or potency marker promoter and/or (ii) a reporter gene in operable combination with a prioritized differentiation factor promoter and/or prioritized differentiation marker promoter.

2. A modified stem cell of claim 1 comprising a reporter gene in operable combination with a potency factor promoter and/or potency marker promoter of Oct4; Sox2; Nanog; Rex1; TEAD4; or Errβ.

3. A modified stem cell of claim 1 wherein the potency factor and/or marker is Oct4 and/or Rex1.

4. A modified stem cell of claim 1 comprising a reporter gene in operable combination with a potency factor promoter and/or potency marker promoter of Oct4 and Rex1.

5. A modified stem cell of claim 1 comprising a reporter gene in operable combination with a prioritized differentiation factor promoter and/or prioritized differentiation marker promoter of Lrp2; Dab2; Fgf5; Pdgfra; Sox17; Gata4/6; PAX8; NEFL; TSHR; Brachyury; Laminin; AFP; Nestin; Goosecoid; MEK1; MEK2; and AKT.

6. A modified stem cell of claim 5 wherein the prioritized differentiation factor and/or marker is Lrp2, Dab2, Fgf5, and/or Pdgfra.

7. A modified stem cell of claim 5 wherein the prioritized differentiation factor and/or marker is Pdgfra, Sox17, Dab2, LRP2 or GATA6.

8. A modified stem cell of claim 5 wherein the prioritized differentiation factor and/or marker is Brachyury or FGF5.

9. A modified stem cell of claim 1 comprising a reporter gene in operable combination with a potency factor promoter and/or potency factor marker promoter of Oct4; Sox2; Nanog; Rex1; TEAD4; or Errβ and a reporter gene in operable combination with a prioritized differentiation factor promoter and/or prioritized differentiation marker promoter of Lrp2; Dab2; Fgf5; Pdgfra; Sox17; Gata4/6; PAX8; NEFL; TSHR; Brachyury; Laminin; AFP; Nestin; Goosecoid; MEK1; MEK2; and AKT.

10. A modified stem cell of claim 9 wherein the potency factor and/or marker is Rex1 and the prioritized differentiation factor and/or marker is Pdgfra.

11. A method of detecting stress in stem cells comprising:
measuring the expression or activity of one or more of Oct4; Sox2; Nanog; Rex1; TEAD4; Errβ; Lrp2; Dab2; Fgf5; Pdgfra; Sox17; Gata4/6; PAX8; NEFL; TSHR; Brachyury; Laminin; AFP; Nestin; Goosecoid; MEK1; MEK2; and AKT;
comparing the measurement to a reference level; and
determining that the stem cells have experienced stress if the measurement is statistically significantly different from the reference level.

12. A method of claim 11 wherein a statistically significantly reduction in Oct4; Sox2; Nanog; Rex1; TEAD4; Errβ is indicative of a stress experience.

13. A method of claim 11 wherein a statistically significantly increase in Lrp2; Dab2; Fgf5; Pdgfra; Sox17; Gata4/6; PAX8; NEFL; TSHR; Brachyury; Laminin; AFP; Nestin; Goosecoid; MEK1; MEK2; or AKT is indicative of a stress experience.

14. A method of claim 11 comprising measuring the expression or activity of Oct4 and/or Rex1 wherein a statistically significantly reduction in comparison to the reference level is indicative of a stress experience.

15. A method of claim 11 comprising measuring the expression or activity of Oct4 and Rex1 wherein a statistically significantly reduction in comparison to the reference level is indicative of a stress experience.

16. A method of claim 11 comprising measuring the expression or activity of Lrp2, Dab2, Fgf5, and/or Pdgfra wherein a statistically significantly increase in comparison to the reference level is indicative of a stress experience.

17. A method of claim 11 comprising measuring the expression or activity of Pdgfra, Sox17, Dab2, Lrp2 or Gata6 wherein a statistically significantly increase in comparison to the reference level is indicative of a stress experience.

18. A method of claim 11 comprising measuring the expression or activity of Brachyury or FGF5 wherein a statistically significantly reduction in comparison to the reference level is indicative of a stress experience.

19. A method of claim 11 comprising measuring the expression or activity of Rex1 and Pdgfra wherein a statistically significantly reduction in of Rex 1 comparison to the reference level is indicative of a stress experience and a statistically significantly increase of Pdgfra in comparison to the reference level is indicative of a stress experience.

20.-30. (canceled)
